United States Patent Application Publication US 2011/0183924 A1 - sequence listing, part 182

SEQ ID NO: 445473 - DNA, 2031 bp, Homo sapiens
  misc_feature (1956)..(1956): n is a, c, g, or t
gggggcgtggcccggtcgcgtgacggggagtgacctcgccgccgggcgccatgggagcttcggacccggaagtggcgccctgggctcgcggcggtgccgcggggatggcgggagccggagctggagccggagctcgcggcggagcggcggcgggggtcgaggctcgagctcgcgatccaccgcccgcgcaccgcgcacatcctcgccaccctcggcctgcggctcagccctcggcccgcaggatggatggcgggtcagggggcctggggtctggggacaacgccccgaccactgaggctcttttcgtggcactgggcgcgggcgtgacggcgctcagccatcccctgctctacgtgaagctgctcatccaggtgggtcatgagccgatgccccccacccttgggaccaatgtgctggggaggaaggtcctctatctgccgagcttcttcacctacgccaagtacatcgtgcaagtggatggtaagatagggctgttccgaggcctgagtccccggctgatgtccaacgccctctctactgtgactcggggtagcatgaagaaggttttccctccagatgagattgagcaggtttccaacaaggatgatatgaagacttccctgaagaaagttgtgaaggagacctcctacgagatgatgatgcagtgtgtgtcccgcatgttggcccaccccctgcatgtcatctcaatgcgctgcatggtccagtttgtgggacgggaggccaagtacagtggtgtgctgagctccattgggaagattttcaaagaggaagggctgctgggattcttcgttggattaatccctcacctcctgggcgatgtggttttcttgtggggctgtaacctgctggcccacttcatcaatgcctacctggtggatgacagcttcagccaggccctggccatccggagctataccaagttcgtgatggggattgcagtgagcatgctgacctaccccttcctgctagttggcgacctcatggctgtgaacaactgcgggctgcaagctgggctccccccttactccccagtgttcaaatcctggattcactgctggaagtacctgagtgtgcagggccagctcttccgaggctccagcctgcttttccgccgggtgtcatcaggatcatgctttgccctggagtaacctgaatcatctaaaaaacacggtctcaacctggccaccgtgggtgaggcctgaccaccttgggacacctgcaagacgactccaacccaacaacaaccagatgtgctccagcccagccgggcttcagttccatatttgccatgtgtctgtccagatgtggggttgagcgggggtggggctgcacccagtggattgggtcacccggcagacctagggaaggtgaggcgaggtggggagttggcagaatccccatacctcgcagatttgctgagtctgtcttgtgcagagggccagagaatggcttatgggggcccaggttggatggggaaaggctaatggggtcagaccccaccccgtctacccctccagtcagcccagcgcccatcctgcagctcagctgggagcatcattctcctgctttgtacatagggtgtggtcccctggcacgtggccaccatcatgtctaggcctatgctaggaggcaaatggccaggctctgcctgtgtttttctcaacactacttttctgatatgagggcagcacctgcctctgaatgggaaatcatgcaactactcagaatgtgtcctcctcatctaatgctcatctgtttaatggtgatgcctcgcgtacaggatctggttacctgtgcagttgtgaatacccagaggttgggcagatcagtgtctctagtcctacccagttttaaagttcatggtaagatttgacctcatctcccgcaaataaatgtattggtgatttggaaaacaaaaaacacataaacatcctnattaattacatacaccccctccctcctctttggaaaaaaaaaaaataatttatataattcctttgtcgcccgctg

SEQ ID NO: 445474 - DNA, 2135 bp, Homo sapiens
gggggcgtggcccggtcgcgtgacggggagtgacctcgccgccgggcgccatgggagcttcggacccggaagtggcgccctgggctcgcggcggtgccgcggggatggcgggagccggagctggagccggagctcgcggcggagcggcggcgggggtcgaggctcgagctcgcgatccaccgcccgcgcaccgcgcacatcctcgccaccctcggcctgcggctcagccctcggcccgcaggatggatggcgggtcagggggcctggggtctggggacaacgccccgaccactgaggctcttttcgtggcactgggcgcgggcgtgacggcgctcagccatcccctgctctacgtgaagctgctcatccaggtgggtcatgagccgatgccccccacccttgggaccaatgtgctggggaggaaggtcctctatctgccgagcttcttcacctacgccaagtacatcgtgcaagtggatggtaagatagggctgttccgaggcctgagtccccggctgatgtccaacgccctctctactgtgactcggggtagcatgaagaaggttttccctccagatgagattgagcaggtttccaacaaggatgatatgaagacttccctgaagaaagttgtgaaggagacctcctacgagatgatgatgcagtgtgtgtcccgcatgttggcccaccccctgcatgtcatctcaatgcgctgcatggtccagtttgtgggacgggaggccaagtacagtggtgtgctgagctccattgggaagattttcaaagaggaagggctgctgggattcttcgttggattaatccctcacctcctgggcgatgtggttttcttgtggggctgtaacctgctggcccacttcatcaatgcctacctggtggatgacagcttcagccaggccctggccatccggagctataccaagttcgtgatggggattgcagtgagcatgctgacctaccccttcctgctagttggcgacctcatggctgtgaacaactgcgggctgcaagctgggctccccccttactccccagtgttcaaatcctggattcactgctggaagtacctgagtgtgcagggccagctcttccgaggctccagcctgcttttccgccgggtgtcatcaggatcatgctttgccctggagtaacctgaatcatctaaaaaacacggtctcaacctggccaccgtgggtgaggcctgaccaccttgggacacctgcaagacgactccaacccaacaacaaccagatgtgctccagcccagccgggcttcagttccatatttgccatgtgtctgtccagatgtggggttgagcgggggtggggctgcacccagtggattgggtcacccggcagacctagggaaggtgaggcgaggtggggagttggcagaatccccatacctcgcagatttgctgagtctgtcttgtgcagagggccagagaatggcttatgggggcccaggttggatggggaaaggctaatggggtcagaccccaccccgtctacccctccagtcagcccagcgcccatcctgcagctcagctgggagcatcattctcctgctttgtacatagggtgtggtcccctggcacgtggccaccatcatgtctaggcctatgctaggaggcaaatggccaggctctgcctgtgtttttctcaacactacttttctgatatgagggcagcacctgcctctgaatgggaaatcatgcaactactcagaatgtgtcctcctcatctaatgctcatctgtttaatggtgatgcctcgcgtacaggatctggttacctgtgcagttgtgaatacccagaggttgggcagatcagtgtctctagtcctacccagttttaaagttcatggtaagatttgacctcatctcccgcaaataaatgtattggtgatttggaaagtaacatgtacttggtgaagtttgggaaagaaccaatgacaatcaaaatatgtctcaaaaatatatttcatactcgggaggatcccaaaagggggaaatggaacaggggatttcccggtagtgactataacggggacatgttttatgaaatggttttgggaaaccacctgaaggatctcggcgaaatgtaacgggagtagaa

SEQ ID NO: 445475 - DNA, 3046 bp, Homo sapiens
gggggcgtggcccggtcgcgtgacggggagtgacctcgccgccgggcgccatgggagcttcggacccggaagtggcgccctgggctcgcggcggtgccgcggggatggcgggagccggagctggagccggagctcgcggcggagcggcggcgggggtcgaggctcgagctcgcgatccaccgcccgcgcaccgcgcacatcctcgccaccctcggcctgcggctcagccctcggcccgcaggatggatggcgggtcagggggcctggggtctggggacaacgccccgaccactgaggctcttttcgtggcactgggcgcgggcgtgacggcgctcagccatcccctgctctacgtgaagctgctcatccaggtgggtcatgagccgatgccccccacccttgggaccaatgtgctggggaggaaggtcctctatctgccgagcttcttcacctacgccaagtacatcgtgcaagtggatggtaagatagggctgttccgaggcctgagtccccggctgatgtccaacgccctctctactgtgactcggggtagcatgaagaaggttttccctccagatgagattgagcaggtttccaacaaggatgatatgaagacttccctgaagaaagttgtgaaggagacctcctacgagatgatgatgcagtgtgtgtcccgcatgttggcccaccccctgcatgtcatctcaatgcgctgcatggtccagtttgtgggacgggaggccaagtacagtggtgtgctgagctccattgggaagattttcaaagaggaagggctgctgggattcttcgttggattaatccctcacctcctgggcgatgtggttttcttgtggggctgtaacctgctggcccacttcatcaatgcctacctggtggatgacagcgtgagtgacaccccaggggggctgggaaacgaccagaatccaggttcccagttcagccaggccctggccatccggagctataccaagttcgtgatggggattgcagtgagcatgctgacctaccccttcctgctagttggcgacctcatggctgtgaacaactgcgggctgcaagctgggctccccccttactccccagtgttcaaatcctggattcactgctggaagtacctgagtgtgcaggtgagcaagcactggacggcggaggcctttcctgttctttgctacatccttcagctgaaatggttttgtggatgcttcattgcatgcaaagataagtggtttcatggaattcaatattgtgaggagatacttggtatctataaggcatttaagttttcatcttacataatttcagaaaggatttgaggtggctaagtgtgggtttattttaagattatacatcagacaagaccttttcttctttgagtcttaaagactcttaggataaggataagagaactctggcccaggtggcaggtggtaaagcccaagaactgcttctccttcaagtaacatgggctgaaaattcgaggtctgtaaccagttgagctgagttcctgggttgttagggcggctggcattggaaaccgactcctccctcctgcaggacattcctgggcccaggagagcctgtgggtggggctgggccacgtggggaactggcagcagtaccaaccttgggttctcgtgttctgtaccgaagctacctctccgtagctggagctcttgggcccagcagtcaggggtccaggctttggccgagggcagaaccttgccttttcctggccttgatttgcctcgcagtgaaatggggcagtggcccggagggagccagaactctgagtggcctcgaggctgagaagaggacagatgggagggaagcagggaggagagccgcagttcttcccagtggccctggtcagcgtgagtgtgtctcgtcctccctatgagcactgaaagagtcctagaccacttgggctctgaagcaagaggggcaatgagcctcctctctagggctctcctacagagtagccccaaagacacccctgggcaggaaatgaaccgctcccttctgcttcaacacaggcagattctgccctccagggatgtaggccgaggccgtccaccccggagctgggtctttgagctcctggacccttctttgcctgacactggccttcctctcggagggacaaggaagcgtggcctccctttcactcaccttacttttccttctggtccagggccagctcttccgaggctccagcctgcttttccgccgggtgtcatcaggatcatgctttgccctggagtaacctgaatcatctaaaaaacacggtctcaacctggccaccgtgggtgaggcctgaccaccttgggacacctgcaagacgactccaacccaacaacaaccagatgtgctccagcccagccgggcttcagttccatatttgccatgtgtctgtccagatgtggggttgagcgggggtggggctgcacccagtggattgggtcacccggcagacctagggaaggtgaggcgaggtggggagttggcagaatccccatacctcgcagatttgctgagtctgtcttgtgcagagggccagagaatggcttatgggggcccaggttggatggggaaaggctaatggggtcagaccccaccccgtctacccctccagtcagcccagcgcccatcctgcagctcagctgggagcatcattctcctgctttgtacatagggtgtggtcccctggcacgtggccaccatcatgtctaggcctatgctaggaggcaaatggccaggctctgcctgtgtttttctcaacactacttttctgatatgagggcagcacctgcctctgaatgggaaatcatgcaactactcagaatgtgtcctcctcatctaatgctcatctgtttaatggtgatgcctcgcgtacaggatctggttacctgtgcagttgtgaatacccagaggttgggcagatcagtgtctctagtcctacccagttttaaagttcatggtaagatttgacctcatctcccgcaaataaatgtattggtgatttgga

SEQ ID NO: 445476 - DNA, 1928 bp, Homo sapiens
gggggcgtggcccggtcgcgtgacggggagtgacctcgccgccgggcgccatgggagcttcggacccggaagtggcgccctgggctcgcggcggtgccgcggggatggcgggagccggagctggagccggagctcgcggcggagcggcggcgggggtcgaggctcgagctcgcgatccaccgcccgcgcaccgcgcacatcctcgccaccctcggcctgcggctcagccctcggcccgcaggatggatggcgggtcagggggcctggggtctggggacaacgccccgaccactgaggctcttttcgtggcactgggcgcgggcgtgacggcgctcagccatcccctgctctacgtgaagctgctcatccaggtgggtcatgagccgatgccccccacccttgggaccaatgtgctggggaggaaggtcctctatctgccgagcttcttcacctacgccaagtacatcgtgcaagtggatggtaagatagggctgttccgaggcctgagtccccggctgatgtccaacgccctctctactgtgactcggggtagcatgaagaaggttttccctccagatgagattgagcaggtttccaacaaggatgatatgaagacttccctgaagaaagttgtgaaggagacctcctacgagatgatgatgcagtgtgtgtcccgcatgttggcccaccccctgcatgtcatctcaatgcgctgcatggtccagtttgtgggacgggaggccaagtacagtggtgtgctgagctccattgggaagattttcaaagaggaagggctgctgggattcttcgttggattaatccctcacctcctgggcgatgtggttttcttgtggggctgtaacctgctggcccacttcatcaatgcctacctggtggatgacagcgtgagtgacaccccaggggggctgggaaacgaccagaatccaggttcccagttcagccaggccctggccatccggagctataccaagttcgtgatggggattgcagtgagcatgctgacctaccccttcctgctagttggcgacctcatggctgtgaacaactgcgggctgcaagctgggctccccccttactccccagtgttcaaatcctggattcactgctggaagtacctgagtgtgcagggccagctcttccgaggctccagcctgcttttccgccgggtgtcatcaggatcatgctttgccctggagtaacctgaatcatctaactgcaagacgactccaacccaacaacaaccagatgtgctccagcccagccgggcttcagttccatatttgccatgtgtctgtccagatgtggggttgagcgggggtggggctgcacccagtggattgggtcacccggcagacctagggaaggtgaggcgaggtggggagttggcagaatccccatacctcgcagatttgctgagtctgtcttgtgcagagggccagagaatggcttatgggggcccaggttggatggggaaaggctaatggggtcagaccccaccccgtctacccctccagtcagcccagcgcccatcctgcagctcagctgggagcatcattctcctgctttgtacatagggtgtggtcccctggcacgtggccaccatcatgtctaggcctatgctaggaggcaaatggccaggctctgcctgtgtttttctcaacactacttttctgatatgagggcagcacctgcctctgaatgggaaatcatgcaactactcagaatgtgtcctcctcatctaatgctcatctgtttaatggtgatgcctcgcgtacaggatctggttacctgtgcagttgtgaatacccagaggttgggcagatcagtgtctctagtcctacccagttttaaagttcatggtaagatttgacctcatctcccgcaaataaatgtattggtgatttgga

SEQ ID NO: 445477 - DNA, 2032 bp, Homo sapiens
gggggcgtggcccggtcgcgtgacggggagtgacctcgccgccgggcgccatgggagcttcggacccggaagtggcgccctgggctcgcggcggtgccgcggggatggcgggagccggagctggagccggagctcgcggcggagcggcggcgggggtcgaggctcgagctcgcgatccaccgcccgcgcaccgcgcacatcctcgccaccctcggcctgcggctcagccctcggcccgcaggatggatggcgggtcagggggcctggggtctggggacaacgccccgaccactgaggctcttttcgtggcactgggcgcgggcgtgacggcgctcagccatcccctgctctacgtgaagctgctcatccaggtgggtcatgagccgatgccccccacccttgggaccaatgtgctggggaggaaggtcctctatctgccgagcttcttcacctacgccaagtacatcgtgcaagtggatggtaagatagggctgttccgaggcctgagtccccggctgatgtccaacgccctctctactgtgactcggggtagcatgaagaaggttttccctccagatgagattgagcaggtttccaacaaggatgatatgaagacttccctgaagaaagttgtgaaggagacctcctacgagatgatgatgcagtgtgtgtcccgcatgttggcccaccccctgcatgtcatctcaatgcgctgcatggtccagtttgtgggacgggaggccaagtacagctgtcctgcggggccaccatcccaggaagctcagctgccatggtgcctcattttggggtcattaatgggaaattggcccattcccctagactgattatgagtggtgtgctgagctccattgggaagattttcaaagaggaagggctgctgggattcttcgttggattaatccctcacctcctgggcgatgtggttttcttgtggggctgtaacctgctggcccacttcatcaatgcctacctggtggatgacagcttcagccaggccctggccatccggagctataccaagttcgtgatggggattgcagtgagcatgctgacctaccccttcctgctagttggcgacctcatggctgtgaacaactgcgggctgcaagctgggctccccccttactccccagtgttcaaatcctggattcactgctggaagtacctgagtgtgcagggccagctcttccgaggctccagcctgcttttccgccgggtgtcatcaggatcatgctttgccctggagtaacctgaatcatctaaaaaacacggtctcaacctggccaccgtgggtgaggcctgaccaccttgggacacctgcaagacgactccaacccaacaacaaccagatgtgctccagcccagccgggcttcagttccatatttgccatgtgtctgtccagatgtggggttgagcgggggtggggctgcacccagtggattgggtcacccggcagacctagggaaggtgaggcgaggtggggagttggcagaatccccatacctcgcagatttgctgagtctgtcttgtgcagagggccagagaatggcttatgggggcccaggttggatggggaaaggctaatggggtcagaccccaccccgtctacccctccagtcagcccagcgcccatcctgcagctcagctgggagcatcattctcctgctttgtacatagggtgtggtcccctggcacgtggccaccatcatgtctaggcctatgctaggaggcaaatggccaggctctgcctgtgtttttctcaacactacttttctgatatgagggcagcacctgcctctgaatgggaaatcatgcaactactcagaatgtgtcctcctcatctaatgctcatctgtttaatggtgatgcctcgcgtacaggatctggttacctgtgcagttgtgaatacccagaggttgggcagatcagtgtctctagtcctacccagttttaaagttcatggtaagatttgacctcatctcccgcaaataaatgtattggtgatttgga

SEQ ID NO: 445478 - DNA, 1833 bp, Homo sapiens
gatgagccgatgccccccaccctcgccgccgggcgccatgggagcttcggacccggaagtggcgccctgggctcgcggcggtgccgcggggatggcgggagccggagctggagccggagctcgcggcggagcggcggcgggggtcgaggctcgagctcgcgatccaccgcccgcgcaccgcgcacatcctcgccaccctcggcctgcggctcagccctcggcccgcaggatggatggcgggtcagggggcctggggtctggggacaacgccccgaccactgaggctcttttcgtggcactgggcgcgggcgtgacggcgctcagccatcccctgctctacgtgaagctgctcatccagccaagtacatcgtgcaagtggatggtaagatagggctgttccgaggcctgagtccccggctgatgtccaacgccctctctactgtgactcggggtagcatgaagaaggttttccctccagatgagattgagcaggtttccaacaaggatgatatgaagacttccctgaagaaagttgtgaaggagacctcctacgagatgatgatgcagtgtgtgtcccgcatgttggcccaccccctgcatgtcatctcaatgcgctgcatggtccagtttgtgggacgggaggccaagtacagtggtgtgctgagctccattgggaagattttcaaagaggaagggctgctgggattcttcgttggattaatccctcacctcctgggcgatgtggttttcttgtggggctgtaacctgctggcccacttcatcaatgcctacctggtggatgacagcttcagccaggccctggccatccggagctataccaagttcgtgatggggattgcagtgagcatgctgacctaccccttcctgctagttggcgacctcatggctgtgaacaactgcgggctgcaagctgggctccccccttactccccagtgttcaaatcctggattcactgctggaagtacctgagtgtgcagggccagctcttccgaggctccagcctgcttttccgccgggtgtcatcaggatcatgctttgccctggagtaacctgaatcatctaaaaaacacggtctcaacctggccaccgtgggtgaggcctgaccaccttgggacacctgcaagacgactccaacccaacaacaaccagatgtgctccagcccagccgggcttcagttccatatttgccatgtgtctgtccagatgtggggttgagcgggggtggggctgcacccagtggattgggtcacccggcagacctagggaaggtgaggcgaggtggggagttggcagaatccccatacctcgcagatttgctgagtctgtcttgtgcagagggccagagaatggcttatgggggcccaggttggatggggaaaggctaatggggtcagaccccaccccgtctacccctccagtcagcccagcgcccatcctgcagctcagctgggagcatcattctcctgctttgtacatagggtgtggtcccctggcacgtggccaccatcatgtctaggcctatgctaggaggcaaatggccaggctctgcctgtgtttttctcaacactacttttctgatatgagggcagcacctgcctctgaatgggaaatcatgcaactactcagaatgtgtcctcctcatctaatgctcatctgtttaatggtgatgcctcgcgtacaggatctggttacctgtgcagttgtgaatacccagaggttgggcagatcagtgtctctagtcctacccagttttaaagttcatggtaagatttgacctcatctcccgcaaataaatgtattggtgatttgga

SEQ ID NO: 445479 - DNA, 1459 bp, Homo sapiens
atagtaatagctgcgatgatccgaggtctgagatcctcggcctgagtcgaccaaagtggccgtcattgtaactcggggtagcatgaagaaggttttccctccagatgagattgagcaggtttccaacaaggatgatatgaagacttccctgaagaaagttgtgaaggagacctcctacgagatgatgatgcagtgtgtgtcccgcatgttggcccaccccctgcatgtcatctcaatgcgctgcatggtccagtttgtgggacgggaggccaagtacagtggtgtgctgagctccattgggaagattttcaaagaggaagggctgctgggattcttcgttggattaatccctcacctcctgggcgatgtggttttcttgtggggctgtaacctgctggcccacttcatcaatgcctacctggtggatgacagcttcagccaggccctggccatccggagctataccaagttcgtgatggggattgcagtgagcatgctgacctaccccttcctgctagttggcgacctcatggctgtgaacaactgcgggctgcaagctgggctccccccttactccccagtgttcaaatcctggattcactgctggaagtacctgagtgtgcagggccagctcttccgaggctccagcctgcttttccgccgggtgtcatcaggatcatgctttgccctggagtaacctgaatcatctaaaaaacacggtctcaacctggccaccgtgggtgaggcctgaccaccttgggacacctgcaagacgactccaacccaacaacaaccagatgtgctccagcccagccgggcttcagttccatatttgccatgtgtctgtccagatgtggggttgagcgggggtggggctgcacccagtggattgggtcacccggcagacctagggaaggtgaggcgaggtggggagttggcagaatccccatacctcgcagatttgctgagtctgtcttgtgcagagggccagagaatggcttatgggggcccaggttggatggggaaaggctaatggggtcagaccccaccccgtctacccctccagtcagcccagcgcccatcctgcagctcagctgggagcatcattctcctgctttgtacatagggtgtggtcccctggcacgtggccaccatcatgtctaggcctatgctaggaggcaaatggccaggctctgcctgtgtttttctcaacactacttttctgatatgagggcagcacctgcctctgaatgggaaatcatgcaactactcagaatgtgtcctcctcatctaatgctcatctgtttaatggtgatgcctcgcgtacaggatctggttacctgtgcagttgtgaatacccagaggttgggcagatcagtgtctctagtcctacccagttttaaagttcatggtaagatttgacctcatctcccgcaaataaatgtattggtgatttgga

SEQ ID NO: 445480 - DNA, 1215 bp, Homo sapiens
ggctaggtaagaaggccctgtgtatcggccgaggctggtgtgctgagctccattgggaagattttcaaagaggaagggctgctgggattcttcgttggattaatccctcacctcctgggcgatgtggttttcttgtggggctgtaacctgctggcccacttcatcaatgcctacctggtggatgacagcttcagccaggccctggccatccggagctataccaagttcgtgatggggattgcagtgagcatgctgacctaccccttcctgctagttggcgacctcatggctgtgaacaactgcgggctgcaagctgggctccccccttactccccagtgttcaaatcctggattcactgctggaagtacctgagtgtgcagggccagctcttccgaggctccagcctgcttttccgccgggtgtcatcaggatcatgctttgccctggagtaacctgaatcatctaaaaaacacggtctcaacctggccaccgtgggtgaggcctgaccaccttgggacacctgcaagacgactccaacccaacaacaaccagatgtgctccagcccagccgggcttcagttccatatttgccatgtgtctgtccagatgtggggttgagcgggggtggggctgcacccagtggattgggtcacccggcagacctagggaaggtgaggcgaggtggggagttggcagaatccccatacctcgcagatttgctgagtctgtcttgtgcagagggccagagaatggcttatgggggcccaggttggatggggaaaggctaatggggtcagaccccaccccgtctacccctccagtcagcccagcgcccatcctgcagctcagctgggagcatcattctcctgctttgtacatagggtgtggtcccctggcacgtggccaccatcatgtctaggcctatgctaggaggcaaatggccaggctctgcctgtgtttttctcaacactacttttctgatatgagggcagcacctgcctctgaatgggaaatcatgcaactactcagaatgtgtcctcctcatctaatgctcatctgtttaatggtgatgcctcgcgtacaggatctggttacctgtgcagttgtgaatacccagaggttgggcagatcagtgtctctagtcctacccagttttaaagttcatggtaagatttgacctcatctcccgcaaataaatgtattggtgatttgga

SEQ ID NO: 445481 - DNA, 1489 bp, Homo sapiens
gggggcgtggcccggtcgcgtgacggggagtgacctcgccgccgggcgccatgggagcttcggacccggaagtggcgccctgggctcgcggcggtgccgcggggatggcgggagccggagctggagccggagctcgcggcggagcggcggcgggggtcgaggctcgagctcgcgatccaccgcccgcgcaccgcgcacatcctcgccaccctcggcctgcggctcagccctcggcccgcaggatggatggcgggtcagggggcctggggtctggggacaacgccccgaccactgaggctcttttcgtggcactgggcgcgggcgtgacggcgctcagccatcccctgctctacgtgaagctgctcatccaggtgggtcatgagccgatgccccccacccttgggaccaatgtgctggggaggaaggtcctctatctgccgagcttcttcacctacgccaagtacatcgtgcaagtggatggtaagatagggctgttccgaggcctgagtccccggctgatgtccaacgccctctctactgtgactcggggtagcatgaagaaggttttccctccagatgagattgagcaggtttccaacaaggatgatatgaagacttccctgaagaaagttgtgaaggagacctcctacgagatgatgatgcagtgtgtgtcccgcatgttggcccaccccctgcatgtcatctcaatgcgctgcatggtccagtttgtgggacgggaggccaagtacagtggtgtgctgagctccattgggaagattttcaaagaggaagggctgctgggattcttcgttggattaatccctcacctcctgggcgatgtggttttcttgtggggctgtaacctgctggcccacttcatcaatgcctacctggtggatgacagcgtgagtgacaccccaggggggctgggaaacgaccagaatccaggttcccagttcagccaggccctggccatccggagctataccaagttcgtgatggggattgcagtgagcatgctgacctaccccttcctgctagttggcgacctcatggctgtgaacaactgcgggctgcaagctgggctccccccttactccccagtcgcccatcctgcagctcagctgggagcatcattctcctgctttgtacatagggtgtggtcccctggcacgtggccaccatcatgtctaggcctatgctaggaggcaaatggccaggctctgcctgtgtttttctcaacactacttttctgatatgagggcagcacctgcctctgaatgggaaatcatgcaactactcagaatgtgtcctcctcatctaatgctcatctgtttaatggtgatgcctcgcgtacaggatctggttacctgtgcagttgtgaatacccagaggttgggcagatcagtgtctctagtcctacccagttttaaagttcatggtaagatttgacctcatctcccgcaaataaatgtattggtgatttgga

SEQ ID NO: 445482 - DNA, 1114 bp, Homo sapiens
cgtgtatataattctaagtttggaaaccaatcccctttggtatgtggtaaatattttcttcatcaatgcctacctggtggatgacagcttcagccaggccctggccatccggagctataccaagttcgtgatggggattgcagtgagcatgctgacctaccccttcctgctagttggcgacctcatggctgtgaacaactgcgggctgcaagctgggctccccccttactccccagtgttcaaatcctggattcactgctggaagtacctgagtgtgcagggccagctcttccgaggctccagcctgcttttccgccgggtgtcatcaggatcatgctttgccctggagtaacctgaatcatctaaaaaacacggtctcaacctggccaccgtgggtgaggcctgaccaccttgggacacctgcaagacgactccaacccaacaacaaccagatgtgctccagcccagccgggcttcagttccatatttgccatgtgtctgtccagatgtggggttgagcgggggtggggctgcacccagtggattgggtcacccggcagacctagggaaggtgaggcgaggtggggagttggcagaatccccatacctcgcagatttgctgagtctgtcttgtgcagagggccagagaatggcttatgggggcccaggttggatggggaaaggctaatggggtcagaccccaccccgtctacccctccagtcagcccagcgcccatcctgcagctcagctgggagcatcattctcctgctttgtacatagggtgtggtcccctggcacgtggccaccatcatgtctaggcctatgctaggaggcaaatggccaggctctgcctgtgtttttctcaacactacttttctgatatgagggcagcacctgcctctgaatgggaaatcatgcaactactcagaatgtgtcctcctcatctaatgctcatctgtttaatggtgatgcctcgcgtacaggatctggttacctgtgcagttgtgaatacccagaggttgggcagatcagtgtctctagtcctacccagttttaaagttcatggtaagatttgacctcatctcccgcaaataaatgtattggtgatttgga

SEQ ID NO: 445483 - DNA, 1218 bp, Homo sapiens
gggggcgtggcccggtcgcgtgacggggagtgacctcgccgccgggcgccatgggagcttcggacccggaagtggcgccctgggctcgcggcggtgccgcggggatggcgggagccggagctggagccggagctcgcggcggagcggcggcgggggtcgaggctcgagctcgcgatccaccgcccgcgcaccgcgcacatcctcgccaccctcggcctgcggctcagccctcggcccgcaggatggatggcgggtcagggggcctggggtctggggacaacgccccgaccactgaggctcttttcgtggcactgggcgcgggcgtgacggcgctcagccatcccctgctctacgtgaagctgctcatccaggtgggtcatgagccgatgccccccacccttgggaccaatgtgctggggaggaaggtcctctatctgccgagcttcttcacctacgccaagtacatcgtgcaagtggatggtaagatagggctgttccgaggcctgagtccccggctgatgtccaacgccctctctactgtgactcggggtagcatgaagaaggttttccctccagatgagattgagcaggtttccaacaaggatgatatgaagacttccctgaagaaagttgtgaaggagacctcctacgagatgatgatgcagtgtgtgtcccgcatgttggcccaccccctgcatgtcatctcaatgcgctgcatggtccagtttgtgggacgggaggccaagtacagtggtgtgctgagctccattgggaagattttcaaagaggaagggctgctgggattcttcgttggattaatccctcacctcctgggcgatgtggttttcttgtggggctgtaacctgctggcccacttcatcaatgcctacctggtggatgacagcgtgagtgacaccccaggggggctgggaaacgaccagaatccaggttcccagttcagccaggccctggccatccggagctataccaagttcgtgatggggattgcagtgagcatgctgacctaccccttcctgctagttggcgacctcatggctgtgaacaactgcgggctgcaagctgggctccccccttactccccagtgttcaaatcctggattcactgctggaagtacctgagtgtgcagggcagctcttccgagctccacctgtttccgcgtgtcataagcgcgtcaggtccctagacttaagagggtt

SEQ ID NO: 445484 - DNA, 1087 bp, Homo sapiens
  misc_feature (910)..(910): n is a, c, g, or t
  misc_feature (930)..(930): n is a, c, g, or t
  misc_feature (932)..(932): n is a, c, g, or t
  misc_feature (966)..(966): n is a, c, g, or t
  misc_feature (980)..(980): n is a, c, g, or t
  misc_feature (987)..(987): n is a, c, g, or t
  misc_feature (1005)..(1005): n is a, c, g, or t
  misc_feature (1010)..(1010): n is a, c, g, or t
  misc_feature (1045)..(1045): n is a, c, g, or t
gggggcgtggcccggtcgcgtgacggggagtgacctcgccgccgggcgccatgggagcttcggacccggaagtggcgccctgggctcgcggcggtgccgcggggatggcgggagccggagctggagccggagctcgcggcggagcggcggcgggggtcgaggctcgagctcgcgatccaccgcccgcgcaccgcgcacatcctcgccaccctcggcctgcggctcagccctcggcccgcaggatggatggcgggtcagggggcctggggtctggggacaacgccccgaccactgaggctcttttcgtggcactgggcgcgggcgtgacggcgctcagccatcccctgctctacgtgaagctgctcatccaggtgggtcatgagccgatgccccccacccttgggaccaatgtgctggggaggaaggtcctctatctgccgagcttcttcacctacgccaagtacatcgtgcaagtggatggtaagatagggctgttccgaggcctgagtccccggctgatgtccaacgccctctctactgtgactcggggtagcatgaagaaggttttccctccagatgagattgagcaggtttccaacaaggatgatatgaagacttccctgaagaaagttgtgaaggagacctcctacgagatgatgatgcagtgtgtgtcccgcatgttggcccaccccctgcatgtcatctcaatgcgctgcatggtccagtttgtgggacgggaggccaagtacagtggtgtgctgagctccattgggaagattttcaaagaggaagggctgctgggattcttcgttggattaatccctcacctcctgggcgatgtggttttcttgtggggctgtaacctgctggcccacttcatcaatgcctacctggtggatgacagcttcancaggccctgcattcggagcntncaaagtcgtgatgggattcagtagcatctgactncccttcctgcagtngcgactnatgctgtgacactgcggntgcantgggctcccctactccagtgtcaatctggattacnctgagtctgatttcaggcagcctcgaggtcactgcttcgcgg

SEQ ID NO: 445485 - DNA, 738 bp, Homo sapiens
tgtgaggtgatctacaggatcttaacgtcagcactcttggcacactgcaagacgactccaacccaacaacaaccagatgtgctccagcccagccgggcttcagttccatatttgccatgtgtctgtccagatgtggggttgagcgggggtggggctgcacccagtggattgggtcacccggcagacctagggaaggtgaggcgaggtggggagttggcagaatccccatacctcgcagatttgctgagtctgtcttgtgcagagggccagagaatggcttatgggggcccaggttggatggggaaaggctaatggggtcagaccccaccccgtctacccctccagtcagcccagcgcccatcctgcagctcagctgggagcatcattctcctgctttgtacatagggtgtggtcccctggcacgtggccaccatcatgtctaggcctatgctaggaggcaaatggccaggctctgcctgtgtttttctcaacactacttttctgatatgagggcagcacctgcctctgaatgggaaatcatgcaactactcagaatgtgtcctcctcatctaatgctcatctgtttaatggtgatgcctcgcgtacaggatctggttacctgtgcagttgtgaatacccagaggttgggcagatcagtgtctctagtcctacccagttttaaagttcatggtaagatttgacctcatctcccgcaaataaatgtattggtgatttgga

SEQ ID NO: 445486 - DNA, 967 bp, Homo sapiens
cgcccacgaagtggagagaagtccttggtgattgtaaagagggccccggagctcatttctgaatcgcactctccatttccagagactaaaggatgtcctttgaaatggctggactcagagagttggagtcgttttgagatgagcattatccccagctttgtaaccaatgaggaacacttacttatttttaagtatcttgacagaagcgatttgaacacagtgtcccgtcatttctagaaacagaatggtctcttctatagagcttggattaggaccttgctgggttgagttaggttttaatccttgccttggtttggaactgccttcgggctccagaacttttattgcttggtccgtggctgcaatccttggggcagggcttcccaacaaaggtggattgggtcacccggcagacctagggaaggtgaggcgaggtggggagttggcagaatccccatacctcgcagatttgctgagtctgtcttgtgcagagggccagagaatggcttatgggggcccaggttggatggggaaaggctaatggggtcagaccccaccccgtctacccctccagtcagcccagcgcccatcctgcagctcagctgggagcatcattctcctgctttgtacatagggtgtggtcccctggcacgtggccaccatcatgtctaggcctatgctaggaggcaaatggccaggctctgcctgtgtttttctcaacactacttttctgatatgagggcagcacctgcctctgaatgggaaatcatgcaactactcagaatgtgtcctcctcatctaatgctcatctgtttaatggtgatgcctcgcgtacaggatctggttacctgtgcagttgtgaatacccagaggttgggcagatcagtgtctctagtcctacccagttttaaagttcatggtaagatttgacctcatctcccgcaaataaatgtattggtgatttgga

SEQ ID NO: 445487 - DNA, 1020 bp, Homo sapiens
gggggcgtggcccggtcgcgtgacggggagtgacctcgccgccgggcgccatgggagcttcggacccggaagtggcgccctgggctcgcggcggtgccgcggggatggcgggagccggagctggagccggagctcgcggcggagcggcggcgggggtcgaggctcgagctcgcgatccaccgcccgcgcaccgcgcacatcctcgccaccctcggcctgcggctcagccctcggcccgcaggatggatggcgggtcagggggcctggggtctggggacaacgccccgaccactgaggctcttttcgtggcactgggcgcgggcgtgacggcgctcagccatcccctgctctacgtgaagctgctcatccaggtgggtcatgagccgatgccccccacccttgggaccaatgtgctggggaggaaggtcctctatctgccgagcttcttcacctacgccaagtacatcgtgcaagtggatggtaagatagggctgttccgaggcctgagtccccggctgatgtccaacgccctctctactgtgactcggggtagcatgaagaaggttttccctccagatgagattgagcaggtttccaacaaggatgatatgaagacttccctgaagaaagttgtgaaggagacctcctacgagatgatgatgcagtgtgtgtcccgcatgttggcccaccccctgcatgtcatctcaatgcgctgcatggtccagtttgtgggacgggaggccaagtacaggtgggtaactcttgggactggcagagtggccctgttaccctttcagagtcggccagggcaggccgtgctgggattggttgctgcaccttttctgccctagtgctgtgtgagttcagcctgctgcctggcttctgaggaatgtggcagtggcttcaatagtctgtccagggtcattttctcttcgtcatctcttatcaagggcagccctagatgagcctagatgcctttgcagaggggtgagtgggattgtagtcagcttggattaggat

SEQ ID NO: 445488 - DNA, 333 bp, Homo sapiens
ctactactactaattccgccgtcgaccatcatgtctaggcctatgctaggaggcaaatggccaggctctgcctgtgtttttctcaacactacttttctgatatgagggcagcacctgcctctgaatgggaaatcatgcaactactcagaatgtgtcctcctcatctaatgctcatctgtttaatggtgatgcctcgcgtacaggatctggttacctgtgcagttgtgaatacccagaggttgggcagatcagtgtctctagtcctacccagttttaaagttcatggtaagatttgacctcatctcccgcaaataaatgtattggtgatttgga

SEQ ID NO: 445489 - DNA, 315 bp, Homo sapiens
tgactctacaggatcccggacagcacagagggaggcaaatggccaggctctgcctgtgtttttctcaacactacttttctgatatgagggcagcacctgcctctgaatgggaaatcatgcaactactcagaatgtgtcctcctcatctaatgctcatctgtttaatggtgatgcctcgcgtacaggatctggttacctgtgcagttgtgaatacccagaggttgggcagatcagtgtctctagtcctacccagttttaaagttcatggtaagatttgacctcatctcccgcaaataaatgtattggtgatttgga

SEQ ID NO: 445490 - DNA, 713 bp, Homo sapiens
gatgagccgatgccccccaccctcgccgccgggcgccatgggagcttcggacccggaagtggcgccctgggctcgcggcggtgccgcggggatggcgggagccggagctggagccggagctcgcggcggagcggcggcgggggtcgaggctcgagctcgcgatccaccgcccgcgcaccgcgcacatcctcgccaccctcggcctgcggctcagccctcggcccgcaggatggatggcgggtcagggggcctggggtctggggacaacgccccgaccactgaggctcttttcgtggcactgggcgcgggcgtgacggcgctcagccatcccctgctctacgtgaagctgctcatccaggtgggtcatgagccgatgccccccacccttgggaccaatgtgctggggaggaaggtcctctatctgccgagcttcttcacctacgccaagtacatcgtgcaagtggatggtaagatagggctgttccgaggcctgagtccccggctgatgtccaacgccctctctactgtgactcggggtagcatgaagaaggttttccctccagatgagattgagcaggtttatcagccatgtgaaacctggctccctgtctgctgaggtgggattggagataggggaccagattgctcgaagtcaatgtcgtcgacttctctaacctggattcgcaccagaggatcctctagaacagcataac

SEQ ID NO: 445491 - DNA, 293 bp, Homo sapiens
catgctgacctaccccttcctgctagttggcgacctcatggctgtgaacaactgcgggtaggtgtgcgcccctctacttgccactctacctaccaaggctgtggggtgggggagacccaccgagcccttccagcactctgccccctcccacctgctctgtgtgtaggcttggcctgccaggcaccctggcttccgctgggatttcccagcaccccctggggtaaactgtggtgtcaggggtcagggtgtggatgggtggtagcctgaaggcattccttcttgaagtggctttc

SEQ ID NO: 445492 - DNA, 831 bp, Homo sapiens
  misc_feature (75)..(75): n is a, c, g, or t
  misc_feature (756)..(756): n is a, c, g, or t
tcatatttgccatgtgtctgtccagatgtggaactgaagcccggctgggctggagcacatctggttgttgtgggntggagcccagccgggcttcagttccatatttgccatgtgtctgtccagatgtggggttgagcgggggtggggctgcacccagtggattgggtcacccggcagacctagggaaggtgaggcgaggtggggagttggcagaatccccatacctcgcagatttgctgagtctgtcttgtgcagagggccagagaatggcttatgggggcccaggttggatggggaaaggctaatggggtcagaccccaccccgtctacccctccagtcagcccagcgcccatcctgcagctcagctgggagcatcattctcctgctttgtacatagggtgtggtcccctggcacgtggccaccatcatgtctaggcctatgctaggaggcaaatggccaggctctgcctgtgtttttctcaacactacttttctgatatgagggcagcacctgcctctgaatgggaaatcatgcaactactcagaatgtgtcctcctcatctaatgctcatctgtttaatggtgatgcctcgcgtacaggatctggttacctgtgcagttgtgaatacccagaggttgggcagatcagtgtctctagtcctacccagttttaaagttcatggtaagatttgacctcatctcccgcaaataaatgtattggtgatttggaaaacaaaaaacacataaacatcctnattaattacatacaccccctccctcctctttggaaaaaaaaaaaataatttatataattcctttgtcgcccgctg

SEQ ID NO: 445493 - DNA, 1931 bp, Homo sapiens
gggggcgtggcccggtcgcgtgacggggagtgacctcgccgccgggcgccatgggagcttcggacccggaagtggcgccctgggctcgcggcggtgccgcggggatggcgggagccggagctggagccggagctcgcggcggagcggcggcgggggtcgaggctcgagctcgcgatccaccgcccgcgcaccgcgcacatcctcgccaccctcggcctgcggctcagccctcggcccgcaggatggatggcgggtcagggggcctggggtctggggacaacgccccgaccactgaggctcttttcgtggcactgggcgcgggcgtgacggcgctcagccatcccctgctctacgtgaagctgctcatccaggtgggtcatgagccgatgccccccacccttgggaccaatgtgctggggaggaaggtcctctatctgccgagcttcttcacctacgccaagtacatcgtgcaagtggatggtaagatagggctgttccgaggcctgagtccccggctgatgtccaacgccctctctactgtgactcggggtagcatgaagaaggttttccctccagatgagattgagcaggtttccaacaaggatgatatgaagacttccctgaagaaagttgtgaaggagacctcctacgagatgatgatgcagtgtgtgtcccgcatgttggcccaccccctgcatgtcatctcaatgcgctgcatggtccagtttgtgggacgggaggccaagtacagtggtgtgctgagctccattgggaagattttcaaagaggaagggctgctgggattcttcgttggattaatccctcacctcctgggcgatgtggttttcttgtggggctgtaacctgctggcccacttcatcaatgcctacctggtggatgacagcttcagccaggccctggccatccggagctataccaagttcgtgatggggattgcagtgagcatgctgacctaccccttcctgctagttggcgacctcatggctgtgaacaactgcgggctgcaagctgggctccccccttactccccagtgttcaaatcctggattcactgctggaagtacctgagtgtgcagggccagctcttccgaggctccagcctgcttttccgccgggtgtcatcaggatcatgctttgccctggagtaacctgaatcatctaaaaaacacggtctcaacctggccaccgtgggtgaggcctgaccaccttgggacacctgcaagacgactccaacccaacaacaaccagatgtgctccagcccagccgggcttcagttccatatttgccatgtgtctgtccagatgtggggttgagcgggggtggggctgcacccagtggattgggtcacccggcagacctagggaaggtgaggcgaggtggggagttggcagaatccccatacctcgcagatttgctgagtctgtcttgtgcagagggccagagaatggcttatgggggcccaggttggatggggaaaggctaatggggtcagaccccaccccgtctacccctccagtcagcccagcgcccatcctgcagctcagctgggagcatcattctcctgctttgtacatagggtgtggtcccctggcacgtggccaccatcatgtctaggcctatgctaggaggcaaatggccaggctctgcctgtgtttttctcaacactacttttctgatatgagggcagcacctgcctctgaatgggaaatcatgcaactactcagaatgtgtcctcctcatctaatgctcatctgtttaatggtgatgcctcgcgtacaggatctggttacctgtgcagttgtgaatacccagaggttgggcagatcagtgtctctagtcctacccagttttaaagttcatggtaagatttgacctcatctcccgcaaataaatgtattggtgatttgga

SEQ ID NO: 445494 - DNA, 1982 bp, Homo sapiens
gggggcgtggcccggtcgcgtgacggggagtgacctcgccgccgggcgccatgggagcttcggacccggaagtggcgccctgggctcgcggcggtgccgcggggatggcgggagccggagctggagccggagctcgcggcggagcggcggcgggggtcgaggctcgagctcgcgatccaccgcccgcgcaccgcgcacatcctcgccaccctcggcctgcggctcagccctcggcccgcaggatggatggcgggtcagggggcctggggtctggggacaacgccccgaccactgaggctcttttcgtggcactgggcgcgggcgtgacggcgctcagccatcccctgctctacgtgaagctgctcatccaggtgggtcatgagccgatgccccccacccttgggaccaatgtgctggggaggaaggtcctctatctgccgagcttcttcacctacgccaagtacatcgtgcaagtggatggtaagatagggctgttccgaggcctgagtccccggctgatgtccaacgccctctctactgtgactcggggtagcatgaagaaggttttccctccagatgagattgagcaggtttccaacaaggatgatatgaagacttccctgaagaaagttgtgaaggagacctcctacgagatgatgatgcagtgtgtgtcccgcatgttggcccaccccctgcatgtcatctcaatgcgctgcatggtccagtttgtgggacgggaggccaagtacagtggtgtgctgagctccattgggaagattttcaaagaggaagggctgctgggattcttcgttggattaatccctcacctcctgggcgatgtggttttcttgtggggctgtaacctgctggcccacttcatcaatgcctacctggtggatgacagcgtgagtgacaccccaggggggctgggaaacgaccagaatccaggttcccagttcagccaggccctggccatccggagctataccaagttcgtgatggggattgcagtgagcatgctgacctaccccttcctgctagttggcgacctcatggctgtgaacaactgcgggctgcaagctgggctccccccttactccccagtgttcaaatcctggattcactgctggaagtacctgagtgtgcagggccagctcttccgaggctccagcctgcttttccgccgggtgtcatcaggatcatgctttgccctggagtaacctgaatcatctaaaaaacacggtctcaacctggccaccgtgggtgaggcctgaccaccttgggacacctgcaagacgactccaacccaacaacaaccagatgtgctccagcccagccgggcttcagttccatatttgccatgtgtctgtccagatgtggggttgagcgggggtggggctgcacccagtggattgggtcacccggcagacctagggaaggtgaggcgaggtggggagttggcagaatccccatacctcgcagatttgctgagtctgtcttgtgcagagggccagagaatggcttatgggggcccaggttggatggggaaaggctaatggggtcagaccccaccccgtctacccctccagtcagcccagcgcccatcctgcagctcagctgggagcatcattctcctgctttgtacatagggtgtggtcccctggcacgtggccaccatcatgtctaggcctatgctaggaggcaaatggccaggctctgcctgtgtttttctcaacactacttttctgatatgagggcagcacctgcctctgaatgggaaatcatgcaactactcagaatgtgtcctcctcatctaatgctcatctgtttaatggtgatgcctcgcgtacaggatctggttacctgtgcagttgtgaatacccagaggttgggcagatcagtgtctctagtcctacccagttttaaagttcatggtaagatttgacctcatctcccgcaaataaatgtattggtgatttgga

SEQ ID NO: 445495 - DNA, 1875 bp, Homo sapiens
  misc_feature (16)..(16): n is a, c, g, or t
  misc_feature (23)..(23): n is a, c, g, or t
taggctagtagaggcnggtggtnaatcggccgaggcggtgccgcggggatggcgggagccggagctggagccggagctcgcggcggagcggcggcgggggtcgaggctcgagctcgcgatccaccgcccgcgcaccgcgcacatcctcgccaccctcggcctgcggctcagccctcggcccgcaggatggatggcgggtcagggggcctggggtctggggacaacgccccgaccactgaggctcttttcgtggcactgggcgcgggcgtgacggcgctcagccatcccctgctctacgtgaagctgctcatccaggtgggtcatgagccgatgccccccacccttgggaccaatgtgctggggaggaaggtcctctatctgccgagcttcttcacctacgccaagtacatcgtgcaagtggatggtaagatagggctgttccgaggcctgagtccccggctgatgtccaacgccctctctactgtgactcggggtagcatgaagaaggttttccctccagatgagattgagcaggtttccaacaaggatgatatgaagacttccctgaagaaagttgtgaaggagacctcctacgagatgatgatgcagtgtgtgtcccgcatgttggcccaccccctgcatgtcatctcaatgcgctgcatggtccagtttgtgggacgggaggccaagtacagtggtgtgctgagctccattgggaagattttcaaagaggaagggctgctgggattcttcgttggattaatccctcacctcctgggcgatgtggttttcttgtggggctgtaacctgctggcccacttcatcaatgcctacctggtggatgacagcttcagccaggccctggccatccggagctataccaagttcgtgatggggattgcagtgagcatgctgacctaccccttcctgctagttggcgacctcatggctgtgaacaactgcgggctgcaagctgggctccccccttactccccagtgttcaaatcctggattcactgctggaagtacctgagtgtgcagggccagctcttccgaggctccagcctgcttttccgccgggtgtcatcaggatcatgctttgccctggagtaacctgaatcatctaaaaaacacggtctcaacctggccaccgtgggtgaggcctgaccaccttgggacacctgcaagacgactccaacccaacaacaaccagatgtgctccagcccagccgggcttcagttccatatttgccatgtgtctgtccagatgtggggttgagcgggggtggggctgcacccagtggattgggtcacccggcagacctagggaaggtgaggcgaggtggggagttggcagaatccccatacctcgcagatttgctgagtctgtcttgtgcagagggccagagaatggcttatgggggcccaggttggatggggaaaggctaatggggtcagaccccaccccgtctacccctccagtcagcccagcgcccatcctgcagctcagctgggagcatcattctcctgctttgtacatagggtgtggtcccctggcacgtggccaccatcatgtctaggcctatgctaggaggcaaatggccaggctctgcctgtgtttttctcaacactacttttctgatatgagggcagcacctgcctctgaatgggaaatcatgcaactactcagaatgtgtcctcctcatctaatgctcatctgtttaatggtgatgcctcgcgtacaggatctggttacctgtgcagttgtgaatacccagaggttgggcagatcagtgtctctagtcctacccagttttaaagttcatggtaagatttgacctcatctcccgcaaataaatgtattggtgatttgga

SEQ ID NO: 445496 - DNA, 2155 bp, Homo sapiens
gggggcgtggcccggtcgcgtgacggggagtgacctcgccgccgggcgccatgggagcttcggacccggaagtggcgccctgggctcgcggcggtgccgcggggatggcgggagccggagctggagccggagctcgcggcggagcggcggcgggggtcgaggctcgagctcgcgatccaccgcccgcgcaccgcgcacatcctcgccaccctcggcctgcggctcagccctcggcccgcaggatggatggcgggtcagggggcctggggtctggggacaacgccccgaccactgaggctcttttcgtggcactgggcgcgggcgtgacggcgctcagccatcccctgctctacgtgaagctgctcatccaggtgggtcatgagccgatgccccccacccttgggaccaatgtgctggggaggaaggtcctctatctgccgagcttcttcacctacgccaagtacatcgtgcaagtggatggtaagatagggctgttccgaggcctgagtccccggctgatgtccaacgccctctctactgtgactcggggtagcatgaagaaggttttccctccagatgagattgagcaggtttccaacaaggatgatatgaagacttccctgaagaaagttgtgaaggagacctcctacgagatgatgatgcagtgtgtgtcccgcatgttggcccaccccctgcatgtcatctcaatgcgctgcatggtccagtttgtgggacgggaggccaagtacagtggtgtgctgagctccattgggaagattttcaaagaggaagggctgctgggattcttcgttggattaatccctcacctcctgggcgatgtggttttcttgtggggctgtaacctgctggcccacttcatcaatgcctacctggtggatgacagcgtgagtgacaccccaggggggctgggaaacgaccagaatccaggttcccagttcagccaggccctggccatccggagctataccaagttcgtgatgggggtaagttgtgccagctgtccttccttcccactgccttgcggacccaagcggggcctaggaggccaaccctggtaatggctggaggcaggtcttggtacagggtgttggcgtggtgtgtccctgctccctgggccggggtgggtcactggcactcaggcctctctgggtttcagattgcagtgagcatgctgacctaccccttcctgctagttggcgacctcatggctgtgaacaactgcgggctgcaagctgggctccccccttactccccagtgttcaaatcctggattcactgctggaagtacctgagtgtgcagggccagctcttccgaggctccagcctgcttttccgccgggtgtcatcaggatcatgctttgccctggagtaacctgaatcatctaaaaaacacggtctcaacctggccaccgtgggtgaggcctgaccaccttgggacacctgcaagacgactccaacccaacaacaaccagatgtgctccagcccagccgggcttcagttccatatttgccatgtgtctgtccagatgtggggttgagcgggggtggggctgcacccagtggattgggtcacccggcagacctagggaaggtgaggcgaggtggggagttggcagaatccccatacctcgcagatttgctgagtctgtcttgtgcagagggccagagaatggcttatgggggcccaggttggatggggaaaggctaatggggtcagaccccaccccgtctacccctccagtcagcccagcgcccatcctgcagctcagctgggagcatcattctcctgctttgtacatagggtgtggtcccctggcacgtggccaccatcatgtctaggcctatgctaggaggcaaatggccaggctctgcctgtgtttttctcaacactacttttctgatatgagggcagcacctgcctctgaatgggaaatcatgcaactactcagaatgtgtcctcctcatctaatgctcatctgtttaatggtgatgcctcgcgtacaggatctggttacctgtgcagttgtgaatacccagaggttgggcagatcagtgtctctagtcctacccagttttaaagttcatggtaagatttgacctcatctcccgcaaataaatgtattggtgatttgga

SEQ ID NO: 445497 - DNA, 1851 bp, Homo sapiens
cgcaggtgtgtagccgtggcgtgattgcgggaacctgatcattgagccggagctcgcggcggagcggcggcgggggtcgaggctcgagctcgcgatccaccgcccgcgcaccgcgcacatcctcgccaccctcggcctgcggctcagccctcggcccgcaggatggatggcgggtcagggggcctggggtctggggacaacgccccgaccactgaggctcttttcgtggcactgggcgcgggcgtgacggcgctcagccatcccctgctctacgtgaagctgctcatccaggtgggtcatgagccgatgccccccacccttgggaccaatgtgctggggaggaaggtcctctatctgccgagcttcttcacctacgccaagtacatcgtgcaagtggatggtaagatagggctgttccgaggcctgagtccccggctgatgtccaacgccctctctactgtgactcggggtagcatgaagaaggttttccctccagatgagattgagcaggtttccaacaaggatgatatgaagacttccctgaagaaagttgtgaaggagacctcctacgagatgatgatgcagtgtgtgtcccgcatgttggcccaccccctgcatgtcatctcaatgcgctgcatggtccagtttgtgggacgggaggccaagtacagtggtgtgctgagctccattgggaagattttcaaagaggaagggctgctgggattcttcgttggattaatccctcacctcctgggcgatgtggttttcttgtggggctgtaacctgctggcccacttcatcaatgcctacctggtggatgacagcttcagccaggccctggccatccggagctataccaagttcgtgatggggattgcagtgagcatgctgacctaccccttcctgctagttggcgacctcatggctgtgaacaactgcgggctgcaagctgggctccccccttactccccagtgttcaaatcctggattcactgctggaagtacctgagtgtgcagggccagctcttccgaggctccagcctgcttttccgccgggtgtcatcaggatcatgctttgccctggagtaacctgaatcatctaaaaaacacggtctcaacctggccaccgtgggtgaggcctgaccaccttgggacacctgcaagacgactccaacccaacaacaaccagatgtgctccagcccagccgggcttcagttccatatttgccatgtgtctgtccagatgtggggttgagcgggggtggggctgcacccagtggattgggtcacccggcagacctagggaaggtgaggcgaggtggggagttggcagaatccccatacctcgcagatttgctgagtctgtcttgtgcagagggccagagaatggcttatgggggcccaggttggatggggaaaggctaatggggtcagaccccaccccgtctacccctccagtcagcccagcgcccatcctgcagctcagctgggagcatcattctcctgctttgtacatagggtgtggtcccctggcacgtggccaccatcatgtctaggcctatgctaggaggcaaatggccaggctctgcctgtgtttttctcaacactacttttctgatatgagggcagcacctgcctctgaatgggaaatcatgcaactactcagaatgtgtcctcctcatctaatgctcatctgtttaatggtgatgcctcgcgtacaggatctggttacctgtgcagttgtgaatacccagaggttgggcagatcagtgtctctagtcctacccagttttaaagttcatggtaagatttgacctcatctcccgcaaataaatgtattggtgatttgga

SEQ ID NO: 445498 - DNA, 2995 bp, Homo sapiens
gggggcgtggcccggtcgcgtgacggggagtgacctcgccgccgggcgccatgggagcttcggacccggaagtggcgccctgggctcgcggcggtgccgcggggatggcgggagccggagctggagccggagctcgcggcggagcggcggcgggggtcgaggctcgagctcgcgatccaccgcccgcgcaccgcgcacatcctcgccaccctcggcctgcggctcagccctcggcccgcaggatggatggcgggtcagggggcctggggtctggggacaacgccccgaccactgaggctcttttcgtggcactgggcgcgggcgtgacggcgctcagccatcccctgctctacgtgaagctgctcatccaggtgggtcatgagccgatgccccccacccttgggaccaatgtgctggggaggaaggtcctctatctgccgagcttcttcacctacgccaagtacatcgtgcaagtggatggtaagatagggctgttccgaggcctgagtccccggctgatgtccaacgccctctctactgtgactcggggtagcatgaagaaggttttccctccagatgagattgagcaggtttccaacaaggatgatatgaagacttccctgaagaaagttgtgaaggagacctcctacgagatgatgatgcagtgtgtgtcccgcatgttggcccaccccctgcatgtcatctcaatgcgctgcatggtccagtttgtgggacgggaggccaagtacagtggtgtgctgagctccattgggaagattttcaaagaggaagggctgctgggattcttcgttggattaatccctcacctcctgggcgatgtggttttcttgtggggctgtaacctgctggcccacttcatcaatgcctacctggtggatgacagcttcagccaggccctggccatccggagctataccaagttcgtgatggggattgcagtgagcatgctgacctaccccttcctgctagttggcgacctcatggctgtgaacaactgcgggctgcaagctgggctccccccttactccccagtgttcaaatcctggattcactgctggaagtacctgagtgtgcaggtgagcaagcactggacggcggaggcctttcctgttctttgctacatccttcagctgaaatggttttgtggatgcttcattgcatgcaaagataagtggtttcatggaattcaatattgtgaggagatacttggtatctataaggcatttaagttttcatcttacataatttcagaaaggatttgaggtggctaagtgtgggtttattttaagattatacatcagacaagaccttttcttctttgagtcttaaagactcttaggataaggataagagaactctggcccaggtggcaggtggtaaagcccaagaactgcttctccttcaagtaacatgggctgaaaattcgaggtctgtaaccagttgagctgagttcctgggttgttagggcggctggcattggaaaccgactcctccctcctgcaggacattcctgggcccaggagagcctgtgggtggggctgggccacgtggggaactggcagcagtaccaaccttgggttctcgtgttctgtaccgaagctacctctccgtagctggagctcttgggcccagcagtcaggggtccaggctttggccgagggcagaaccttgccttttcctggccttgatttgcctcgcagtgaaatggggcagtggcccggagggagccagaactctgagtggcctcgaggctgagaagaggacagatgggagggaagcagggaggagagccgcagttcttcccagtggccctggtcagcgtgagtgtgtctcgtcctccctatgagcactgaaagagtcctagaccacttgggctctgaagcaagaggggcaatgagcctcctctctagggctctcctacagagtagccccaaagacacccctgggcaggaaatgaaccgctcccttctgcttcaacacaggcagattctgccctccagggatgtaggccgaggccgtccaccccggagctgggtctttgagctcctggacccttctttgcctgacactggccttcctctcggagggacaaggaagcgtggcctccctttcactcaccttacttttccttctggtccagggccagctcttccgaggctccagcctgcttttccgccgggtgtcatcaggatcatgctttgccctggagtaacctgaatcatctaaaaaacacggtctcaacctggccaccgtgggtgaggcctgaccaccttgggacacctgcaagacgactccaacccaacaacaaccagatgtgctccagcccagccgggcttcagttccatatttgccatgtgtctgtccagatgtggggttgagcgggggtggggctgcacccagtggattgggtcacccggcagacctagggaaggtgaggcgaggtggggagttggcagaatccccatacctcgcagatttgctgagtctgtcttgtgcagagggccagagaatggcttatgggggcccaggttggatggggaaaggctaatggggtcagaccccaccccgtctacccctccagtcagcccagcgcccatcctgcagctcagctgggagcatcattctcctgctttgtacatagggtgtggtcccctggcacgtggccaccatcatgtctaggcctatgctaggaggcaaatggccaggctctgcctgtgtttttctcaacactacttttctgatatgagggcagcacctgcctctgaatgggaaatcatgcaactactcagaatgtgtcctcctcatctaatgctcatctgtttaatggtgatgcctcgcgtacaggatctggttacctgtgcagttgtgaatacccagaggttgggcagatcagtgtctctagtcctacccagttttaaagttcatggtaagatttgacctcatctcccgcaaataaatgtattggtgatttgga

SEQ ID NO: 445499 - DNA, 1548 bp, Homo sapiens
  misc_feature (16)..(16): n is a, c, g, or t
  misc_feature (23)..(23): n is a, c, g, or t
taggctagtagaggcnggtggtnaatcggccgaggcgaggaaggtctctatctgccgagcttcttcacctacgccaagtacatcgtgcaagtggatggtaagatagggctgttccgaggcctgagtccccggctgatgtccaacgccctctctactgtgactcggggtagcatgaagaaggttttccctccagatgagattgagcaggtttccaacaaggatgatatgaagacttccctgaagaaagttgtgaaggagacctcctacgagatgatgatgcagtgtgtgtcccgcatgttggcccaccccctgcatgtcatctcaatgcgctgcatggtccagtttgtgggacgggaggccaagtacagtggtgtgctgagctccattgggaagattttcaaagaggaagggctgctgggattcttcgttggattaatccctcacctcctgggcgatgtggttttcttgtggggctgtaacctgctggcccacttcatcaatgcctacctggtggatgacagcttcagccaggccctggccatccggagctataccaagttcgtgatggggattgcagtgagcatgctgacctaccccttcctgctagttggcgacctcatggctgtgaacaactgcgggctgcaagctgggctccccccttactccccagtgttcaaatcctggattcactgctggaagtacctgagtgtgcagggccagctcttccgaggctccagcctgcttttccgccgggtgtcatcaggatcatgctttgccctggagtaacctgaatcatctaaaaaacacggtctcaacctggccaccgtgggtgaggcctgaccaccttgggacacctgcaagacgactccaacccaacaacaaccagatgtgctccagcccagccgggcttcagttccatatttgccatgtgtctgtccagatgtggggttgagcgggggtggggctgcacccagtggattgggtcacccggcagacctagggaaggtgaggcgaggtggggagttggcagaatccccatacctcgcagatttgctgagtctgtcttgtgcagagggccagagaatggcttatgggggcccaggttggatggggaaaggctaatggggtcagaccccaccccgtctacccctccagtcagcccagcgcccatcctgcagctcagctgggagcatcattctcctgctttgtacatagggtgtggtcccctggcacgtggccaccatcatgtctaggcctatgctaggaggcaaatggccaggctctgcctgtgtttttctcaacactacttttctgatatgagggcagcacctgcctctgaatgggaaatcatgcaactactcagaatgtgtcctcctcatctaatgctcatctgtttaatggtgatgcctcgcgtacaggatctggttacctgtgcagttgtgaatacccagaggttgggcagatcagtgtctctagtcctacccagttttaaagttcatggtaagatttgacctcatctcccgcaaataaatgtattggtgatttgga

SEQ ID NO: 445500 - DNA, 1884 bp, Homo sapiens
gatgagccgatgccccccaccctcgccgccgggcgccatgggagcttcggacccggaagtggcgccctgggctcgcggcggtgccgcggggatggcgggagccggagctggagccggagctcgcggcggagcggcggcgggggtcgaggctcgagctcgcgatccaccgcccgcgcaccgcgcacatcctcgccaccctcggcctgcggctcagccctcggcccgcaggatggatggcgggtcagggggcctggggtctggggacaacgccccgaccactgaggctcttttcgtggcactgggcgcgggcgtgacggcgctcagccatcccctgctctacgtgaagctgctcatccagccaagtacatcgtgcaagtggatggtaagatagggctgttccgaggcctgagtccccggctgatgtccaacgccctctctactgtgactcggggtagcatgaagaaggttttccctccagatgagattgagcaggtttccaacaaggatgatatgaagacttccctgaagaaagttgtgaaggagacctcctacgagatgatgatgcagtgtgtgtcccgcatgttggcccaccccctgcatgtcatctcaatgcgctgcatggtccagtttgtgggacgggaggccaagtacagtggtgtgctgagctccattgggaagattttcaaagaggaagggctgctgggattcttcgttggattaatccctcacctcctgggcgatgtggttttcttgtggggctgtaacctgctggcccacttcatcaatgcctacctggtggatgacagcgtgagtgacaccccaggggggctgggaaacgaccagaatccaggttcccagttcagccaggccctggccatccggagctataccaagttcgtgatggggattgcagtgagcatgctgacctaccccttcctgctagttggcgacctcatggctgtgaacaactgcgggctgcaagctgggctccccccttactccccagtgttcaaatcctggattcactgctggaagtacctgagtgtgcagggccagctcttccgaggctccagcctgcttttccgccgggtgtcatcaggatcatgctttgccctggagtaacctgaatcatctaaaaaacacggtctcaacctggccaccgtgggtgaggcctgaccaccttgggacacctgcaagacgactccaacccaacaacaaccagatgtgctccagcccagccgggcttcagttccatatttgccatgtgtctgtccagatgtggggttgagcgggggtggggctgcacccagtggattgggtcacccggcagacctagggaaggtgaggcgaggtggggagttggcagaatccccatacctcgcagatttgctgagtctgtcttgtgcagagggccagagaatggcttatgggggcccaggttggatggggaaaggctaatggggtcagaccccaccccgtctacccctccagtcagcccagcgcccatcctgcagctcagctgggagcatcattctcctgctttgtacatagggtgtggtcccctggcacgtggccaccatcatgtctaggcctatgctaggaggcaaatggccaggctctgcctgtgtttttctcaacactacttttctgatatgagggcagcacctgcctctgaatgggaaatcatgcaactactcagaatgtgtcctcctcatctaatgctcatctgtttaatggtgatgcctcgcgtacaggatctggttacctgtgcagttgtgaatacccagaggttgggcagatcagtgtctctagtcctacccagttttaaagttcatggtaagatttgacctcatctcccgcaaataaatgtattggtgatttgga

SEQ ID NO: 445501 - DNA, 1296 bp, Homo sapiens
acaggaccctcccagcgaaaccacagccaagggaacggtccgctctccacccaccccctgcatgtcatctcaatgcgctgcatggtccagtttgtgggacgggaggccaagtacagtggtgtgctgagctccattgggaagattttcaaagaggaagggctgctgggattcttcgttggattaatccctcacctcctgggcgatgtggttttcttgtggggctgtaacctgctggcccacttcatcaatgcctacctggtggatgacagcttcagccaggccctggccatccggagctataccaagttcgtgatggggattgcagtgagcatgctgacctaccccttcctgctagttggcgacctcatggctgtgaacaactgcgggctgcaagctgggctccccccttactccccagtgttcaaatcctggattcactgctggaagtacctgagtgtgcagggccagctcttccgaggctccagcctgcttttccgccgggtgtcatcaggatcatgctttgccctggagtaacctgaatcatctaaaaaacacggtctcaacctggccaccgtgggtgaggcctgaccaccttgggacacctgcaagacgactccaacccaacaacaaccagatgtgctccagcccagccgggcttcagttccatatttgccatgtgtctgtccagatgtggggttgagcgggggtggggctgcacccagtggattgggtcacccggcagacctagggaaggtgaggcgaggtggggagttggcagaatccccatacctcgcagatttgctgagtctgtcttgtgcagagggccagagaatggcttatgggggcccaggttggatggggaaaggctaatggggtcagaccccaccccgtctacccctccagtcagcccagcgcccatcctgcagctcagctgggagcatcattctcctgctttgtacatagggtgtggtcccctggcacgtggccaccatcatgtctaggcctatgctaggaggcaaatggccaggctctgcctgtgtttttctcaacactacttttctgatatgagggcagcacctgcctctgaatgggaaatcatgcaactactcagaatgtgtcctcctcatctaatgctcatctgtttaatggtgatgcctcgcgtacaggatctggttacctgtgcagttgtgaatacccagaggttgggcagatcagtgtctctagtcctacccagttttaaagttcatggtaagatttgacctcatctcccgcaaataaatgtattggtgatttgga

SEQ ID NO: 445502 - DNA, 1821 bp, Homo sapiens
gtgggtaagctgctgctgtcacatacagagcaagggtggccaggagtgcaccgctaagtggtttctcatctaggtgggcagctgtctgaccagaggctgccgtgcttacatcagcaacaacagcagtcaacagatttgtctaaagtgtttttcaagtgcttttccgtatgtggcttaaaggccgaggtgaggctgccgggttgtcaaagccactcaagcagacatctgagcaaatctctgaccaagaacccaggccatcgatctggtgggatggccgctccacaggaagctgagggtgggggagtcacctttcctcactaggagctgtttgcttcagcaaagcaggatttgaggagttggggtctgaagggggaaaagcttgctgaggtggaggtggcgataagcctggacttgccctcacctcaccccacaggccaggattcgtctttgggtttcagggtgcatgtctgtcttagcactgactgcgtgccaagccctggatgttggtcaggcagacacgggctcagcccttgaggctcacagtccggtgggttgcacaggcagcggcagctgatccctcttaccgggtctccttctcgggactcccttcagtccacttaccccgtttctgccccccaggccttctctgggcagtgactgtgagggctgacaggaaaggcatgtgcagcgtgcttgtgaggagctcagcacagagggtggggtgagggcatgtgttgctgaagtctgcatcctgaggtgcctgtggcaaaccactcttcccttctgtctcctcagttcagccaggccctggccatccggagctataccaagttcgtgatggggattgcagtgagcatgctgacctaccccttcctgctagttggcgacctcatggctgtgaacaactgcgggctgcaagctgggctccccccttactccccagtgttcaaatcctggattcactgctggaagtacctgagtgtgcagggccagctcttccgaggctccagcctgcttttccgccgggtgtcatcaggatcatgctttgccctggagtaacctgaatcatctaaaaaacacggtctcaacctggccaccgtgggtgaggcctgaccaccttgggacacctgcaagacgactccaacccaacaacaaccagatgtgctccagcccagccgggcttcagttccatatttgccatgtgtctgtccagatgtggggttgagcgggggtggggctgcacccagtggattgggtcacccggcagacctagggaaggtgaggcgaggtggggagttggcagaatccccatacctcgcagatttgctgagtctgtcttgtgcagagggccagagaatggcttatgggggcccaggttggatggggaaaggctaatggggtcagaccccaccccgtctacccctccagtcagcccagcgcccatcctgcagctcagctgggagcatcattctcctgctttgtacatagggtgtggtcccctggcacgtggccaccatcatgtctaggcctatgctaggaggcaaatggccaggctctgcctgtgtttttctcaacactacttttctgatatgagggcagcacctgcctctgaatgggaaatcatgcaactactcagaatgtgtcctcctcatctaatgctcatctgtttaatggtgatgcctcgcgtacaggatctggttacctgtgcagttgtgaatacccagaggttgggcagatcagtgtctctagtcctacccagttttaaagttcatggtaagatttgacctcatctcccgcaaataaatgtattggtgatttgga

SEQ ID NO: 445503 - DNA, 1026 bp, Homo sapiens
atctagaggatccctgaacattcgtgtcataccaagttcgtgatggggattgcagtgagcatgctgacctaccccttcctgctagttggcgacctcatggctgtgaacaactgcgggctgcaagctgggctccccccttactccccagtgttcaaatcctggattcactgctggaagtacctgagtgtgcagggccagctcttccgaggctccagcctgcttttccgccgggtgtcatcaggatcatgctttgccctggagtaacctgaatcatctaaaaaacacggtctcaacctggccaccgtgggtgaggcctgaccaccttgggacacctgcaagacgactccaacccaacaacaaccagatgtgctccagcccagccgggcttcagttccatatttgccatgtgtctgtccagatgtggggttgagcgggggtggggctgcacccagtggattgggtcacccggcagacctagggaaggtgaggcgaggtggggagttggcagaatccccatacctcgcagatttgctgagtctgtcttgtgcagagggccagagaatggcttatgggggcccaggttggatggggaaaggctaatggggtcagaccccaccccgtctacccctccagtcagcccagcgcccatcctgcagctcagctgggagcatcattctcctgctttgtacatagggtgtggtcccctggcacgtggccaccatcatgtctaggcctatgctaggaggcaaatggccaggctctgcctgtgtttttctcaacactacttttctgatatgagggcagcacctgcctctgaatgggaaatcatgcaactactcagaatgtgtcctcctcatctaatgctcatctgtttaatggtgatgcctcgcgtacaggatctggttacctgtgcagttgtgaatacccagaggttgggcagatcagtgtctctagtcctacccagttttaaagttcatggtaagatttgacctcatctcccgcaaataaatgtattggtgatttgga

SEQ ID NO: 445504 - DNA, 1011 bp, Homo sapiens
  misc_feature (47)..(47): n is a, c, g, or t
  misc_feature (97)..(97): n is a, c, g, or t
acatacagcaactattacaagtttgtgataaaaacagccgtgtgtcntcttacctaccccttcctgctagaaggcgacctcatttctaaaaacagcnagaagctgcaagctgggctccccccttactccccagtgttcaaatcctggattcactgctggaagtacctgagtgtgcagggccagctcttccgaggctccagcctgcttttccgccgggtgtcatcaggatcatgctttgccctggagtaacctgaatcatctaaaaaacacggtctcaacctggccaccgtgggtgaggcctgaccaccttgggacacctgcaagacgactccaacccaacaacaaccagatgtgctccagcccagccgggcttcagttccatatttgccatgtgtctgtccagatgtggggttgagcgggggtggggctgcacccagtggattgggtcacccggcagacctagggaaggtgaggcgaggtggggagttggcagaatccccatacctcgcagatttgctgagtctgtcttgtgcagagggccagagaatggcttatgggggcccaggttggatggggaaaggctaatggggtcagaccccaccccgtctacccctccagtcagcccagcgcccatcctgcagctcagctgggagcatcattctcctgctttgtacatagggtgtggtcccctggcacgtggccaccatcatgtctaggcctatgctaggaggcaaatggccaggctctgcctgtgtttttctcaacactacttttctgatatgagggcagcacctgcctctgaatgggaaatcatgcaactactcagaatgtgtcctcctcatctaatgctcatctgtttaatggtgatgcctcgcgtacaggatctggttacctgtgcagttgtgaatacccagaggttgggcagatcagtgtctctagtcctacccagttttaaagttcatggtaagatttgacctcatctcccgcaaataaatgtattggtgatttgga

SEQ ID NO: 445505 - DNA, 731 bp, Homo sapiens
  misc_feature (75)..(75): n is a, c, g, or t
tcatatttgccatgtgtctgtccagatgtggaactgaagcccggctgggctggagcacatctggttgttgtgggntggagcccagccgggcttcagttccatatttgccatgtgtctgtccagatgtggggttgagcgggggtggggctgcacccagtggattgggtcacccggcagacctagggaaggtgaggcgaggtggggagttggcagaatccccatacctcgcagatttgctgagtctgtcttgtgcagagggccagagaatggcttatgggggcccaggttggatggggaaaggctaatggggtcagaccccaccccgtctacccctccagtcagcccagcgcccatcctgcagctcagctgggagcatcattctcctgctttgtacatagggtgtggtcccctggcacgtggccaccatcatgtctaggcctatgctaggaggcaaatggccaggctctgcctgtgtttttctcaacactacttttctgatatgagggcagcacctgcctctgaatgggaaatcatgcaactactcagaatgtgtcctcctcatctaatgctcatctgtttaatggtgatgcctcgcgtacaggatctggttacctgtgcagttgtgaatacccagaggttgggcagatcagtgtctctagtcctacccagttttaaagttcatggtaagatttgacctcatctcccgcaaataaatgtattggtgatttgga

SEQ ID NO: 445506 - DNA, 322 bp, Homo sapiens
  misc_feature (14)..(14): n is a, c, g, or t
  misc_feature (27)..(27): n is a, c, g, or t
  misc_feature (29)..(29): n is a, c, g, or t
gcggcccctactantactaaattcgcngncgctcgacggaggcaaatggccaggctctgcctgtgtttttctcaacactacttttctgatatgagggcagcacctgcctctgaatgggaaatcatgcaactactcagaatgtgtcctcctcatctaatgctcatctgtttaatggtgatgcctcgcgtacaggatctggttacctgtgcagttgtgaatacccagaggttgggcagatcagtgtctctagtcctacccagttttaaagttcatggtaagatttgacctcatctcccgcaaataaatgtattggtgatttgga

SEQ ID NO: 445507 - DNA, 772 bp, Homo sapiens
aggcgtactgaggccccgcagggggcggggaagcctgcgtgtgcgcagctcggcccggcccgccctcttcatcctagcccgccccctccccggctctggacccggttctgtgggagggtccgttccgggctcggtgcgactgcgcagctcctcggcgcttcctcggtggcttccccgggtcgagcaaacaggtaagttcggggagacttcaggccagggcagtctcctgtcttctcttggaaaccacagcagcccatgcacacagaatggcagccacattccagcttccagggcaccaggagatgccgctgaccttccaggatgtggccgtgtacttctctcaggcggaggggcggcagctgggcccccagcagcgggcgctctaccgggatgtgatgctggagaactatgggaacgtggcctctctgggattccctgtccctaagccggagttgatctcccagctggagcaggggaaggaactttgggtcctgaatcttctgggagctgaggaaccagatatcttgaaaagctgccagaaaggtgagaatggatgggatgctaatcctgggagcagcctcccaatcctgccttaagaggctccaagcgagggacagctggggcatggcgttcatattaatggcctcccccaggggcagtctcacagatacagcccctctacaaatgtgagcatgtgcacatgctttagaagttttatcttgctggtctgtttctttgctttaaaaatatatatatactacttctgatcata

SEQ ID NO: 445508 - DNA, 737 bp, Homo sapiens
aggcgtactgaggccccgcagggggcggggaagcctgcgtgtgcgcagctcggcccggcccgccctcttcatcctagcccgccccctccccggctctggacccggttctgtgggagggtccgttccgggctcggtgcgactgcgcagctcctcggcgcttcctcggtggcttccccgggtcgagcaaacaggtaagttcggggagacttcaggccagggcagtctcctgtcttctcttggaaaccacagcagcccatgcacacagaatggcagccacattccagcttccagggcaccaggagatgccgctgaccttccaggatgtggccgtgtacttctctcaggcggaggggcggcagctgggcccccagcagcgggcgctctaccgggatgtgatgctggagaactatgggaacgtggcctctctgggattccctgtccctaagccggagttgatctcccagctggagcaggggaaggaactttgggtcctgaatcttctgggagctgaggaaccagatatcttgaaaagctgccagaaagttattctttcagttgctgagagaggggtgtttgttggcttcatgtatcttgaagctgtattataagacttacttcacttatgactatcattatgagagataagagaattcctgtttgtctctggtaatacattttgttttgaaatatattttatctaatattaatgtagcaattccatccttcttatacttact

SEQ ID NO: 445509 - DNA, 3613 bp, Homo sapiens
aggcgtactgaggccccgcagggggcggggaagcctgcgtgtgcgcagctcggcccggcccgccctcttcatcctagcccgccccctccccggctctggacccggttctgtgggagggtccgttccgggctcggtgcgactgcgcagctcctcggcgcttcctcggtggcttccccgggtcgagcaaacaggtggggcagtgtcggaccaggaaggagcgccaagcgggcaggcaggcggggagggcgcggggagggcgcggggaggcggcggccagtccaggaggagcctgttctgggtgccgcgggagccaccgacgggctgcagaggccgggaggaggcgaccgcggcgcggccctagaaggctggactgaggaccacagctggcttccggcctctccccggagcctggggccttcggcagcatccccgcggcctccttctcacgtcctcagccttggtgaggctgcaccctcacgtggctctttgccccaggttggccaggcaggtagaacggccctgcaccccatttccagggccttcagcaggtctggaccacgggaactgccagctttcaccccttagccgggcgtccctggatccccccgggctctggctctggccgttctgggatttcaggagtcactgagcagtagggcacgtcggcccgtgctgcatagtgacctgcctcccgcgacccaggaggccacagcagcaatcagcttctgcctcctggccatccttccacacccctggttgaatggggctgagcctgagttctccccactgaaggtaagttcggggagacttcaggccagggcagtctcctgtcttctcttggaaaccacagcagcccatgcacacagaatggcagccacattccagcttccagggcaccaggagatgccgctgaccttccaggatgtggccgtgtacttctctcaggcggaggggcggcagctgggcccccagcagcgggcgctctaccgggatgtgatgctggagaactatgggaacgtggcctctctgggattccctgtccctaagccggagttgatctcccagctggagcaggggaaggaactttgggtcctgaatcttctgggagctgaggaaccagatatcttgaaaagctgccagaaagattctgaggttgggaccaagaaggaactatctattttaaaccaaaaattttccgaagaagtaaaaaccccagaatttgtatcaagaagactcttaagggataatgcacaggccgctgagtttcgggaagcatggggccgtgagggcaaactcaaagagcgcgtgggaaattctgccgggcagagtttgaacaaacccaatattcacaagagagttttaacagaagctaccgtgggcagggaaagatctttgggagaaagaacccaagagtgtagtgcatttgatagaaacttgaatctggaccaaaatgttgttagacttcaaagaaataaaacaggagagagggtctttaaatgtgatatatgcagcaaaaccttcaaatataattcagacctaagtagacaccagagaagtcacactggggagaagccgtacgaatgtggccggtgtgggcgagcctttactcacagctcaaatcttgttctgcaccatcacattcacactggaaataaaccatttaaatgtgatgaatgtgggaaaacttttggactcaattctcacctccgtcttcatcggagaattcacactggagaaaaaccctttggctgtggtgagtgtgggaaggctttcagtcgaagctcaactcttattcaacatcggatcattcacacaggagagaaaccctacaagtgtaatgaatgtggaagaggctttagccagagcccccagttaactcagcatcagagaattcacactggagagaagccgcatgaatgcagtcactgtgggaaggccttcagtcgaagctccagccttattcagcatgagagaattcacactggagagaagccccataaatgcaatcagtgtgggaaggccttcagtcagagctcaagccttttcctccatcatcgggttcatactggagagaaaccctatgtatgtaatgaatgcggcagagcctttggttttaactctcatcttactgaacacgtaaggattcacacaggagaaaaaccctatgtttgtaatgagtgcggcaaagcctttcgtcggagttccactcttgttcagcatcgaagagttcacactggggagaagccctaccagtgcgttgaatgtgggaaagctttcagccagagctcccagctcaccctacatcagcgagttcacactggagagaagccctatgactgtggtgactgtgggaaggccttcagccggaggtcaaccctcattcagcatcagaaagttcacagcggagagactcgtaagtgcagaaaacatggtccagcctttgttcatggctccagcctcacagcagatggacagattcccactggagagaagcacggcagagcctttaaccatggtgcaaatctcattctgcgctggacagttcacactggtgagaaatcctttggatgtaatgaatatggaaaagctttcagtcccacctcacgacccactgaagatcagataatgcatgctggggaaaagccctataaatgtcaagaatgtggaaacgccttcagtggaaagtcaacccttattcaacatcaggtaactcacactggtcagaaaccatgtcattgcagtgtgtatgggaaagccttcagccagagttcacagctcacaccacctcagcagactcgtgttggagagaaacctgctttaaatgatggctctaaaagatactttattcatatcaagaagattttccaagaaagacatttttaatgtgataaatgcagaagacagtttagcaactgttcacttgacattagaagataagatggcataatgaaagatatataaggtctaaatattactggcaaagtaaaataaatagttcagatgactactaaagtcaaagtcattaaatctggaagtaaacacgagaattcattctgggaaatcaggctgtctgtgtaaaggttactgctgtgctcaggagttgaaccgtgtggtgctgtatccggatactcatgacgaatggatggagggcgtgaaaagtgagcccagctggtgctctgggtctaccctacctgacatccttccagtcttatcctttgtttcctatccaggcccaggcttgtggctgagaacatccactttcagtcccatatacctgcctccaagtgtggtacagagaacttgggcctgctgggggcgcttagccttactctctccaccacctctcccaccaacccccagatgaactgcaggtagacgtttcttccttgcttggagccccagtttttgcatttcattttcattaaaatgaaaggtggtttggttttggttctaaggagctctacagtttaacagagagagggaccttaggggccaagaaagcaggggcctaccaagtatctccacttttgaaaattgtaattactgataaaaaattttttaaaggcaggtttattgaagcataatttataaacaataaaatttactcttttta

SEQ ID NO: 445510 - DNA, 3012 bp, Homo sapiens
aggcgtactgaggccccgcagggggcggggaagcctgcgtgtgcgcagctcggcccggcccgccctcttcatcctagcccgccccctccccggctctggacccggttctgtgggagggtccgttccgggctcggtgcgactgcgcagctcctcggcgcttcctcggtggcttccccgggtcgagcaaacaggtaagttcggggagacttcaggccagggcagtctcctgtcttctcttggaaaccacagcagcccatgcacacagaatggcagccacattccagcttccagggcaccaggagatgccgctgaccttccaggatgtggccgtgtacttctctcaggcggaggggcggcagctgggcccccagcagcgggcgctctaccgggatgtgatgctggagaactatgggaacgtggcctctctgggattccctgtccctaagccggagttgatctcccagctggagcaggggaaggaactttgggtcctgaatcttctgggagctgaggaaccagatatcttgaaaagctgccagaaagattctgaggttgggaccaagaaggaactatctattttaaaccaaaaattttccgaagaagtaaaaaccccagaatttgtatcaagaagactcttaagggataatgcacaggccgctgagtttcgggaagcatggggccgtgagggcaaactcaaagagcgcgtgggaaattctgccgggcagagtttgaacaaacccaatattcacaagagagttttaacagaagctaccgtgggcagggaaagatctttgggagaaagaacccaagagtgtagtgcatttgatagaaacttgaatctggaccaaaatgttgttagacttcaaagaaataaaacaggagagagggtctttaaatgtgatatatgcagcaaaaccttcaaatataattcagacctaagtagacaccagagaagtcacactggggagaagccgtacgaatgtggccggtgtgggcgagcctttactcacagctcaaatcttgttctgcaccatcacattcacactggaaataaaccatttaaatgtgatgaatgtgggaaaacttttggactcaattctcacctccgtcttcatcggagaattcacactggagaaaaaccctttggctgtggtgagtgtgggaaggctttcagtcgaagctcaactcttattcaacatcggatcattcacacaggagagaaaccctacaagtgtaatgaatgtggaagaggctttagccagagcccccagttaactcagcatcagagaattcacactggagagaagccgcatgaatgcagtcactgtgggaaggccttcagtcgaagctccagccttattcagcatgagagaattcacactggagagaagccccataaatgcaatcagtgtgggaaggccttcagtcagagctcaagccttttcctccatcatcgggttcatactggagagaaaccctatgtatgtaatgaatgcggcagagcctttggttttaactctcatcttactgaacacgtaaggattcacacaggagaaaaaccctatgtttgtaatgagtgcggcaaagcctttcgtcggagttccactcttgttcagcatcgaagagttcacactggggagaagccctaccagtgcgttgaatgtgggaaagctttcagccagagctcccagctcaccctacatcagcgagttcacactggagagaagccctatgactgtggtgactgtgggaaggccttcagccggaggtcaaccctcattcagcatcagaaagttcacagcggagagactcgtaagtgcagaaaacatggtccagcctttgttcatggctccagcctcacagcagatggacagattcccactggagagaagcacggcagagcctttaaccatggtgcaaatctcattctgcgctggacagttcacactggtgagaaatcctttggatgtaatgaatatggaaaagctttcagtcccacctcacgacccactgaagatcagataatgcatgctggggaaaagccctataaatgtcaagaatgtggaaacgccttcagtggaaagtcaacccttattcaacatcaggtaactcacactggtcagaaaccatgtcattgcagtgtgtatgggaaagccttcagccagagttcacagctcacaccacctcagcagactcgtgttggagagaaacctgctttaaatgatggctctaaaagatactttattcatatcaagaagattttccaagaaagacatttttaatgtgataaatgcagaagacagtttagcaactgttcacttgacattagaagataagatggcataatgaaagatatataaggtctaaatattactggcaaagtaaaataaatagttcagatgactactaaagtcaaagtcattaaatctggaagtaaacacgagaattcattctgggaaatcaggctgtctgtgtaaaggttactgctgtgctcaggagttgaaccgtgtggtgctgtatccggatactcatgacgaatggatggagggcgtgaaaagtgagcccagctggtgctctgggtctaccctacctgacatccttccagtcttatcctttgtttcctatccaggcccaggcttgtggctgagaacatccactttcagtcccatatacctgcctccaagtgtggtacagagaacttgggcctgctgggggcgcttagccttactctctccaccacctctcccaccaacccccagatgaactgcaggtagacgtttcttccttgcttggagccccagtttttgcatttcattttcattaaaatgaaaggtggtttggttttggttctaaggagctctacagtttaacagagagagggaccttaggggccaagaaagcaggggcctaccaagtatctccacttttgaaaattgtaattactgataaaaaattttttaaaggcaggtttattgaagcataatttataaacaataaaatttactcttttta

SEQ ID NO: 445511 - DNA, 3195 bp, Homo sapiens
aggcgtactgaggccccgcagggggcggggaagcctgcgtgtgcgcagctcggcccggcccgccctcttcatcctagcccgccccctccccggctctggacccggttctgtgggagggtccgttccgggctcggtgcgactgcgcagctcctcggcgcttcctcggtggcttccccgggtcgagcaaacaggtggggcagtgtcggaccaggaaggagcgccaagcgggcaggcaggcggggagggcgcggggagggcgcggggaggcggcggccagtccaggaggagcctgttctgggtgccgcgggagccaccgacgggctgcagaggccgggaggaggcgaccgcggcgcggccctagaaggctggactgaggaccacagctggcttccggcctctccccggagcctggggccttcggcagcatccccgcggcctccttctcacgtcctcagccttggtgaggctgcaccctcacgtggctctttgccccaggttggccaggcaggtagaacggccctgcaccccatttccagggccttcagcaggtctggaccacgggaactgccagctttcaccccttagccgggcgtccctggatccccccgggctctggctctggccgttctgggatttcaggagtcactgagcagtagggcacgtcggcccgtgctgcatagtgacctgcctcccgcgacccaggaggccacagcagcaatcagcttctgcctcctggccatccttccacacccctggttgaatggggctgagcctgagttctccccactgaaggtaagttcggggagacttcaggccagggcagtctcctgtcttctcttggaaaccacagcagcccatgcacacagaatggcagccacattccagcttccagggcaccaggagatgccgctgaccttccaggatgtggccgtgtacttctctcaggcggaggggcggcagctgggcccccagcagcgggcgctctaccgggatgtgatgctggagaactatgggaacgtggcctctctgggattccctgtccctaagccggagttgatctcccagctggagcaggggaaggaactttgggtcctgaatcttctgggagctgaggaaccagatatcttgaaaagctgccagaaagattctgaggttgggaccaagaaggaactatctattttaaaccaaaaattttccgaagaagtaaaaaccccagaatttgtatcaagaagactcttaagggataatgcacaggccgctgagtttcgggaagcatggggccgtgagggcaaactcaaagagcgcgtgggaaattctgccgggcagagtttgaacaaacccaatattcacaagagagttttaacagaagctaccgtgggcagggaaagatctttgggagaaagaacccaagagtgtagtgcatttgatagaaacttgaatctggaccaaaatgttgttagacttcaaagaaataaaacaggagagagggtctttaaatgtgatatatgcagcaaaaccttcaaatataattcagacctaagtagacaccagagaagtcacactggggagaagccgtacgaatgtggccggtgtgggcgagcctttactcacagctcaaatcttgttctgcaccatcacattcacactggaaataaaccatttaaatgtgatgaatgtgggaaaacttttggactcaattctcacctccgtcttcatcggagaattcacactggagaaaaaccctttggctgtggtgagtgtgggaaggctttcagtcgaagctcaactcttattcaacatcggatcattcacacaggagagaaaccctacaagtgtaatgaatgtggaagaggctttagccagagcccccagttaactcagcatcagagaattcacactggagagaagccgcatgaatgcagtcactgtgggaaggccttcagtcgaagctccagccttattcagcatgagagaattcacactggagagaagccccataaatgcaatcagtgtgggaaggccttcagtcagagctcaagccttttcctccatcatcgggttcatactggagagaaaccctatgtatgtaatgaatgcggcagagcctttggttttaactctcatcttactgaacacgtaaggattcacacaggagaaaaaccctatgtttgtaatgagtgcggcaaagcctttcgtcggagttccactcttgttcagcatcgaagagttcacactggggagaagccctaccagtgcgttgaatgtgggaaagctttcagccagagctcccagctcaccctacatcagcgagttcacactggagagaagccctatgactgtggtgactgtgggaaggccttcagccggaggtcaaccctcattcagcatcagaaagttcacagcggagagactcgtaagtgcagaaaacatggtccagcctttgttcatggctccagcctcacagcagatggacagattcccactggagagaagcacggcagagcctttaaccatggtgcaaatctcattctgcgctggacagttcacactggtgagaaatcctttggatgtaatgaatatggaaaagctttcagtcccacctcacgacccactgaagatcagataatgcatgctggggaaaagccctataaatgtcaagaatgtggaaacgccttcagtggaaagtcaacccttattcaacatcaggtaactcacactggtcagaaaccatgtcattgcagtgtgtatgggaaagccttcagccagagttcacagctcacaccacctcagcagactcgtgttggagagaaacctgctttaaatgatggctctaaaagatactttattcatatcaagaagattttccaagaaagacatttttaatgtgataaatgcagaagacagtttagcaactgttcacttgacattagaagataagatggcataatgaaagatatataaggtctaaatattactggcaaagtaaaataaatagttcagatgactactaaagtcaaagtcattaaatctggaagtaaacacgagaattcattctgggaaatcaggctgtctgtgtaaaggttactgctgtgctcaggagttgaaccgtgtggtgctgtatccggatactcagatgactactaaagtcaaagtcattaaatctggaagtaaacacgagaattcattctgggaaat

SEQ ID NO: 445512 - DNA, 1104 bp, Homo sapiens
tacgtgactcaggaaagggtggaagggggtgaggataaaagattacaaattgggttcagtgtatactactcggcgatggttgcaccaaaatctcacgacccactgaagatcagataatgcatgctggggaaaagccctataaatgtcaagaatgtggaaacgccttcagtggaaagtcaacccttattcaacatcaggtaactcacactggtcagaaaccatgtcattgcagtgtgtatgggaaagccttcagccagagttcacagctcacaccacctcagcagactcgtgttggagagaaacctgctttaaatgatggctctaaaagatactttattcatatcaagaagattttccaagaaagacatttttaatgtgataaatgcagaagacagtttagcaactgttcacttgacattagaagataagatggcataatgaaagatatataaggtctaaatattactggcaaagtaaaataaatagttcagatgactactaaagtcaaagtcattaaatctggaagtaaacacgagaattcattctgggaaatcaggctgtctgtgtaaaggttactgctgtgctcaggagttgaaccgtgtggtgctgtatccggatactcatgacgaatggatggagggcgtgaaaagtgagcccagctggtgctctgggtctaccctacctgacatccttccagtcttatcctttgtttcctatccaggcccaggcttgtggctgagaacatccactttcagtcccatatacctgcctccaagtgtggtacagagaacttgggcctgctgggggcgcttagccttactctctccaccacctctcccaccaacccccagatgaactgcaggtagacgtttcttccttgcttggagccccagtttttgcatttcattttcattaaaatgaaaggtggtttggttttggttctaaggagctctacagtttaacagagagagggaccttaggggccaagaaagcaggggcctaccaagtatctccacttttgaaaattgtaattactgataaaaaattttttaaaggcaggtttattgaagcataatttataaacaataaaatttactcttttta

SEQ ID NO: 445513 - DNA, 1373 bp, Homo sapiens
aggcgtactgaggccccgcagggggcggggaagcctgcgtgtgcgcagctcggcccggcccgccctcttcatcctagcccgccccctccccggctctggacccggttctgtgggagggtccgttccgggctcggtgcgactgcgcagctcctcggcgcttcctcggtggcttccccgggtcgagcaaacaggtggggcagtgtcggaccaggaaggagcgccaagcgggcaggcaggcggggagggcgcggggagggcgcggggaggcggcggccagtccaggaggagcctgttctgggtgccgcgggagccaccgacgggctgcagaggccgggaggaggcgaccgcggcgcggccctagaaggctggactgaggaccacagctggcttccggcctctccccggagcctggggccttcggcagcatccccgcggcctccttctcacgtcctcagccttggtgaggctgcaccctcacgtggctctttgccccaggttggccaggcaggtagaacggccctgcaccccatttccagggccttcagcaggtctggaccacgggaactgccagctttcaccccttagccgggcgtccctggatccccccgggctctggctctggccgttctgggatttcaggagtcactgagcagtagggcacgtcggcccgtgctgcatagtgacctgcctcccgcgacccaggaggccacagcagcaatcagcttctgcctcctggccatccttccacacccctggttgaatggggctgagcctgagttctccccactgaaggtaagttcggggagacttcaggccagggcagtctcctgtcttctcttggaaaccacagcagcccatgcacacagaatggcagccacattccagcttccagggcaccaggagatgccgctgaccttccaggatgtggccgtgtacttctctcaggcggaggggcggcagctgggcccccagcagcgggcgctctaccgggatgtgatgctggagaactatgggaacgtggcctctctgggattccctgtccctaagccggagttgatctcccagctggagcaggggaaggaactttgggtcctgaatcttctgggagctgaggaaccagatatcttgaaaagctgccagaaaggtgagaatggatgggatgctaatcctgggagcagcctcccaatcctgccttaagaggctccaagcgagggacagctggggcatggcgttcatattaatggcctcccccaggggcagtctcacagatacagcccctctacaaatgtgagcatgtgcacatgctttagaagttttatcttgctggtctgtttctttgctttaaaaatatatatatactacttctgatcata

SEQ ID NO: 445514 - DNA, 400 bp, Homo sapiens
gtgtatagttctttgggctttgacaaaaacatacaattgtgccactaccacattccagacattgaacatcttcaccaccacccagaattcctttgtgctctcttgtggttaacccctcctcaaccccagtccgtggaaaccactggtttgttttctatcctctatccatcacctcaccatttccagaaatagtgtgcagctgtttgcacgtggctgcttttactgaacatgatgcattggagtcatccatattgcctgtgtggagtgcttttttgcaccgagtagcattccattgtatggatggagccatttgtttatccgttcacccatggcagggtatttgggcattttcagtatgggcaactatgattaaagctgccatcactgtgtatcaactaca

SEQ ID NO: 445515 - DNA, 2405 bp, Homo sapiens
aggcgtactgaggccccgcagggggcggggaagcctgcgtgtgcgcagctcggcccggcccgccctcttcatcctagcccgccccctccccggctctggacccggttctgtgggagggtccgttccgggctcggtgcgactgcgcagctcctcggcgcttcctcggtggcttccccgggtcgagcaaacaggtaagttcggggagacttcaggccagggcagtctcctgtcttctcttggaaaccacagcagcccatgcacacagaatggcagccacattccagcttccagggcaccaggagatgccgctgaccttccaggatgtggccgtgtacttctctcaggcggaggggcggcagctgggcccccagcagcgggcgctctaccgggatgtgatgctggagaactatgggaacgtggcctctctgggattccctgtccctaagccggagttgatctcccagctggagcaggggaaggaactttgggtcctgaatcttctgggagctgaggaaccagatatcttgaaaagctgccagaaagattctgaggttgggaccaagaaggaactatctattttaaaccaaaaattttccgaagaagtaaaaaccccagaatttgtatcaagaagactcttaagggataatgcacaggccgctgagtttcgggaagcatggggccgtgagggcaaactcaaagagcgcgtgggaaattctgccgggcagagtttgaacaaacccaatattcacaagagagttttaacagaagctaccgtgggcagggaaagatctttgggagaaagaacccaagagtgtagtgcatttgatagaaacttgaatctggaccaaaatgttgttagacttcaaagaaataaaacaggagagagggtctttaaatgtgatatatgcagcaaaaccttcaaatataattcagacctaagtagacaccagagaagtcacactggggagaagccgtacgaatgtggccggtgtgggcgagcctttactcacagctcaaatcttgttctgcaccatcacattcacactggaaataaaccatttaaatgtgatgaatgtgggaaaacttttggactcaattctcacctccgtcttcatcggagaattcacactggagaaaaaccctttggctgtggtgagtgtgggaaggctttcagtcgaagctcaactcttattcaacatcggatcattcacacaggagagaaaccctacaagtgtaatgaatgtggaagaggctttagccagagcccccagttaactcagcatcagagaattcacactggagagaagccgcatgaatgcagtcactgtgggaaggccttcagtcgaagctccagccttattcagcatgagagaattcacactggagagaagccccataaatgcaatcagtgtgggaaggccttcagtcagagctcaagccttttcctccatcatcgggttcatactggagagaaaccctatgtatgtaatgaatgcggcagagcctttggttttaactctcatcttactgaacacgtaaggattcacacaggagaaaaaccctatgtttgtaatgagtgcggcaaagcctttcgtcggagttccactcttgttcagcatcgaagagttcacactggggagaagccctaccagtgcgttgaatgtgggaaagctttcagccagagctcccagctcaccctacatcagcgagttcacactggagagaagccctatgactgtggtgactgtgggaaggccttcagccggaggtcaaccctcattcagcatcagaaagttcacagcggagagactcgtaagtgcagaaaacatggtccagcctttgttcatggctccagcctcacagcagatggacagattcccactggagagaagcacggcagagcctttaaccatggtgcaaatctcattctgcgctggacagttcacactggtgagaaatcctttggatgtaatgaatatggaaaagctttcagtcccacctcacgacccactgaagatcagataatgcatgctggggaaaagccctataaatgtcaagaatgtggaaacgccttcagtggaaagtcaacccttattcaacatcaggtaactcacactggtcagaaaccatgtcattgcagtgtgtatgggaaagccttcagccagagttcacagctcacaccacctcagcagactcgtgttggagagaaacctgctttaaatgatggctctaaaagatactttattcatatcaagaagattttccaagaaagacatttttaatgtgataaatgcagaagacagtttagcaactgttcacttgacattagaagataagatggcataatgaaagatatataaggtctaaatattactggcaaagtaaaataaatagttcagatgact

SEQ ID NO: 445516 - DNA, 399 bp, Homo sapiens
gcccaagaattcggcacgagggatgctggagaactatgggaacgtggcctctctgggattccctgtccctaagccggagttgatctcccagctggagcaggggaaggaactttgggtcctgaatcttctgggagctgaggaaccagatatcttgaaaagctgccagaaaggtgagaatggatgggatgctaatcctgggagcagcctcccaatcctgccttaagaggctccaagcgagggacagctggggcatggcgttcatattaatggcctcccccaggggcagtctcacagatacagcccctctacaaatgtgagcatgtgcacatgctttagaagttttatcttgctggtctgtttctttgctttaaaaatatatatatactacttctgatcata

SEQ ID NO: 445517 - DNA, 426 bp, Homo sapiens
aggcgtactgaggccccgcagggggcggggaagcctgcgtgtgcgcagctcggcccggcccgccctcttcatcctagcccgccccctccccggctctggacccggttctgtgggagggtccgttccgggctcggtgcgactgcgcagctcctcggcgcttcctcggtggcttccccgggtcgagcaaacaggagatgccgctgaccttccaggatgtggccgtgtacttctctcaggcggaggggcggcagctgggcccccagcagcgggcgctctaccgggatgtgatgctggagaactatgggaacgtggcctctctggctaccaagtatctccacttttgaaaattgtaattactgataaaaaattttttaaaggcaggtttattgaagcataatttataaacaataaaatttactcttttta

SEQ ID NO: 445518 - DNA, 3521 bp, Homo sapiens
aggcgtactgaggccccgcagggggcggggaagcctgcgtgtgcgcagctcggcccggcccgccctcttcatcctagcccgccccctccccggctctggacccggttctgtgggagggtccgttccgggctcggtgcgactgcgcagctcctcggcgcttcctcggtggcttccccgggtcgagcaaacaggtggggcagtgtcggaccaggaaggagcgccaagcgggcaggcaggcggggagggcgcggggagggcgcggggaggcggcggccagtccaggaggagcctgttctgggtgccgcgggagccaccgacgggctgcagaggccgggaggaggcgaccgcggcgcggccctagaaggctggactgaggaccacagctggcttccggcctctccccggagcctggggccttcggcagcatccccgcggcctccttctcacgtcctcagccttggtgaggctgcaccctcacgtggctctttgccccaggttggccaggcaggtagaacggccctgcaccccatttccagggccttcagcaggtctggaccacgggaactgccagctttcaccccttagccgggcgtccctggatccccccgggctctggctctggccgttctgggatttcaggagtcactgagcagtagggcacgtcggcccgtgctgcatagtgacctgcctcccgcgacccaggaggccacagcagcaatcagcttctgcctcctggccatccttccacacccctggttgaatggggctgagcctgagttctccccactgaaggtaagttcggggagacttcaggccagggcagtctcctgtcttctcttggaaaccacagcagcccatgcacacagaatggcagccacattccagcttccagggcaccaggagatgccgctgaccttccaggatgtggccgtgtacttctctcaggcggaggggcggcagctgggcccccagcagcgggcgctctaccgggatgtgatgctggagaactatgggaacgtggcctctctgggattccctgtccctaagccggagttgatctcccagctggagcaggggaaggaactttgggtcctgaatcttctgggagctgaggaaccagatatcttgaaaagctgccagaaagattctgaggttgggaccaagaaggaactatctattttaaaccaaaaattttccgaagaagtaaaaaccccagaatttgtatcaagaagactcttaagggataatgcacaggccgctgagtttcgggaagcatggggccgtgagggcaaactcaaagagcgcgtgggaaattctgccgggcagagtttgaacaaacccaatattcacaagagagttttaacagaagctaccgtgggcagggaaagatctttgggagaaagaacccaagagtgtagtgcatttgatagaaacttgaatctggaccaaaatgttgttagacttcaaagaaataaaacaggagagagggtctttaaatgtgatatatgcagcaaaaccttcaaatataattcagacctaagtagacaccagagaagtcacactggggagaagccgtacgaatgtggccggtgtgggcgagcctttactcacagctcaaatcttgttctgcaccatcacattcacactggaaataaaccatttaaatgtgatgaatgtgggaaaacttttggactcaattctcacctccgtcttcatcggagaattcacactggagaaaaaccctttggctgtggtgagtgtgggaaggctttcagtcgaagctcaactcttattcaacatcggatcattcacacaggagagaaaccctacaagtgtaatgaatgtggaagaggctttagccagagcccccagttaactcagcatcagagaattcacactggagagaagccgcatgaatgcagtcactgtgggaaggccttcagtcgaagctccagccttattcagcatgagagaattcacactggagagaagccccataaatgcaatcagtgtgggaaggccttcagtcagagctcaagccttttcctccatcatcgggttcatactggagagaaaccctatgtatgtaatgaatgcggcagagcctttggttttaactctcatcttactgaacacgtaaggattcacacaggagaaaaaccctatgtttgtaatgagtgcggcaaagcctttcgtcggagttccactcttgttcagcatcgaagagttcacactggggagaagccctaccagtgcgttgaatgtgggaaagctttcagccagagctcccagctcaccctacatcagcgagttcacactggagagaagccctatgactgtggtgactgtgggaaggccttcagccggaggtcaaccctcattcagcatcagaaagttcacagcggagagactcgtaagtgcagaaaacatggtccagcctttgttcatggctccagcctcacagcagatggacagattcccactggagagaagcacggcagagcctttaaccatggtgcaaatctcattctgcgctggacagttcacactggtgagaaatcctttggatgtaatgaatatggaaaagctttcagtcccacctcacgacccactgaagatcagataatgcatgctggggaaaagccctataaatgtcaagaatgtggaaacgccttcagtggaaagtcaacccttattcaacatcaggtaactcacactggtcagaaaccatgtcattgcagtgtgtatgggaaagccttcagccagagttcacagctcacaccacctcagcagactcgtgttggagagaaacctgctttaaatgatggctctaaaagatactttattcatatcaagaagattttccaagaaagacatttttaatgtgataaatgcagaagacagtttagcaactgttcacttgacattagaagataagatggcataatgaaagatatataaggtctaaatattactggcaaagtaaaataaatagttcagatgactactaaagtcaaagtcattaaatctggaagtaaacacgagaattcattctgggaaatcaggctgtctgtgtaaaggttactgctgtgctcaggagttgaaccgtgtggtgctgtatccggatactcatgacgaatggatggagggcgtgaaaagtgagcccagctggtgctctgggtctaccctacctgacatccttccagtcttatccctgctgggggcgcttagccttactctctccaccacctctcccaccaacccccagatgaactgcaggtagacgtttcttccttgcttggagccccagtttttgcatttcattttcattaaaatgaaaggtggtttggttttggttctaaggagctctacagtttaacagagagagggaccttaggggccaagaaagcaggggcctaccaagtatctccacttttgaaaattgtaattactgataaaaaattttttaaaggcaggtttattgaagcataatttataaacaataaaatttactcttttta

SEQ ID NO: 445519 - DNA, 2350 bp, Homo sapiens
aggcgtactgaggccccgcagggggcggggaagcctgcgtgtgcgcagctcggcccggcccgccctcttcatcctagcccgccccctccccggctctggacccggttctgtgggagggtccgttccgggctcggtgcgactgcgcagctcctcggcgcttcctcggtggcttccccgggtcgagcaaacaggtggggcagtgtcggaccaggaaggagcgccaagcgggcaggcaggcggggagggcgcggggagggcgcggggaggcggcggccagtccaggaggagcctgttctgggtgccgcgggagccaccgacgggctgcagaggccgggaggaggcgaccgcggcgcggccctagaaggctggactgaggaccacagctggcttccggcctctccccggagcctggggccttcggcagcatccccgcggcctccttctcacgtcctcagccttggtgaggctgcaccctcacgtggctctttgccccaggttggccaggcaggtagaacggccctgcaccccatttccagggccttcagcaggtctggaccacgggaactgccagctttcaccccttagccgggcgtccctggatccccccgggctctggctctggccgttctgggatttcaggagtcactgagcagtagggcacgtcggcccgtgctgcatagtgacctgcctcccgcgacccaggaggccacagcagcaatcagcttctgcctcctggccatccttccacacccctggttgaatggggctgagcctgagttctccccactgaaggtaagttcggggagacttcaggccagggcagtctcctgtcttctcttggaaaccacagcagcccatgcacacagaatggcagccacattccagcttccagggcaccaggagatgccgctgaccttccaggatgtggccgtgtacttctctcaggcggaggggcggcagctgggcccccagcagcgggcgctctaccgggatgtgatgctggagaactatgggaacgtggcctctctgggattccctgtccctaagccggagttgatctcccagctggagcaggggaaggaactttgggtcctgaatcttctgggagctgaggaaccagatatcttgaaaagctgccagaaagattctgaggttgggaccaagaaggaactatctattttaaaccaaaaattttccgaagaagtaaaaaccccagaatttgtatcaagaagactcttaagggataatgcacaggccgctgagtttcgggaagcatggggccgtgagggcaaactcaaagagcgcgtgggaaattctgccgggcagagtttgaacaaacccaatattcacaagagagttttaacagaagctaccgtgggcagggaaagatctttgggagaaagaacccaagagtgtagtgcatttgatagaaacttgaatctggaccaaaatgttgttagacttcaaagaaataaaacaggagagagggtctttaaatgtgatatatgcagcaaaaccttcaaatataattcagacctaagtagacaccagagaagtcacactggggagaagccgtacgaatgtggccggtgtgggcgagcctttactcacagctcaaatcttgttctgcaccatcacattcacactggaaataaaccatttaaatgtgatgaatgtgggaaaacttttggactcaattctcacctccgtcttcatcggagaattcacactggagaaaaaccctttggctgtggtgagtgtgggaaggctttcagtcgaagctcaactcttattcaacatcggatcattcacacaggagagaaaccctacaagtgtaatgaatgtggaagaggctttagccagagcccccagttaactcagcatcagagaattcacactggagagaagccgcatgaatgcagtcactgtgggaaggccttcagtcgaagctccagccttattcagcatgagagaattcacactggagagaagccccataaatgcaatcagtgtgggaaggccttcagtcagagctcaagccttttcctccatcatcgggttcatactggagagaaaccctatgtatgtaatgaatgcggcagagcctttggttttaactctcatcttactgaacacgtaaggattcacacaggagaaaaaccctatgtttgtaatgagtgcgtccgtcgaagtctatttcgacgaccattcaggctactttgggaaagttggtatgaagcattaccacttaaagaggaaccagagcttctgcccaactgtcaaccttgacaaattgtggacttgtcagtgaacagacacgggtgaatgctccggaggatctatagatcac

SEQ ID NO: 445520 - DNA, 701 bp, Homo sapiens
gcaattctcctgcctcagtctcccgagtagctgggactcaagcacacaccaccatgcccagctaatttttgtgtttttattcgagacgaggtttcaccatattggccaggctggtctcgaactcctgagctcgtgatacgcccgcttcggcctcccaaaatgctgggattacaggtgtgaaccgctgcacccagcccaccatctcattttattaaagggaaattaaagcacaaggaaatacagaccatgactgacaggttagagccactagatttctgtctgcagccacagatcttccttcccaggcatccactgcctgcagctagagagtctagtctgtgttcctcacaacaccattatcagatggggtccctcagatggtgagatgcacaagccactggcatgtcacttagactctgcccaatttggacaaattttatcaaactctggttgtgtttcatttgctggttcattataaggatattacaaaggatatagatgaagagatgtagtgggtgagatatgggggaaagggagcagagattccatgccctccctaggtatgcatgctacccctctaggaacctccacatgttcacctatctggaagcttttattttttttttttgagacggagtttcgctcttgttgcgaggctggagtgcaatggcataatctcggctcactgtaacctccacctc

SEQ ID NO: 445521 - DNA, 656 bp, Homo sapiens
agctccccgcgggggcggcccgtttaaaaataatggatcccccgggtgcaaggaattgggcaggagccgccacacgcacgccgggcgtgccagtttataaagggagagagcaagcagcgagtcttgaagctctgtttggtgctttggatccatttccatcggtccttacagccgctcgtcagactccagcagccaagatggtgaagcagatcgagagcaagactgcttttcaggaagccttggacgctgcaggtgataaacttgtagtagttgacttctcagccacgtggtgtgggccttgcaaaatgatcaagcctttctttcattccctctctgaaaagtattccaacgtgatattccttgaagtagatgtggatgactgtcaggatgttgcttcagagtgtgaagtcaaatgcatgccaacattccagttttttaagaagggacaaaaggtgggtgaattttctggagccaataaggaaaagcttgaagccaccattaatgaattagtctaatcatgttttctgaaaacataaccagccattggctatttaaaacttgtaatttttttaatttacaaaaatataaaatatgaagacataaacccagttgccatctgcgtgacaataaaacattaatgctaacactttttaaaa

SEQ ID NO: 445522 - DNA, 321 bp, Homo sapiens
ctttctccatatctaacataactacacgacccgcccggaggaaaatcttgagatgttgcttcagagtgtgaagtcaaatgcatgccaacattccagttttttaagaagggacaaaaggtgggtgaattttctggagccaataaggaaaagcttgaagccaccattaatgaattagtctaatcatgttttctgaaaacataaccagccattggctatttaaaacttgtaatttttttaatttacaaaaatataaaatatgaagacataaacccagttgccatctgcgtgacaataaaacattaatgctaacactttttaaaa

SEQ ID NO: 445523 - DNA, 545 bp, Homo sapiens
ctgatgctagtaacattctgaacattctgcctgttaatgtgcccgtcaaaggaagtaaatattaataaaacttcttcattgagaatataaccggtttggcttttgtaatgccattatattcattatattaattttcatatgctgaaaaatgtcctcatgcggaaatgtggggtacatgacagggaaaagtttctggttttggattacttctgtcaaagctcagtactcgcagtcttgtatttaatcctctccctttgctactttccctaccaggagatgttgcttcagagtgtgaagtcaaatgcatgccaacattccagttttttaagaagggacaaaaggtgggtgaattttctggagccaataaggaaaagcttgaagccaccattaatgaattagtctaatcatgttttctgaaaacataaccagccattggctatttaaaacttgtaatttttttaatttacaaaaatataaaatatgaagacataaacccagttgccatctgcgtgacaataaaacattaatgctaacactttttaaaa

SEQ ID NO: 445524 - DNA, 348 bp, Homo sapiens
  misc_feature (45)..(45): n is a, c, g, or t
  misc_feature (64)..(64): n is a, c, g, or t
tgatttcatgctttttatatatactaaacatttacatatatcaanaaaaaaaaactcttaaggntagttcgcttccaagatgttgcttcagagtgtgaagtcaaatgcatgccaacattccagttttttaagaagggacaaaaggtgggtgaattttctggagccaataaggaaaagcttgaagccaccattaatgaattagtctaatcatgttttctgaaaacataaccagccattggctatttaaaacttgtaatttttttaatttacaaaaatataaaatatgaagacataaacccagttgccatctgcgtgacaataaaacattaatgctaacactttttaaaa

SEQ ID NO: 445525 - DNA, 338 bp, Homo sapiens
  misc_feature (54)..(54): n is a, c, g, or t
aaatggaaaacaccttactactgtgcaatatccacaccacacaaactcctgagntagttagccttcaagatgttgcttcagagtgtgaagtcaaatgcatgccaacattccagttttttaagaagggacaaaaggtgggtgaattttctggagccaataaggaaaagcttgaagccaccattaatgaattagtctaatcatgttttctgaaaacataaccagccattggctatttaaaacttgtaatttttttaatttacaaaaatataaaatatgaagacataaacccagttgccatctgcgtgacaataaaacattaatgctaacactttttaaaa

SEQ ID NO: 445526 - DNA, 332 bp, Homo sapiens
  misc_feature (38)..(38): n is a, c, g, or t
  misc_feature (59)..(59): n is a, c, g, or t
tgtccaccatctcccaccccgccaccccgcccggaganaatctttaggggagttccctncacgatgttgcttcagagtgtgaagtcaaatgcatgccaacattccagttttttaagaagggacaaaaggtgggtgaattttctggagccaataaggaaaagcttgaagccaccattaatgaattagtctaatcatgttttctgaaaacataaccagccattggctatttaaaacttgtaatttttttaatttacaaaaatataaaatatgaagacataaacccagttgccatctgcgtgacaataaaacattaatgctaacactttttaaaa

SEQ ID NO: 445527 - DNA, 335 bp, Homo sapiens
  misc_feature (39)..(39): n is a, c, g, or t
atcataaaattctttctcaaatattttataaaaaaaaancctatggagtaccttcacatgttttagatgttgcttcagagtgtgaagtcaaatgcatgccaacattccagttttttaagaagggacaaaaggtgggtgaattttctggagccaataaggaaaagcttgaagccaccattaatgaattagtctaatcatgttttctgaaaacataaccagccattggctatttaaaacttgtaatttttttaatttacaaaaatataaaatatgaagacataaacccagttgccatctgcgtgacaataaaacattaatgctaacactttttaaaa

SEQ ID NO: 445528 - DNA, 332 bp, Homo sapiens
  misc_feature (50)..(50): n is a, c, g, or t
  misc_feature (52)..(52): n is a, c, g, or t
tcgcacctattcttttcttatctgtcgtcacgattaattcgtaaaaaatnanaaaaaaaactgatgttgcttcagagtgtgaagtcaaatgcatgccaacattccagttttttaagaagggacaaaaggtgggtgaattttctggagccaataaggaaaagcttgaagccaccattaatgaattagtctaatcatgttttctgaaaacataaccagccattggctatttaaaacttgtaatttttttaatttacaaaaatataaaatatgaagacataaacccagttgccatctgcgtgacaataaaacattaatgctaacactttttaaaa

SEQ ID NO: 445529 - DNA, 327 bp, Homo sapiens
tacagtataatatttctccaccacacgaaaaagaagaaaaacgcttagttagttacagatgttgcttcagagtgtgaagtcaaatgcatgccaacattccagttttttaagaagggacaaaaggtgggtgaattttctggagccaataaggaaaagcttgaagccaccattaatgaattagtctaatcatgttttctgaaaacataaccagccattggctatttaaaacttgtaatttttttaatttacaaaaatataaaatatgaagacataaacccagttgccatctgcgtgacaataaaacattaatgctaacactttttaaaa

SEQ ID NO: 445530 - DNA, 325 bp, Homo sapiens
tccctcgaccgtccctgctcccctaaacaaaaaccaaaaaccacttaggagaaccgatgttgcttcagagtgtgaagtcaaatgcatgccaacattccagttttttaagaagggacaaaaggtgggtgaattttctggagccaataaggaaaagcttgaagccaccattaatgaattagtctaatcatgttttctgaaaacataaccagccattggctatttaaaacttgtaatttttttaatttacaaaaatataaaatatgaagacataaacccagttgccatctgcgtgacaataaaacattaatgctaacactttttaaaa

SEQ ID NO: 445531 - DNA, 375 bp, Homo sapiens
ctttctccatatctaacataactacacgacccgcccggaggaaaatcttgagatgttgcttcagagtgtgaagtcaaatgcatgccaacattccagttttttaagaagggacaaaaggtgggtgaattttctggagccaataaggaaaagcttgaagccaccattaatgaattagtctaatcatgttttctgaaaacataaccagccattggctatttaaaacttgtaatttttttaatttacaaaaatataaaatatgaagacataaacccagttgccatctgcgtgacaataaaacattaatgctaacactttttaaaaaaaaccgtctcatgtctgaatagctttcaaaataaatgtgaaatggtcatttaa

SEQ ID NO: 445532 - DNA, 375 bp, Homo sapiens
cgtattttccattaatttttatcccacaccttcaggtatgacgctctcaaagatgttgcttcagagtgtgaagtcaaatgcatgccaacattccagttttttaagaagggacaaaaggtgggtgaattttctggagccaataaggaaaagcttgaagccaccattaatgaattagtctaatcatgttttctgaaaacataaccagccattggctatttaaaacttgtaatttttttaatttacaaaaatataaaatatgaagacataaacccagttgccatctgcgtgacaataaaacattaatgctaacactttttaaaaaaaaccgtctcatgtctgaatagctttcaaaataaatgtgaaatggtcatttaa

SEQ ID NO: 445533 - DNA, 541 bp, Homo sapiens
ctttctccatatctaacataactacacgacccgcccggaggaaaatcttgagatgttgcttcagagtgtgaagtcaaatgcatgccaacattccagttttttaagaagggacaaaaggtgggtgaattttctggagccaataaggaaaagcttgaagccaccattaatgaattagtctaatcatgttttctgaaaacataaccagccattggctatttaaaacttgtaatttttttaatttacaaaaatataaaatatgaagacataaacccagttgccatctgcgtgacaataaaacattaatgctaacactttttaaaaaaaaccgtctcatgtctgaatagctttcaaaataaatgtgaaatggtcatttaatgtattttcctatattctcaatcactttttagtaaccttgtaggccactgattattttaagattttaaaaattattattgctaccttaatgtattgctacaaaaatctcttgttgggggcaatgcaggtaataaagtagtatgttgttatttgttatcttttgaca

SEQ ID NO: 445534 - DNA, 376 bp, Homo sapiens
gctccaggggcggggcgtggccggggcgcagcgacgggcgcggaggtccggccgggcgcgcgcgcccccgccacacgcacgccgggcgtgccagtttataaagggagagagcaagcagcgagtcttgaagctctgtttggtgctttggatccatttccatcggtccttacagccgctcgtcagactccagcagccaagatggtgaagcagatcgagagcaagactgcttttcaggaagccttggacgctgcaggtgataaacttgtagtagttgacttctcagccacgtggtgtgggccttgcaaaatgatcaagcctttctttcattccctctctgttgcttcagagtgtgaagtctgcatgcccattccgttct

SEQ ID NO: 445535 - DNA, 342 bp, Homo sapiens
atgctgaatacatatttatacatatgtatatatatacatatgtatatgtatatatataaatacatatttatacatattttatgtataaaacagtgctacagtgctacgtctaatgtcaattcaatattctcttaacaggtgggtgaattttctggagccaataaggaaaagcttgaagccaccattaatgaattagtctaatcatgttttctgaaaacataaccagccattggctatttaaaacttgtaatttttttaatttacaaaaatataaaatatgaagacataaacccagttgccatctgcgtgacaataaaacattaatgctaacactttttaaaa

SEQ ID NO: 445536 - DNA, 396 bp, Homo sapiens
atgctgaatacatatttatacatatgtatatatatacatatgtatatgtatatatataaatacatatttatacatattttatgtataaaacagtgctacagtgctacgtctaatgtcaattcaatattctcttaacaggtgggtgaattttctggagccaataaggaaaagcttgaagccaccattaatgaattagtctaatcatgttttctgaaaacataaccagccattggctatttaaaacttgtaatttttttaatttacaaaaatataaaatatgaagacataaacccagttgccatctgcgtgacaataaaacattaatgctaacactttttaaaaaaaaccgtctcatgtctgaatagctttcaaaataaatgtgaaatggtcatttaa

SEQ ID NO: 445537 - DNA, 431 bp, Homo sapiens
tactcaggaggctgaggcaagagaatcacttgaaccccggaggcaaaggttactgtgagccgagatcaggcctttgcactccagcctgggcaacaagtgaaactccgtctcaaaaacaaaacaaaacaaaaatgagtccttggtaactagaatattcggttcccagggttacagtatctagatagtaaataattcagggaagttagtggtaagagatttcttgatcatttctactgagaattttatttaacaagcattccttatgaaaaataatatctatgaaaaatttccttcatgaggaacgaaaactttcatttaatgaatgacaagggtatagttttaaaataaagggcaaaaatcaaaggttggtaaacgtgtgatctcagctctggaaaccccattatgcttatgtcacggtgatgtctgagtgt

SEQ ID NO: 445538 - DNA, 332 bp, Homo sapiens
tggctaaaaagtaggtcctgaaaggaggacctccagaatgtgctttgtgtcattgtgtcgagtctttcttttgaaggtttaatatttaactatttatttaatataagcttttcttttgctgttagactgcttttcaggaagccttggacgctgcaggtgataaacttgtagtagttgacttctcagccacgtggtgtgggccttgcaaaatgatcaagcctttctttcatatgtgagtattaaacaatgtctgctttgtaagagatttgtgttttttgagttggtggtcacagtggtaggaaagaaagacagttaaaggattttggtttcgg

SEQ ID NO: 445539 - DNA, 711 bp, Homo sapiens
gctccaggggcggggcgtggccggggcgcagcgacgggcgcggaggtccggccgggcgcgcgcgcccccgccacacgcacgccgggcgtgccagtttataaagggagagagcaagcagcgagtcttgaagctctgtttggtgctttggatccatttccatcggtccttacagccgctcgtcagactccagcagccaagatggtgaagcagatcgagagcaagactgcttttcaggaagccttggacgctgcaggtgataaacttgtagtagttgacttctcagccacgtggtgtgggccttgcaaaatgatcaagcctttctttcattccctctctgaaaagtattccaacgtgatattccttgaagtagatgtggatgactgtcaggatgttgcttcagagtgtgaagtcaaatgcatgccaacattccagttttttaagaagggacaaaaggtgggtgaattttctggagccaataaggaaaagcttgaagccaccattaatgaattagtctaatcatgttttctgaaaacataaccagccattggctatttaaaacttgtaatttttttaatttacaaaaatataaaatatgaagacataaacccagttgccatctgcgtgacaataaaacattaatgctaacactttttaaaaaaaaccgtctcatgtctgaatagctttcaaaataaatgtgaaatggtcatttaa

SEQ ID NO: 445540 - DNA, 900 bp, Homo sapiens
  misc_feature (682)..(682): n is a, c, g, or t
gctccaggggcggggcgtggccggggcgcagcgacgggcgcggaggtccggccgggcgcgcgcgcccccgccacacgcacgccgggcgtgccagtttataaagggagagagcaagcagcgagtcttgaagctctgtttggtgctttggatccatttccatcggtccttacagccgctcgtcagactccagcagccaagatggtgaagcagatcgagagcaagactgcttttcaggaagccttggacgctgcaggtgataaacttgtagtagttgacttctcagccacgtggtgtgggccttgcaaaatgatcaagcctttctttcattccctctctgaaaagtattccaacgtgatattccttgaagtagatgtggatgactgtcaggatgttgcttcagagtgtgaagtcaaatgcatgccaacattccagttttttaagaagggacaaaaggtgggtgaattttctggagccaataaggaaaagcttgaagccaccattaatgaattagtctaatcatgttttctgaaaacataaccagccattggctatttaaaacttgtaatttttttaatttacaaaaatataaaatatgaagacataaacccagttgccatctgcgtgacaataaaacattaatgctaacactttttaaaaaaaaacaacacgcaaaaaaaaaaanttgggggggggggttgggggctgggaaaagtttttaagacattttgtggtgggcgggggggccccagttgtgtttgtgcacttgtgccaaaggtgtgtccaaagggagaccttgggcactgcattaggggtgggttttcccaattaaaaacgcggggggaacccgggtgctggaagattccggtggtgtcggggtaggggtctcaagggccgggcgtt

SEQ ID NO: 445541 - DNA, 777 bp, Homo sapiens
  misc_feature (661)..(661): n is a, c, g, or t
gctccaggggcggggcgtggccggggcgcagcgacgggcgcggaggtccggccgggcgcgcgcgcccccgccacacgcacgccgggcgtgccagtttataaagggagagagcaagcagcgagtcttgaagctctgtttggtgctttggatccatttccatcggtccttacagccgctcgtcagactccagcagccaagatggtgaagcagatcgagagcaagactgcttttcaggaagccttggacgctgcaggtgataaacttgtagtagttgacttctcagccacgtggtgtgggccttgcaaaatgatcaagcctttctttcattccctctctgaaaagtattccaacgtgatattccttgaagtagatgtggatgactgtcaggatgttgcttcagagtgtgaagtcaaatgcatgccaacattccagttttttaagaagggacaaaaggtgggtgaattttctggagccaataaggaaaagcttgaagccaccattaatgaattagtctaatcatgttttctgaaaacataaccagccattggctatttaaaacttgtaatttttttaatttacaaaaatataaaatatgaagacataaacccagttgccatctgcgtgacaataaaacattaatgctaacactttttaaaaaaancacctcctcacatattcccccccgtcccccccagtctcctccgacacccacacactacatccaccctacacgctccagtcactcctctccctcctccccatatcccacagtccctc

SEQ ID NO: 445542 - DNA, 690 bp, Homo sapiens
gctccaggggcggggcgtggccggggcgcagcgacgggcgcggaggtccggccgggcgcgcgcgcccccgccacacgcacgccgggcgtgccagtttataaagggagagagcaagcagcgagtcttgaagctctgtttggtgctttggatccatttccatcggtccttacagccgctcgtcagactccagcagccaagatggtgaagcagatcgagagcaagactgcttttcaggaagccttggacgctgcaggtgataaacttgtagtagttgacttctcagccacgtggtgtgggccttgcaaaatgatcaagcctttctttcattccctctctgaaaagtattccaacgtgatattccttgaagtagatgtggatgactgtcaggatgttgcttcagagtgtgaagtcaaatgcatgccaacattccagttttttaagaagggacaaaaggtgggtgaattttctggagccaataaggaaaagcttgaagccaccattaatgaattagtctaatcatgttttctgaaaacataaccagccattggctatttaaaacttgtaatttttttaatttacaaaaatataaaatatgaagacataaacccagttgccatctgcgtgacaataaaacattaatgctaacactttttaaaaaaagtcgacgggccgctaatttagtagtagtag

SEQ ID NO: 445543 - DNA, 872 bp, Homo sapiens
gctccaggggcggggcgtggccggggcgcagcgacgggcgcggaggtccggccgggcgcgcgcgcccccgccacacgcacgccgggcgtgccagtttataaagggagagagcaagcagcgagtcttgaagctctgtttggtgctttggatccatttccatcggtccttacagccgctcgtcagactccagcagccaagatggtgaagcagatcgagagcaagactgcttttcaggaagccttggacgctgcaggtgataaacttgtagtagttgacttctcagccacgtggtgtgggccttgcaaaatgatcaagcctttctttcattccctctctgaaaagtattccaacgtgatattccttgaagtagatgtggatgactgtcaggatgttgcttcagagtgtgaagtcaaatgcatgccaacattccagttttttaagaagggacaaaaggtgggtgaattttctggagccaataaggaaaagcttgaagccaccattaatgaattagtctaatcatgttttctgaaaacataaccagccattggctatttaaaacttgtaatttttttaatttacaaaaatataaaatataaaaaaaaaaaaaaaaaaaaaaaaaaaacagttggtggggccggcattgggcaccgtagagaaaaaggtttcaaacgacccattccgggtgggggccgcgcggcgccagtatgggtactgtcgagacctggggcccaacgtggtccaaaagaaaaactgcgccacggacaagggctgggttccccccaattaaaaaaacgcgcgcgggaccgggcggttcggcaaatcccagtgggtccggggccacgggtcctcaaaggggcaagcagcgaaggaag

SEQ ID NO: 445544 - DNA, 597 bp, Homo sapiens
gctccaggggcggggcgtggccggggcgcagcgacgggcgcggaggtccggccgggcgcgcgcgcccccgccacacgcacgccgggcgtgccagtttataaagggagagagcaagcagcgagtcttgaagctctgtttggtgctttggatccatttccatcggtccttacagccgctcgtcagactccagcagccaagatggtgaagcagatcgagagcaagactgcttttcaggaagccttggacgctgcaggtgataaacttgtagtagttgacttctcagccacgtggtgtgggccttgcaaaatgatcaagcctttctttcatgatgttgcttcagagtgtgaagtcaaatgcatgccaacattccagttttttaagaagggacaaaaggtgggtgaattttctggagccaataaggaaaagcttgaagccaccattaatgaattagtctaatcatgttttctgaaaacataaccagccattggctatttaaaacttgtaatttttttaatttacaaaaatataaaatatgaagacataaacccagttgccatctgcgtgacaataaaacattaatgctaacactttttaaaa

SEQ ID NO: 445545 - DNA, 757 bp, Homo sapiens
  misc_feature (634)..(634): n is a, c, g, or t
  misc_feature (661)..(661): n is a, c, g, or t
  misc_feature (672)..(672): n is a, c, g, or t
gctccaggggcggggcgtggccggggcgcagcgacgggcgcggaggtccggccgggcgcgcgcgcccccgccacacgcacgccgggcgtgccagtttataaagggagagagcaagcagcgagtcttgaagctctgtttggtgctttggatccatttccatcggtccttacagccgctcgtcagactccagcagccaagatggtgaagcagatcgagagcaagactgcttttcaggaagccttggacgctgcaggtgataaacttgtagtagttgacttctcagccacgtggtgtgggccttgcaaaatgatcaagcctttctttcattccctctctgaaaagtattccaacgtgatattccttgaagtagatgtggatgactgtcaggatgttgcttcagagtgtgaagtcaaatgcatgccaacattccagttttttaagaagggacaaaagtcattcgctcccacattctgatgagcaaccgcttccctatttatttatttatttggttgtttgttttattcattggtctaatttattcaaagggggcaagaagtagcagtgtctgtaaaagagcctagtttttaatagctatggaatcaattcaatttggactggtgtgctctctttaaancaagtcctttaattaacactgaaaatntataagctcanattatttaaatgggaatatttataaatgagcaaatatcatactgttcaatggttctgaaataaaaactttcacttggaagaaaaa

SEQ ID NO: 445546 - DNA, 603 bp, Homo sapiens
gctccaggggcggggcgtggccggggcgcagcgacgggcgcggaggtccggccgggcgcgcgcgcccccgccacacgcacgccgggcgtgccagtttataaagggagagagcaagcagcgagtcttgaagctctgtttggtgctttggatccatttccatcggtccttacagccgctcgtcagactccagcagccaagatggtgaagcagatcgagagcaagactgcttttcaggaagccttggacgctgcaggtgataaacttgtagtagttgacttctcagccacgtggtgtgggccttgcaaaatgatcaagcctttctttcattccctctctgaaaagtattccaacgtgatattccttgaagtagatgtggatgactgtcaggatgttgcttcagagtgtgaagtcaaatgcatgccaacattccagttttttaagaagggacaaaaggtggcttgatcattttgcaaggcccacaccacgtggctgagaagtcaactactacaagtttatcacctgcagcgtccaggcttcctgaaaagcagtcttgctctcgatctgctcaccatctatggctgctggagtcgactcgcttctgtt

SEQ ID NO: 445547 - DNA, 769 bp, Homo sapiens
  misc_feature (616)..(617): n is a, c, g, or t
gctccaggggcggggcgtggccggggcgcagcgacgggcgcggaggtccggccgggcgcgcgcgcccccgccacacgcacgccgggcgtgccagtttataaagggagagagcaagcagcgagtcttgaagctctgtttggtgctttggatccatttccatcggtccttacagccgctcgtcagactccagcagccaagatggtgaagcagatcgagagcaagactgcttttcaggaagccttggacgctgcagtccctctctgaaaagtattccaacgtgatattccttgaagtagatgtggatgactgtcaggatgttgcttcagagtgtgaagtcaaatgcatgccaacattccagttttttaagaagggacaaaaggtgggtgaattttctggagccaataaggaaaagcttgaagccaccattaatgaattagtctaatcatgttttctgaaaacataaccagccattggctatttaaaacttgtaatttttttaatttacaaaaatataaaatatgaagacataaacccagttgccatctgcgtgacaataaaacattaatgctaacactttttaaaaaaaaaaaaaaaaaaaaaaaaaaaaaagaaaaanntgggccaattcgccctaaaggagggggaattacatttaactggccgcggtttacaaccgggggatgggaaaaccctggggttacccaaataatcggctttgagaaatcccccttttgcagttgggggatacagggcccaccgatggccttcc

SEQ ID NO: 445548 - DNA, 426 bp, Homo sapiens
gctccaggggcggggcgtggccggggcgcagcgacgggcgcggaggtccggccgggcgcgcgcgcccccgccacacgcacgccgggcgtgccagtttataaagggagagagcaagcagcgagtcttgaagctctgtttggtgctttggatccatttccatcggtccttacagccgctcgtcagactccagcagccaagatggtgaagcagatcgagagcaagactgcttttcaggaagccttggacgctgcaggtgataaacttgtagtagttgacttctcagccacgtggtgtgggccttgcaaaatgatcaagcctttctttcataccttttgtcccttcttaaaaaactggaatgttgcatgcatttgacttcacactctgaagcacatcctgacagtcatccacatctacgttcaagatatg

SEQ ID NO: 445549 - DNA, 657 bp, Homo sapiens
gctccaggggcggggcgtggccggggcgcagcgacgggcgcggaggtccggccgggcgcgcgcgcccccgccacacgcacgccgggcgtgccagtttataaagggagagagcaagcagcgagtcttgaagctctgtttggtgctttggatccatttccatcggtccttacagccgctcgtcagactccagcagccaagatggtgaagcagatcgagagcaagactgcttttcaggaagccttggacgctgcaggtgataaacttgtagtagttgacttctcagccacgtggtgtgggccttgcaaaatgatcaagcctttctttcattccctctctgaaaagtattccaacgtgatattccttgaagtagatgtggatgactgtcaggatgttgcttcagagtgtgaagtcaaatgcatgccaacattccagttttttaagaagggacaaaaggtgggtgaattttctggagccaataaggaaaagcttgaagccaccattaatgaattagtctaatcatgttttctgaaaacataaccagccattggctatttaaaacttgtaatttttttaatttacaaaaatataaaatatgaagacataaacccagttgccatctgcgtgacaataaaacattaatgctaacactttttaaaa

SEQ ID NO: 445550 - DNA, 843 bp, Homo sapiens
  misc_feature (690)..(691): n is a, c, g, or t
gctccaggggcggggcgtggccggggcgcagcgacgggcgcggaggtccggccgggcgcgcgcgcccccgccacacgcacgccgggcgtgccagtttataaagggagagagcaagcagcgagtcttgaagctctgtttggtgctttggatccatttccatcggtccttacagccgctcgtcagactccagcagccaagatggtgaagcagatcgagagcaagactgcttttcaggaagccttggacgctgcaggtgataaacttgtagtagttgacttctcagccacgtggtgtgggccttgcaaaatgatcaagcctttctttcattccctctctgaaaagtattccaacgtgatattccttgaagtagatgtggatgactgtcaggatgttgcttcagagtgtgaagtcaaatgcatgccaacattccagttttttaagaagggacaaaaggtgggtgaattttctggagccaataaggaaaagcttgaagccaccattaatgaattagtctaatcatgttttctgaaaacataaccagccattggctatttaaaacttgtaatttttttaatttacaaaaatataaaatatgaagacataaacccagttgccatctgcgtgacaataaaacattaatgctaacactttttaaaaaaaaaaaaaaaaaaaaaaaaaaaaaagaaaaanntgggccaattcgccctaaaggagggggaattacatttaactggccgcggtttacaaccgggggatgggaaaaccctggggttacccaaataatcggctttgagaaatcccccttttgcagttgggggatacagggcccaccgatggccttcc

SEQ ID NO: 445551 - DNA, 897 bp, Homo sapiens
  misc_feature (744)..(745): n is a, c, g, or t
gctccaggggcggggcgtggccggggcgcagcgacgggcgcggaggtccggccgggcgcgcgcgcccccgccacacgcacgccgggcgtgccagtttataaagggagagagcaagcagcgagtcttgaagctctgtttggtgctttggatccatttccatcggtccttacagccgctcgtcagactccagcagccaagatggtgaagcagatcgagagcaagactgcttttcaggaagccttggacgctgcaggtgataaacttgtagtagttgacttctcagccacgtggtgtgggccttgcaaaatgatcaagcctttctttcattccctctctgaaaagtattccaacgtgatattccttgaagtagatgtggatgactgtcaggatgttgcttcagagtgtgaagtcaaatgcatgccaacattccagttttttaagaagggacaaaaggtgggtgaattttctggagccaataaggaaaagcttgaagccaccattaatgaattagtctaatcatgttttctgaaaacataaccagccattggctatttaaaacttgtaatttttttaatttacaaaaatataaaatatgaagacataaacccagttgccatctgcgtgacaataaaacattaatgctaacactttttaaaaaaaaccgtctcatgtctgaatagctttcaaaataaatgtgaaatggtcatttaaaaaaaaaaaaaaaaaaaaaaaaaaaagaaaaanntgggccaattcgccctaaaggagggggaattacatttaactggccgcggtttacaaccgggggatgggaaaaccctggggttacccaaataatcggctttgagaaatcccccttttgcagttgggggatacagggcccaccgatggccttcc

SEQ ID NO: 445552 - DNA, 877 bp, Homo sapiens
gctccaggggcggggcgtggccggggcgcagcgacgggcgcggaggtccggccgggcgcgcgcgcccccgccacacgcacgccgggcgtgccagtttataaagggagagagcaagcagcgagtcttgaagctctgtttggtgctttggatccatttccatcggtccttacagccgctcgtcagactccagcagccaagatggtgaagcagatcgagagcaagactgcttttcaggaagccttggacgctgcaggtgataaacttgtagtagttgacttctcagccacgtggtgtgggccttgcaaaatgatcaagcctttctttcattccctctctgaaaagtattccaacgtgatattccttgaagtagatgtggatgactgtcaggatgttgcttcagagtgtgaagtcaaatgcatgccaacattccagttttttaagaagggacaaaaggtgggtgaattttctggagccaataaggaaaagcttgaagccaccattaatgaattagtctaatcatgttttctgaaaacataaccagccattggctatttaaaacttgtaatttttttaatttacaaaaatataaaatatgaagacataaacccagttgccatctgcgtgacaataaaacattaatgctaacactttttaaaaaaaaccgtctcatgtctgaatagctttcaaaataaatgtgaaatggtcatttaatgtattttcctatattctcaatcactttttagtaaccttgtaggccactgattattttaagattttaaaaattattattgctaccttaatgtattgctacaaaaatctcttgttgggggcaatgcaggtaataaagtagtatgttgttatttgttatcttttgaca

SEQ ID NO: 445553 - DNA, 1099 bp, Homo sapiens
gctccaggggcggggcgtggccggggcgcagcgacgggcgcggaggtccggccgggcgcgcgcgcccccgccacacgcacgccgggcgtgccagtttataaagggagagagcaagcagcgagtcttgaagctctgtttggtgctttggatccatttccatcggtccttacagccgctcgtcagactccagcagccaagatggtgaagcagatcgagagcaagactgcttttcaggaagccttggacgctgcaggtgataaacttgtagtagttgacttctcagccacgtggtgtgggccttgcaaaatgatcaagcctttctttcattccctctctgaaaagtattccaacgtgatattccttgaagtagatgtggatgactgtcaggatgttgcttcagagtgtgaagtcaaatgcatgccaacattccagttttttaagaagggacaaaaggtgggtgaattttctggagccaataaggaaaagcttgaagccaccattaatgaattagtctaatcatgttttctgaaaacataaccagccattggctatttaaaacttgtaatttttttaatttacaaaaatataaaatatgaagacataaacccagttgccatctgcgtgacaataaaacattaatgctaacactttttaaaattccagttttttaagaagggacaaaaaggtgggtgaattttctggagccaataaggaaaagcttgaagccaccattaatgaattagtctaatcatgttttctgaaacataaccagaccatggtattgaaaaactgttaatttttttcgaatttaccaacaattaagtttggagacataaccccgttgccatccgcgtgaccattaaaacattatgctacaccttgtaacaaagagaggaccagacgagcgaaacaaacacacaagccaaacaacaacaaaagacacaatacaaacagggcgggccctacaacactggggcacaagcaccccactctgggaggcctaggatataaagccgccacaacaaaccagtgtgacccttggtttacaccaacgcaaaatggccgtccgttatatgaacagttcgtccggcacaggaca

SEQ ID NO: 445554 - DNA, 583 bp, Homo sapiens
gctccaggggcggggcgtggccggggcgcagcgacgggcgcggaggtccggccgggcgcgcgcgcccccgccacacgcacgccgggcgtgccagtttataaagggagagagcaagcagcgagtcttgaagctctgtttggtgctttggatccatttccatcggtccttacagccgctcgtcagactccagcagccaagatggtgaagcagatcgagagcaagactgcttttcaggaagccttggacgctgcagtccctctctgaaaagtattccaacgtgatattccttgaagtagatgtggatgactgtcaggatgttgcttcagagtgtgaagtcaaatgcatgccaacattccagttttttaagaagggacaaaaggtgggtgaattttctggagccaataaggaaaagcttgaagccaccattaatgaattagtctaatcatgttttctgaaaacataaccagccattggctatttaaaacttgtaatttttttaatttacaaaaatataaaatatgaagacataaacccagttgccatctgcgtgacaataaaacattaatgctaacactttttaaaa

SEQ ID NO: 445555 - DNA, 492 bp, Homo sapiens
gctccaggggcggggcgtggccggggcgcagcgacgggcgcggaggtccggccgggcgcgcgcgcccccgccacacgcacgccgggcgtgccagtttataaagggagagagcaagcagcgagtcttgaagctctgtttggtgctttggatccatttccatcggtccttacagccgctcgtcagactccagcagccaagatggtgaagcagatcgagagcaaggatgttgcttcagagtgtgaagtcaaatgcatgccaacattccagttttttaagaagggacaaaaggtgggtgaattttctggagccaataaggaaaagcttgaagccaccattaatgaattagtctaatcatgttttctgaaaacataaccagccattggctatttaaaacttgtaatttttttaatttacaaaaatataaaatatgaagacataaacccagttgccatctgcgtgacaataaaacattaatgctaacactttttaaaa

SEQ ID NO: 445556 - DNA, 564 bp, Homo sapiens
gctccaggggcggggcgtggccggggcgcagcgacgggcgcggaggtccggccgggcgcgcgcgcccccgccacacgcacgccgggcgtgccagtttataaagggagagagcaagcagcgagtcttgaagctctgtttggtgctttggatccatttccatcggtccttacagccgctcgtcagactccagcagccaagatggtgaagcagatcgagagcaagactgcttttcaggaagccttggacgctgcaggtgataaacttgtagtagttgacttctcagccacgtggtgtgggccttgcaaaatgatcaagcctttctttcattccctctctgaaaagtattccaacgtgatattccttgaagtagatgtggatgactgtcagaggtatgtagctggaaatatgagatactgctgagcttttcacattggcctttttctctgaattgcacagtgcttttttccataaatatgtcaaataattctagaactgtaatcctatctaaaaagttctatctcagaagagcaggcaagttaggagcttaatcctagctatcgggag

SEQ ID NO: 445557 - DNA, 496 bp, Homo sapiens
gctccaggggcggggcgtggccggggcgcagcgacgggcgcggaggtccggccgggcgcgcgcgcccccgccacacgcacgccgggcgtgccagtttataaagggagagagcaagcagcgagtcttgaagctctgtttggtgctttggatccatttccatcggtccttacagccgctcgtcagactccagcagccaagatggtgaagcagatcgagagcaagactgcttttcaggaagccttggacgctgcaggtgataaacttgtagtagttgacttctcagccacgtggtgtgggccttgcaaaatgatcaagcctttctttcatcgcacgtccagcatcaagtttgcatgacaaggtatgtgtcaacttgatgaaggatttgcacatgtagagcatggtaggactagtgcagagctctaggcgtgaatgaatacgcctgatgagacatatccagcatgtctgtaggattagaaggtacaggagatgtgatcga

SEQ ID NO: 445558 - DNA, 427 bp, Homo sapiens
cacacctctgcagagagaatggccagcaggaaggcggggacccggggcaaggtggcagccaccaagcaggcccaacgtggttcttccaacgtcttttccatgtttgaacaagcccagatacaggagttcaaagaagccttcagctgtatcgaccagaatcgtgatggcatcatctgcaaggcagacctgagggagacctactcccagctggggaaggtgagtgtcccagaggaggagctggacgccatgctgcaagagggcaagggcccatcaacttcaccgtcttcctcacgctctttggggagaagctcaatgacaaccccaggagcatctagtccttccgatgtttacccagcgcaagggttgtaacagatagttagcagtttctaccagagaaagttctcccctagggggcgatttgccctaa

SEQ ID NO: 445559 - DNA, 708 bp, Homo sapiens
acagcagccacacctctgcagagagaatggccagcaggaaggcggggacccggggcaaggtggcagccaccaagcaggcccaacgtggttcttccaacgtcttttccatgtttgaacaagcccagatacaggagttcaaagaagccttcagctgtatcgaccagaatcgtgatggcatcatctgcaaggcagacctgagggagacctactcccagctggggaaggtgagtgtcccagaggaggagctggacgccatgctgcaagagggcaagggcccatcaacttcaccgtcttcctcacgctctttggggagaagctcaatgggacagaccccgaggaagccatcctgagtgccttccgcatgtttgaccccagcggcaaaggggtggtgaacaaggatgagttcaagcagcttctcctgacccaggcagacaagttctctccagctgaggtgaggctgcccagccccttcaatactcatccccagcaccttctctgggccttcacccatgacccagagcccagtaccagtgaggcagttgctggaagggtggagcagatgttcgccctgacacccatggacctggcggggaacatcgactacaagtcactgtgctacatcatcacccatggagacgagaaagaggaatgaggggcagggccaggcccacgggggggcacctcaataaactctgttgcaaaattgga

SEQ ID NO: 445560 - DNA, 704 bp, Homo sapiens
acagcagccacacctctgcagagagaatggccagcaggaaggcggggacccggggcaaggtggcagccaccaagcaggcccaacgtggttcttccaacgtcttttccatgtttgaacaagcccagatacaggagttcaaagaagccttcagctgtatcgaccagaatcgtgatggcatcatctgcaaggcagacctgagggagacctactcccagctggggaaggtgagtgtcccagaggaggagctggacgccatgctgcaagagggcaagggcccatcaacttcaccgtcttcctcacgctctttggggagaagctcaatgggacagaccccgaggaagccatcctgagtgccttccgcatgtttgaccccagcggcaaaggggtggtgaacaaggatgaccaacccttccctgcgccatgggagcctccgtacccaccttccctgtgcagtcactcccccgcagtcttctgctcagaccctcctcaccccccaggttcaagcagcttctcctgacccaggcagacaagttctctccagctgaggtggagcagatgttcgccctgacacccatggacctggcggggaacatcgactacaagtcactgtgctacatcatcacccatggagacgagaaagaggaatgaggggcagggccaggcccacgggggggcacctcaataaactctgttgcaaaattgga

SEQ ID NO: 445561 - DNA, 435 bp, Homo sapiens
acagcagccacacctctgcagagagaatggccagcaggaaggcggggacccggggcaaggtggcagccaccaagcaggcccaacgtggttcttccaacgtcttttccatgtttgaacaagcccagatacaggagttcaaagaagccttcagctgtatcgaccagaatcgtgatggcatcatctgcaaggcagacctgagggagacctactcccagctggggaaggtgagtgtcccagaggaggagctggacgccatgctgcaagagggcaagggcccatcaacttcaccgtcttcctcacgctctttggggagaagctcaatgacaaccccaggagcatctagtccttccgatgtttacccagcgcaagggttgtaacagatagttagcagtttctaccagagaaagttctcccctagggggcgatttgccctaa

SEQ ID NO: 445562 - DNA, 887 bp, Homo sapiens
cacacctctgcagagagaatggccagcaggaaggcggggacccggggcaaggtggcagccaccaagcaggcccaacgtggttcttccaacgtcttttccatgtttgaacaagcccagatacaggagttcaaagaagccttcagctgtatcgaccagaatcgtgatggcatcatctgcaaggcagacctgagggagacctactcccagctggggtgcgtgcacccacctcccaccctgcgcactggggtccctactctgagctgctgggcgggtgggagtggcttgggggacaggactctgctcccctgcttcccctcctccccgtctcctcacactgcccttccccccttgtcacgccttgcttccacttcaccttcccgacccacagctgcctctgcccctccagcccctgtggccaggatggagggagggcggcctgggccttctgggggacacccagggtccctgtgtgcacctcatgccccacccccagctggggaaggtgagtgtcccagaggaggagctggacgccatgctgcaagagggcaagggcccatcaacttcaccgtcttcctcacgctctttggggagaagctcaatgggacagaccccgaggaagccatcctgagtgccttccgcatgtttgaccccagcggcaaaggggtggtgaacaaggatgagttcaagcagcttctcctgacccaggcagacaagttctctccagctgaggtggagcagatgttcgccctgacacccatggacctggcggggaacatcgactacaagtcactgtgctacatcatcacccatggagacgagaaagaggaatgaggggcagggccaggcccacgggggggcacctcaataaactctgttgcaaaattgga

SEQ ID NO: 445563 - DNA, 641 bp, Homo sapiens
cacacctctgcagagagaatggccagcaggaaggcggggacccggggcaaggtggcagccaccaagcaggcccaacgtggttcttccaacgtcttttccatgtttgaacaagcccagatacaggagttcaaagaaagctgggggctgctcccacctgaaggcccccatcccacaggccttcagctgtatcgaccagaatcgtgatggcatcatctgcaaggcagacctgagggagacctactcccagctggggaaggtgagtgtcccagaggaggagctggacgccatgctgcaagagggcaagggcccatcaacttcaccgtcttcctcacgctctttggggagaagctcaatgggacagaccccgaggaagccatcctgagtgccttccgcatgtttgaccccagcggcaaaggggtggtgaacaaggatgagttcaagcagcttctcctgacccaggcagacaagttctctccagctgaggtggagcagatgttcgccctgacacccatggacctggcggggaacatcgactacaagtcactgtgctacatcatcacccatggagacgagaaagaggaatgaggggcagggccaggcccacgggggggcacctcaataaactctgttgcaaaattgga

SEQ ID NO: 445564 - DNA, 499 bp, Homo sapiens
acagcagccacacctctgcagagagaatggccagcaggaaggcggggacccggggcaaggtggcagccaccaagcaggcccaacgtggttcttccaacgtcttttccatgtttgaacaagcccagatacaggagttcaaagaagccttcagctgtatcgaccagaatcgtgatggcatcatctgcaaggcagacctgagggagacctactcccagctggggaaggtgagtgtcccagaggaggagctggacgccatgctgcaagagggcaagaaccccatctttactaaaaatacaaaaattagccaggcatggtggctcgtgactgtagtcccagctactttggaggccgaggcaaaagaatcacttgaacccaggaggcggaggttgcagtgagccgagatcgcgcattacactccagcctgagtgacagagcgagactccatctccaaatacacacacagacacacacacacacacacacacacacacagcacgtt

SEQ ID NO: 445565 - DNA, 300 bp, Homo sapiens
cacacctctgcagagagaatggccagcaggaaggcggggacccggggcaaggtggcagccaccaagcaggcccaacgtggttcttccaacgtcttttccatgtttgaacaagcccagatacaggagttcaaagaagccttcagctgtatcgaccagaatcgtgatggcatcatctgcaaggcagacctgagggagacctactcccagctggaaggtagtttcccagggggggttgacgcaatttcaaagggaaggcccataattacgtttctagttttgggaagttatggaaacccagag

SEQ ID NO: 445566 - DNA, 373 bp, Homo sapiens
cacacctctgcagagagaatggccagcaggaaggcggggacccggggcaaggtggcagccaccaagcaggcccaacgtggttcttccaacgtcttttccatgtttgaacaagcccagatacaggagttcaaagaaggaaggtgagtgtcccagaggaggagctggacgccatgctgcaagagggcaagggcccatcaacttcaccgtcttcctcacgctctttggggagaagctcaatgtggacaacccccggaggcatcctagtcctcccccatttttccccccgcaaagggtgtaacaagattagttaagagctctctacccgagaaagttttccctaggtgagagatttgcctaaccatgacctgcggga

SEQ ID NO: 445567 - DNA, 300 bp, Homo sapiens
cacacctctgcagagagaatggccagcaggaaggcggggacccggggcaaggtggcagccaccaagcaggcccaacgtggttcttccaacgtcttttccatgtttgaacaagcccagatacaggagttcaaagaacttttctcaacttccaccttcctagagcttggggttgcttcacttaaggccccattcaaaggctttagtttattgaccagattgtatggatatttgaaggaagccttagggaactattcagttgggaagtgagttccagagagattgagaatttaaaaggaagcc

SEQ ID NO: 445568 - DNA, 289 bp, Homo sapiens
gactgtgcacagacctggggggaagtggatagggagaggtttcgtacactcggggtgggcctgtgcctgtggctggaggggcgtcctttgcctcttggcccacatttgcactgactcctcactctgcccagagtcagccaagagaaaaacattaacccagagtctggggtctagggttgaaaagctaaggcaaaaagcacagatgcagggggcagacagaaaggccacaggactcaggtgaggtctctgccgggctgggccaggagccaggggactgccactcaccagt

SEQ ID NO: 445569 - DNA, 609 bp, Homo sapiens
acagcagccacacctctgcagagagaatggccagcaggaaggcggggacccggggcaaggtggcagccaccaagcaggcccaacgtggttcttccaacgtcttttccatgtttgaacaagcccagatacaggagttcaaagaagccttcagctgtatcgaccagaatcgtgatggcatcatctgcaaggcagacctgagggagacctactcccagctggggaaggtgagtgtcccagaggaggagctggacgccatgctgcaagagggcaagggcccatcaacttcaccgtcttcctcacgctctttggggagaagctcaatgggacagaccccgaggaagccatcctgagtgccttccgcatgtttgaccccagcggcaaaggggtggtgaacaaggatgagttcaagcagcttctcctgacccaggcagacaagttctctccagctgaggtggagcagatgttcgccctgacacccatggacctggcggggaacatcgactacaagtcactgtgctacatcatcacccatggagacgagaaagaggaatgaggggcagggccaggcccacgggggggcacctcaataaactctgttgcaaaattgga

SEQ ID NO: 445570 - DNA, 1043 bp, Homo sapiens
acagcagccacacctctgcagagagaatggccagcaggaaggcggggacccggggcaaggtggcagccaccaagcaggcccaacgtggttcttccaacgtcttttccatgtttgaacaagcccagatacaggagttcaaagaagccttcagctgtatcgaccagaatcgtgatggcatcatctgcaaggcagacctgagggagacctactcccagctggggaaggtgagtgtcccagaggaggagctggacgccatgctgcaagagggcaagggcccatcaacttcaccgtcttcctcacgctctttggggagaagctcaatgggacagaccccgaggaagccatcctgagtgccttccgcatgtttgaccccagcggcaaaggggtggtgaacaaggatgagttcaagcagcttctcctgacccaggcagacaagttctctccagctgaggtggagcagatgttcgccctgacacccatggacctggcggggaacatcgactacaagtcactgtgctacatcatcacccatggagacgagaaagaggaatgaggggcagggccaggcccacgggggggcacctcaataaactctgttgcaaaattggaaaaaaaaaaaaaaaaaaccaagaaaaagctaacagcgccaacgagaacaacaacaccgacaccctagtcaaagtcactacagccgcgaaagccacaacagaagaaacacaacaaacacgaacgaaacggcaggcgtgtgggcggcggctcgcgcgccaatgacacaaggaatttagaaccccacagcagatggagggggggaggcgcaacaccagcgatggagatatcccacactgatgcgacagagctgggatcgcagcgaagcaacgtcggagcagtcacgaaagggagggcggggcgtcagccacaccaaaaagaaaagaacgcccgggggggaacgaaacaagcgtggctagtacacaccaagggcgagcggggcgggggactaccggcgtctcataaaccagagagcgcacgcgacggaataatatacc

SEQ ID NO: 445571 - DNA, 601 bp, Homo sapiens
cacacctctgcagagagaatggccagcaggaaggcggggacccggggcaaggtggcagccaccaagcaggcccaacgtggttcttccaacgtcttttccatgtttgaacaagcccagatacaggagttcaaagaagccttcagctgtatcgaccagaatcgtgatggcatcatctgcaaggcagacctgagggagacctactcccagctggggaaggtgagtgtcccagaggaggagctggacgccatgctgcaagagggcaagggcccatcaacttcaccgtcttcctcacgctctttggggagaagctcaatgggacagaccccgaggaagccatcctgagtgccttccgcatgtttgaccccagcggcaaaggggtggtgaacaaggatgagttcaagcagcttctcctgacccaggcagacaagttctctccagctgaggtggagcagatgttcgccctgacacccatggacctggcggggaacatcgactacaagtcactgtgctacatcatcacccatggagacgagaaagaggaatgaggggcagggccaggcccacgggggggcacctcaataaactctgttgcaaaattgga

SEQ ID NO: 445572 - DNA, 670 bp, Homo sapiens
cacacctctgcagagagaatggccagcaggaaggcggggacccggggcaaggtggcagccaccaagcaggcccaacgtggttcttccaacgtcttttccatgtttgaacaagcccagatacaggagttcaaagaagtctctcccccacctcccaccttccctagagctgggggctgctcccacctgaaggcccccatcccacaggccttcagctgtatcgaccagaatcgtgatggcatcatctgcaaggcagacctgagggagacctactcccagctggggaaggtgagtgtcccagaggaggagctggacgccatgctgcaagagggcaagggcccatcaacttcaccgtcttcctcacgctctttggggagaagctcaatgggacagaccccgaggaagccatcctgagtgccttccgcatgtttgaccccagcggcaaaggggtggtgaacaaggatgagttcaagcagcttctcctgacccaggcagacaagttctctccagctgaggtggagcagatgttcgccctgacacccatggacctggcggggaacatcgactacaagtcactgtgctacatcatcacccatggagacgagaaagaggaatgaggggcagggccaggcccacgggggggcacctcaataaactctgttgcaaaattgga

SEQ ID NO: 445573 - DNA, 558 bp, Homo sapiens
acagcagccacacctctgcagagagaatggccagcaggaaggcggggacccggggcaaggtggcagccaccaagcaggcccaacgtggttcttccaacgtcttttccatgtttgaacaagcccagatacaggagttcaaagaagccttcagctgtatcgaccagaatcgtgatggcatcatctgcaaggcagacctgagggagacctactcccagctggggaaggtgagtgtcccagaggaggagctggacgccatgctgcaagagggcaagggacagaccccgaggaagccatcctgagtgccttccgcatgtttgaccccagcggcaaaggggtggtgaacaaggatgagttcaagcagcttctcctgacccaggcagacaagttctctccagctgaggtggagcagatgttcgccctgacacccatggacctggcggggaacatcgactacaagtcactgtgctacatcatcacccatggagacgagaaagaggaatgaggggcagggccaggcccacgggggggcacctcaataaactctgttgcaaaattgga

SEQ ID NO: 445574 - DNA, 468 bp, Homo sapiens
cacacctctgcagagagaatggccagcaggaaggcggggacccggggcaaggtggcagccaccaagcaggcccaacgtggttcttccaacgtcttttccatgtttgaacaagcccagatacaggagttcaaagaagccttcagctgtatcgaccagaatcgtgatggcatcatctgcaaggcagacctgagggagacctactcccagctgggtgaggctgcccagccccttcaatactcatccccagcaccttctctgggccttcacccatgacccagagcccagtaccagtgaggcagttgctggaagggtggagcagatgttcgccctgacacccatggacctggcggggaacatcgactacaagtcactgtgctacatcatcacccatggagacgagaaagaggaatgaggggcagggccaggcccacgggggggcacctcaataaactctgttgcaaaattgga

SEQ ID NO: 445575 - DNA, 621 bp, Homo sapiens
cacacctctgcagagagaatggccagcaggaaggcggggacccggggcaaggtggcagccaccaagcaggcccaacgtggttcttccaacgtcttttccatgtttgaacaagcccagatacaggagttcaaagaagtctctcccccacctcccaccttccctagagctgggggctgctcccacctgaaggcccccatcccacaggccttcagctgtatcgaccagaatcgtgatggcatcatctgcaaggcagacctgagggagacctactcccagctggggaaggtgagtgtcccagaggaggagctggacgccatgctgcaagagggcaagggcccatcaacttcaccgtcttcctcacgctctttggggagaagctcaatgggacagaccccgaggaagccatcctgagtgccttccgcatgtttgaccccagcggcaaaggggtggtgaacaaggatgagtggagcagatgttcgccctgacacccatggacctggcggggaacatcgactacaagtcactgtgctacatcatcacccatggagacgagaaagaggaatgaggggcagggccaggcccacgggggggcacctcaataaactctgttgcaaaattgga

SEQ ID NO: 445576 - DNA, 1297 bp, Homo sapiens
cgggttcacaccattctcctgcctcaggctcctgagtagctgggactacaggcgcccgccaccacgcccagctaattttttgtatttttagtagagacggggtttcactgtgttagccaggatggtcttgatctgctaacctcgtgatccacccgccccggcctcccaaagtgctaggattacaggtgtgagccaccgcgcccggcctgattctttaagctgtttttctttgttgctggtgttttctttttggactcctcttccttgctccatatccctacagtatttcccaccattctaggtttgtccctttctcttcttctgggacactctcatcaacagtcagtcctcagccccctcctctgcaaatgacactcagaactctctctggctcagatctcagatttgggattaacaaacttccacttagacattctgcctgactgacctcaggcatttcgcactctgaatgtcaaacccaactcattgtcatctctgaagctgctcacttaattctcctctgtattctctttaacaacccagttgcccaacccagaaactgggagtcacgcagacctcctttctctcttactcccacacaatgagccatgaagtccagtctttctatcttaacatcactgtcaaacccacactgtattccatgcccagcgctgccacgtgaatgtactctgctcacttccttcctggattacccatagccccacctcatcctcctacccttgctttcctccctgaagtcagagagatcctactcaagagataactgctcctgacagcccttattacagaactgaagtactctccttagcttcagctctgtgcccacgtgccttggctttggatacaaggtactacagcactttgtccactctccaggcttacctgtgtcattccacatgcacatcttagaaaatgccagccttagagaattctccctagccccaaaatgtctttgcccagtgcaattccttcttcctgtattacccctttccctccttcacactatctgcctggctaattcttatttatccttagttcaagtatggccttttctgggaaggtgaccctccttggccaccccttgcatatactttgatgccctagggcacaccccctttatttccctcatagaaacagccttctgtaaattgttccatgacaacctgtatttcaatttgtaagaaatttgcatgtactgtgagctccccaacgtcaggagactgacccttttgatatcattgctaagcctcattaaatgaatgaatgaaaatgaatg

SEQ ID NO: 445577 - DNA, 600 bp, Homo sapiens
gtcagctgacgtcacccttcaccttcctattcttcctgccttgaatgtggatgtgactttttgttatgtaagaaaaataaatgaatgtatttaagccattgttaggtagggtttctgtacctcatagctgaacgcatttctaactgatagtggtgagcaatgaacaagtgaattttacagtaatggagcagagggtcaagttgaccctacaatctttagcttgactaattgaatgactggaagcccaattggtagataaatataaagagtgtcagaaggaggagaggtcagagcacatagataagttttatttgggtgactctaagacctcagtcatgcctgacataatgggattctgtgacgcatgtgtgtggacctttgcaatggagctgctcagaacatcgttggaacccccctttggaaattctcagcaaagcctgattcaccttctctgtaatttcctcactgtcgatgatttttcagtactttcatggggggttgatttttggaaatatctgagactaagtaaggtgcattatgagattaggataaataaaatatttgggtgagtgatttaataaataaacataatcctgataa

SEQ ID NO: 445578 - DNA, 634 bp, Homo sapiens
  misc_feature (54)..(54): n is a, c, g, or t
tgcattagaggatccccacctctaccccacggggactggtcattcaagattatnatgctgataagatgtttccagcttttggttttggcgctcagatacctcctcagtggcaggtatcacatgaatttccaatgaacttcaacccatccaatccctactgcaatggaatccaaggcattgtagaggcgtatcggtcttgtcttcctcagataaaactctatggaccaactaatttttctccaatcataaatcacgtggccaggtttgctgctgcagccacgcaacagcagacagcttctcaatattttgtgcttttgattattactgatggtgtgatcacagaccttgatgaaaccagacaagctatagttaatgcctccaggctgcctatgtccatcataattgttggagttggaggtgctgacttcagcgccatggagtttctggatggtgatggtggaagtctccgctccccattgggcgaagtggccatcagagatattgtccagtttgtgcctttcagacagttccagaatgctccaaaagaagcacttgctcagtgtgcttgtccagttgtgagctgtcctcggtgttaccgaggctgtgcctagagagtggagatttctgatgaaag

SEQ ID NO: 445579 - DNA, 430 bp, Homo sapiens
tggaaaaaacagtattttattaaatatttttttctttttagtgataagatgtttccagcttttggttttggcgctcagatacctcctcagtggcaggtatcacatgaatttccaatgaacttcaacccatccaatccctactgcaatggtaagttaaaaaataaacatgaagacttcaaatggaaaggctcactagtctttgttattttgttctttgttctttgttttttttcttgtgattaaaactactcaaatttcatctctaggtttcattttcttacatatttaactttctgttgtataaggtagaagaattgcaccaggttggtggttagggtggtaatggtaattacggggcaaatcagtattatgatgatgaaggtggtaagctaaatcctcctaccttaagaactttaataggacaaaaaca

SEQ ID NO: 445580 - DNA, 4851 bp, Homo sapiens
gagccctaggttctcctgaatccctgcggtcccagcgtcgctccggacgctgccaacctgttctccaccgtcgctcgacttccacctctaagactcccacgaaactcaggttgaataattcatcaaattacacaactgaactcaagacatggctgcccagtgtgtcacaaaggtggcgctgaatgtttcctgtgccaatcttttggataaagatatagggtcaaagtcagaccctttatgtgtgttgtttttgaatacaagtggtcaacagtggtatgaggttgagcgcacagaaaggattaagaattgcttgaatccccaattttccaagacatttattattgattactactttgaagtggttcagaaattgaaatttggggtttatgacatcgacaacaaaactattgagctgagtgatgatgacttcttaggggaatgtgaatgtacccttggacaaattgtttccagcaagaagctaactcgaccactggtgatgaaaactggcagacctgcaggaaaagggagcattacgatttcagctgaagaaataaaagataatagagtggtcttgtttgaaatggaagccagaaaactggataataaggatctatttggaaagtcagacccatacctggaattccacaagcagacatctgatggaaactggctaatggttcatcggacagaggttgttaaaaacaacttgaatcctgtttggaggcctttcaagatctctcttaactcactgtgttacggagatatggacaaaaccattaaggtggagtgttatgattatgacaatgatgggtcacatgatctcattggaacatttcagaccaccatgacaaaactgaaagaagcctccagaagctcacctgttgaatttgaatgcataaatgagaaaaaaaggcaaaagaaaaaaagctacaagaattcaggtgttatcagtgtgaaacagtgtgagattacagtagaatgcacattccttgactatataatgggaggatgtcagctgaattttactgtgggagtggacttcactggctccaatggtgacccaaggtctccagactcccttcattacatcagccccaatggcgttaatgagtatttgactgctctctggtctgtgggactggtcattcaagattatgatgctgataagatgtttccagcttttggttttggcgctcagatacctcctcagtggcaggtatcacatgaatttccaatgaacttcaacccatccaatccctactgcaatggaatccaaggcattgtagaggcgtatcggtcttgtcttcctcagataaaactctatggaccaactaatttttctccaatcataaatcacgtggccaggtttgctgctgcagccacgcaacagcagacagcttctcaatattttgtgcttttgattattactgatggtgtgatcacagaccttgatgaaaccagacaagctatagttaatgcctccaggctgcctatgtccatcataattgttggagttggaggtgctgacttcagcgccatggagtttctggatggtgatggtggaagtctccgctccccattgggcgaagtggccatcagagatattgtccagtttgtgcctttcagacagttccagaatgctccaaaagaagcacttgctcagtgtgtcttggcagagattccccagcaggtggtgggctacttcaatacatacaaactccttcctcccaagaacccagccacgaaacaacagaagcagtgaccacttcaacagaattcttttgtgttatgtggagcaatgccatctctcaccccaaatcgtgtatctgtcattctacgtactttttacccccagcatttatgatgtaaatctctttctctatggattatatctgtttaaagcattctttctaggttattttggggggacagtgccaagtccatctttgcccagtcaattcagtgattgatagcaatttacattaattgcagtaaagctctttggattagaaattagtgtggggaaagcttattctgttgttgtttttgtttactttcatatgatgaaaatgctgtgtttaagtgtttgtcaataggaagaatggaaaactgttgggatgatgtggtttgcaggttgctgtgcctgattcacagtgtatgttgtataagccaatgtccatacctgattatgagagcttcttaaattatatgatatcaaatttgttcctgtaactctgtatacagtgcttttctgcaaggtaaaaataacctgtctatgcatctgatttttgctacagtttagacactgtggtttacaaaacagcatgcactcaacttgggactttatgaaaagtactgaatgagcaggaaaaggcacatactcagttttttaaatgtacaatcaacaagtaaaaataacctcatgtaagtaagccatttttatttgcctttctagatattttattttattgtggaaaactgtaaacatggtcagatttggctttttttttcattaactgagcaagactttcaggatattgtagatgcacagatggtaggttgtcctgaattctacattattagattactttaattgagatttgttaaaacggttaggactgttttgtccaggaaagataagaggaccaaacatataaggtgaaattcagaattccgtttccttctaactaatgaaaaactgcttactaaaaaaaaattttatactttccttgctaaggtcccatatattgatttgtacagatccacttagtcattttctcctttttttaagaaccattttcatctgatttttaaactcacgataccagttatctgttaatcaaaattgcattttacaatttaataatgtgatatttcctatgtctacagcataccttattaggtataaaacctactgcaacttagaaaaaggaaagaaaaaagaaaacttttccaactgctgcattaagatagggtggattttatgtgctttttttttttaagagttgaatttcttttcctgacttttaccttttacagcgtattacttagtgaacattacattttcagaatagatcctaatattttattgagggcctatgtgctaaaaactatgcatatctatatattggccaattatctttaataatttaccttttgaaattgcatgtttatcatatatccttaagtggacacatacagtgccatgttgatgtgcctctcagttttattgaaaagctgccccacagcccatgtctcttgttctctgcaatgcctcaagggagtgagctctcaaccacagatagctgtggcttctcagaagcagctcattgccaaggccaggctgagaggggacctgcttgctgtggtggttgcctagcccagatgagcatttacctaccaccttcccacttggctagctgtcctttggatatgtgctgttaactggggaaggcatctaactagtagcctgctactccatagtatggctcaatagatgacacatcattttgacattatcaataggagaaaagaaaactaacccttcttctgattgtttggagccatagttgtctcagatgttctaattctctttgtatgcttggaaacagcatagatatgttgctgtggttttcagaattttctcttttaatcacaagaagccttttaaaaaatgacttacacatattctcaatgtacagtaaaacagacagaagtgagcttatctgtttgatgctgtggcagggtcccagtcactgggcatatcctccttctccttaaccagctcctcagcagcccctgagtcacctgcacaaggtgcttgggaactgctggttatgagcattcctggttttcttcagccaaataacaggtaatcactgtcaattggatttggtcttcattattttatattctgattttatcagaattattctattttaaaattgttttaaaatttaaaaacatttaattcatgatcatgttcatcagtagatgctattattcataagaactgtgattccagcaaactagggtaattggtgcctttttacagttttgaataaaagcatttacaatttctaaattatcagttttcacagtttcagcactcaacctcatcatacgctgatttaatattgttttacattaaaatagtccttttccctgttgtgccaccattcatttaagtgctgtttgttcttaaaatgcatttaaagaaaaattacccatattgactttcacacctcatataatcagatctattacaaatatatatcggagtgacggtgcccaggatagatgtaatatttcttacagatgctggcacagaggaaataatataccagctaatctagtcacctaaccttgtggttagaattgcaattttaagaccagaaaaatttgaagtctgatcagagatttacaactgttcattatagtggtgccttaggcaatctttccaaagtaaattcagggccccattgctacttatgccatatttggacatactttttttttcttcaattttgtaaacttcctggaaagctgtcttcactaagtatcccctagtctctatatatgtggttagtagtcatggaaatgacacataaagtacgccagaagtttgatggaacgtgttagaaactgttttgtgcttttatggatgtcatacttgacaatacatgtgtaagttactaatatatgaattgatgctaaatatatcttacatttgaattccttttggataaagttatttcttgatgtgacacagtagtgtgttttcatttttattctttacatgtgaccaaaacaatagaaaagttaaaaataaaatatagtgttttaggtggc

SEQ ID NO: 445581 - DNA, 4382 bp, Homo sapiens
  misc_feature (19)..(19): n is a, c, g, or t
ttctctacgattctcgagnatcccgacacttgaaaccgtaagactgcaggaaaagggagcattacgatttcagctgaagaaataaaagataatagagtggtcttgtttgaaatggaagccagaaaactggataataaggatctatttggaaagtcagacccatacctggaattccacaagcagacatctgatggaaactggctaatggttcatcggacagaggttgttaaaaacaacttgaatcctgtttggaggcctttcaagatctctcttaactcactgtgttacggagatatggacaaaaccattaaggtggagtgttatgattatgacaatgatgggtcacatgatctcattggaacatttcagaccaccatgacaaaactgaaagaagcctccagaagctcacctgttgaatttgaatgcataaatgagaaaaaaaggcaaaagaaaaaaagctacaagaattcaggtgttatcagtgtgaaacagtgtgagattacagtagaatgcacattccttgactatataatgggaggatgtcagctgaattttactgtgggagtggacttcactggctccaatggtgacccaaggtctccagactcccttcattacatcagccccaatggcgttaatgagtatttgactgctctctggtctgtgggactggtcattcaagattatgatgctgataagatgtttccagcttttggttttggcgctcagatacctcctcagtggcaggtatcacatgaatttccaatgaacttcaacccatccaatccctactgcaatggaatccaaggcattgtagaggcgtatcggtcttgtcttcctcagataaaactctatggaccaactaatttttctccaatcataaatcacgtggccaggtttgctgctgcagccacgcaacagcagacagcttctcaatattttgtgcttttgattattactgatggtgtgatcacagaccttgatgaaaccagacaagctatagttaatgcctccaggctgcctatgtccatcataattgttggagttggaggtgctgacttcagcgccatggagtttctggatggtgatggtggaagtctccgctccccattgggcgaagtggccatcagagatattgtccagtttgtgcctttcagacagttccagaatgctccaaaagaagcacttgctcagtgtgtcttggcagagattccccagcaggtggtgggctacttcaatacatacaaactccttcctcccaagaacccagccacgaaacaacagaagcagtgaccacttcaacagaattcttttgtgttatgtggagcaatgccatctctcaccccaaatcgtgtatctgtcattctacgtactttttacccccagcatttatgatgtaaatctctttctctatggattatatctgtttaaagcattctttctaggttattttggggggacagtgccaagtccatctttgcccagtcaattcagtgattgatagcaatttacattaattgcagtaaagctctttggattagaaattagtgtggggaaagcttattctgttgttgtttttgtttactttcatatgatgaaaatgctgtgtttaagtgtttgtcaataggaagaatggaaaactgttgggatgatgtggtttgcaggttgctgtgcctgattcacagtgtatgttgtataagccaatgtccatacctgattatgagagcttcttaaattatatgatatcaaatttgttcctgtaactctgtatacagtgcttttctgcaaggtaaaaataacctgtctatgcatctgatttttgctacagtttagacactgtggtttacaaaacagcatgcactcaacttgggactttatgaaaagtactgaatgagcaggaaaaggcacatactcagttttttaaatgtacaatcaacaagtaaaaataacctcatgtaagtaagccatttttatttgcctttctagatattttattttattgtggaaaactgtaaacatggtcagatttggctttttttttcattaactgagcaagactttcaggatattgtagatgcacagatggtaggttgtcctgaattctacattattagattactttaattgagatttgttaaaacggttaggactgttttgtccaggaaagataagaggaccaaacatataaggtgaaattcagaattccgtttccttctaactaatgaaaaactgcttactaaaaaaaaattttatactttccttgctaaggtcccatatattgatttgtacagatccacttagtcattttctcctttttttaagaaccattttcatctgatttttaaactcacgataccagttatctgttaatcaaaattgcattttacaatttaataatgtgatatttcctatgtctacagcataccttattaggtataaaacctactgcaacttagaaaaaggaaagaaaaaagaaaacttttccaactgctgcattaagatagggtggattttatgtgctttttttttttaagagttgaatttcttttcctgacttttaccttttacagcgtattacttagtgaacattacattttcagaatagatcctaatattttattgagggcctatgtgctaaaaactatgcatatctatatattggccaattatctttaataatttaccttttgaaattgcatgtttatcatatatccttaagtggacacatacagtgccatgttgatgtgcctctcagttttattgaaaagctgccccacagcccatgtctcttgttctctgcaatgcctcaagggagtgagctctcaaccacagatagctgtggcttctcagaagcagctcattgccaaggccaggctgagaggggacctgcttgctgtggtggttgcctagcccagatgagcatttacctaccaccttcccacttggctagctgtcctttggatatgtgctgttaactggggaaggcatctaactagtagcctgctactccatagtatggctcaatagatgacacatcattttgacattatcaataggagaaaagaaaactaacccttcttctgattgtttggagccatagttgtctcagatgttctaattctctttgtatgcttggaaacagcatagatatgttgctgtggttttcagaattttctcttttaatcacaagaagccttttaaaaaatgacttacacatattctcaatgtacagtaaaacagacagaagtgagcttatctgtttgatgctgtggcagggtcccagtcactgggcatatcctccttctccttaaccagctcctcagcagcccctgagtcacctgcacaaggtgcttgggaactgctggttatgagcattcctggttttcttcagccaaataacaggtaatcactgtcaattggatttggtcttcattattttatattctgattttatcagaattattctattttaaaattgttttaaaatttaaaaacatttaattcatgatcatgttcatcagtagatgctattattcataagaactgtgattccagcaaactagggtaattggtgcctttttacagttttgaataaaagcatttacaatttctaaattatcagttttcacagtttcagcactcaacctcatcatacgctgatttaatattgttttacattaaaatagtccttttccctgttgtgccaccattcatttaagtgctgtttgttcttaaaatgcatttaaagaaaaattacccatattgactttcacacctcatataatcagatctattacaaatatatatcggagtgacggtgcccaggatagatgtaatatttcttacagatgctggcacagaggaaataatataccagctaatctagtcacctaaccttgtggttagaattgcaattttaagaccagaaaaatttgaagtctgatcagagatttacaactgttcattatagtggtgccttaggcaatctttccaaagtaaattcagggccccattgctacttatgccatatttggacatactttttttttcttcaattttgtaaacttcctggaaagctgtcttcactaagtatcccctagtctctatatatgtggttagtagtcatggaaatgacacataaagtacgccagaagtttgatggaacgtgttagaaactgttttgtgcttttatggatgtcatacttgacaatacatgtgtaagttactaatatatgaattgatgctaaatatatcttacatttgaattccttttggataaagttatttcttgatgtgacacagtagtgtgttttcatttttattctttacatgtgaccaaaacaatagaaaagttaaaaataaaatatagtgttttaggtggc

SEQ ID NO: 445582 - DNA, 3084 bp, Homo sapiens
cgtgacatggcatatcatagtgaattatgaagtgcctacaaattcagagtggccgtcctaatactatgaactgctcgtctgaccccagcatttatgatgtaaatctctttctctatggattatatctgtttaaagcattctttctaggttattttggggggacagtgccaagtccatctttgcccagtcaattcagtgattgatagcaatttacattaattgcagtaaagctctttggattagaaattagtgtggggaaagcttattctgttgttgtttttgtttactttcatatgatgaaaatgctgtgtttaagtgtttgtcaataggaagaatggaaaactgttgggatgatgtggtttgcaggttgctgtgcctgattcacagtgtatgttgtataagccaatgtccatacctgattatgagagcttcttaaattatatgatatcaaatttgttcctgtaactctgtatacagtgcttttctgcaaggtaaaaataacctgtctatgcatctgatttttgctacagtttagacactgtggtttacaaaacagcatgcactcaacttgggactttatgaaaagtactgaatgagcaggaaaaggcacatactcagttttttaaatgtacaatcaacaagtaaaaataacctcatgtaagtaagccatttttatttgcctttctagatattttattttattgtggaaaactgtaaacatggtcagatttggctttttttttcattaactgagcaagactttcaggatattgtagatgcacagatggtaggttgtcctgaattctacattattagattactttaattgagatttgttaaaacggttaggactgttttgtccaggaaagataagaggaccaaacatataaggtgaaattcagaattccgtttccttctaactaatgaaaaactgcttactaaaaaaaaattttatactttccttgctaaggtcccatatattgatttgtacagatccacttagtcattttctcctttttttaagaaccattttcatctgatttttaaactcacgataccagttatctgttaatcaaaattgcattttacaatttaataatgtgatatttcctatgtctacagcataccttattaggtataaaacctactgcaacttagaaaaaggaaagaaaaaagaaaacttttccaactgctgcattaagatagggtggattttatgtgctttttttttttaagagttgaatttcttttcctgacttttaccttttacagcgtattacttagtgaacattacattttcagaatagatcctaatattttattgagggcctatgtgctaaaaactatgcatatctatatattggccaattatctttaataatttaccttttgaaattgcatgtttatcatatatccttaagtggacacatacagtgccatgttgatgtgcctctcagttttattgaaaagctgccccacagcccatgtctcttgttctctgcaatgcctcaagggagtgagctctcaaccacagatagctgtggcttctcagaagcagctcattgccaaggccaggctgagaggggacctgcttgctgtggtggttgcctagcccagatgagcatttacctaccaccttcccacttggctagctgtcctttggatatgtgctgttaactggggaaggcatctaactagtagcctgctactccatagtatggctcaatagatgacacatcattttgacattatcaataggagaaaagaaaactaacccttcttctgattgtttggagccatagttgtctcagatgttctaattctctttgtatgcttggaaacagcatagatatgttgctgtggttttcagaattttctcttttaatcacaagaagccttttaaaaaatgacttacacatattctcaatgtacagtaaaacagacagaagtgagcttatctgtttgatgctgtggcagggtcccagtcactgggcatatcctccttctccttaaccagctcctcagcagcccctgagtcacctgcacaaggtgcttgggaactgctggttatgagcattcctggttttcttcagccaaataacaggtaatcactgtcaattggatttggtcttcattattttatattctgattttatcagaattattctattttaaaattgttttaaaatttaaaaacatttaattcatgatcatgttcatcagtagatgctattattcataagaactgtgattccagcaaactagggtaattggtgcctttttacagttttgaataaaagcatttacaatttctaaattatcagttttcacagtttcagcactcaacctcatcatacgctgatttaatattgttttacattaaaatagtccttttccctgttgtgccaccattcatttaagtgctgtttgttcttaaaatgcatttaaagaaaaattacccatattgactttcacacctcatataatcagatctattacaaatatatatcggagtgacggtgcccaggatagatgtaatatttcttacagatgctggcacagaggaaataatataccagctaatctagtcacctaaccttgtggttagaattgcaattttaagaccagaaaaatttgaagtctgatcagagatttacaactgttcattatagtggtgccttaggcaatctttccaaagtaaattcagggccccattgctacttatgccatatttggacatactttttttttcttcaattttgtaaacttcctggaaagctgtcttcactaagtatcccctagtctctatatatgtggttagtagtcatggaaatgacacataaagtacgccagaagtttgatggaacgtgttagaaactgttttgtgcttttatggatgtcatacttgacaatacatgtgtaagttactaatatatgaattgatgctaaatatatcttacatttgaattccttttggataaagttatttcttgatgtgacacagtagtgtgttttcatttttattctttacatgtgaccaaaacaatagaaaagttaaaaataaaatatagtgttttaggtggc

SEQ ID NO: 445583 - DNA, 4387 bp, Homo sapiens
gagccctaggttctcctgaatccctgcggtcccagcgtcgctccggacgctgccaacctgttctccaccgtcgctcgacttccacctctaagactcccacgaaactcaggttgaataattcatcaaattacacaactgaactcaagacatggctgcccagtgtgtcacaaaggtggcgctgaatgtttcctgtgccaatcttttggataaagatatagggtcaaagtcagaccctttatgtgtgttgtttttgaatacaagtggtcaacagtggtatgaggttgagcgcacagaaaggattaagaattgcttgaatccccaattttccaagacatttattattgattactactttgaagtggttcagaaattgaaatttggggtttatgacatcgacaacaaaactattgagctgagtgatgatgacttcttaggggaatgtgaatgtacccttggacaaattgtttccagcaagaagctaactcgaccactggtgatgaaaactggcagacctgcaggaaaagggagcattacgatttcagctgaagaaataaaagataatagagtggtcttgtttgaaatggaagccagaaaactggataataaggatctatttggaaagtcagacccatacctggaattccacaagcagacatctgatggaaactggctaatggttcatcggacagaggttgttaaaaacaacttgaatcctgtttggaggcctttcaagatctctcttaactcactgtgttacggagatatggacaaaaccattaaggtggagtgttatgattatgacaatgatgggtcacatgatctcattggaacatttcagaccaccatgacaaaactgaaagaagcctccagaagctcacctgttgaatttgaatgcataaatgagaaaaaaaggcaaaagaaaaaaagctacaagaattcaggtgttatcagtgtgaaacagtgtgagattacagtagaatgcacattccttgactatataatgggaggatgtcagctgaattttactgtgggagtggacttcactggctccaatggtgacccaaggtctccagactcccttcattacatcagccccaatggcgttaatgagtatttgactgctctctggtctgtgggactggtcattcaagattatgatgctgataagatgtttccagcttttggttttggcgctcagatacctcctcagtggcaggtatcacatgaatttccaatgaacttcaacccatccaatccctactgcaatggaatccaaggcattgtagaggcgtatcggtcttgtcttcctcagataaaactctatggaccaactaatttttctccaatcataaatcacgtggccaggtttgctgctgcagccacgcaacagcagacagcttctcaatattttgtgcttttgattattactgatggtgtgatcacagaccttgatgaaaccagacaagctatagttaatgcctccaggctgcctatgtccatcataattgttggagttggaggtgctgacttcagcgccatggagtttctggatggtgatggtggaagtctccgctccccattgggcgaagtggccatcagagatattgtccagtttgtgcctttcagacagttccagaatgctccaaaagaagcacttgctcagtgtgtcttggcagagattccccagcaggtggtgggctacttcaatacatacaaactccttcctcccaagaacccagccacgaaacaacagaagcagtgaccacttcaacagaattcttttgtgttatgtggagcaatgccatctctcaccccaaatcgtgtatctgtcattctacgtactttttacccccagcatttatgatgtaaatctctttctctatggattatatctgtttaaagcattctttctaggttattttggggggacagtgccaagtccatctttgcccagtcaattcagtgattgatagcaatttacattaattgcagtaaagctctttggattagaaattagtgtggggaaagcttattctgttgttgtttttgtttactttcatatgatgaaaatgctgtgtttaagtgtttgtcaataggaagaatggaaaactgttgggatgatgtggtttgcaggttgctgtgcctgattcacagtgtatgttgtataagccaatgtccatacctgattatgagagcttcttaaattatatgatatcaaatttgttcctgtaactctgtatacagtgcttttctgcaaggtaaaaataacctgtctatgcatctgatttttgctacagtttagacactgtggtttacaaaacagcatgcactcaacttgggactttatgaaaagtactgaatgagcaggaaaaggcacatactcagttttttaaatgtacaatcaacaagtaaaaataacctcatgtaagtaagccatttttatttgcctttctagatattttattttattgtggaaaactgtaaacatggtcagatttggctttttttttcattaactgagcaagactttcaggatattgtagatgcacagatggtaggttgtcctgaattctacattattagattactttaattgagatttgttaaaacggttaggactgttttgtccaggaaagataagaggaccaaacatataaggtgaaattcagaattccgtttccttctaactaatgaaaaactgcttactaaaaaaaaattttatactttccttgctaaggtcccatatattgatttgtacagatccacttagtcattttctcctttttttaagaaccattttcatctgatttttaaactcacgataccagttatctgttaatcaaaattgcattttacaatttaataatgtgatatttcctatgtctacagcataccttattaggtataaaacctactgcaacttagaaaaaggaaagaaaaaagaaaacttttccaactgctgcattaagatagggtggattttatgtgctttttttttttaagagttgaatttcttttcctgacttttaccttttacagcgtattacttagtgaacattacattttcagaatagatcctaatattttattgagggcctatgtgctaaaaactatgcatatctatatattggccaattatctttaataatttaccttttgaaattgcatgtttatcatatatccttaagtggacacatacagtgccatgttgatgtgcctctcagttttattgaaaagctgccccacagcccatgtctcttgttctctgcaatgcctcaagggagtgagctctcaaccacagatagctgtggcttctcagaagcagctcattgccaaggccaggctgagaggggacctgcttgctgtggtggttgcctagcccagatgagcatttacctaccaccttcccacttggctagctgtcctttggatatgtgctgttaactggggaaggcatctaactagtagcctgctactccatagtatggctcaatagatgacacatcattttgacattatcaataggagaaaagaaaactaacccttcttctgattgtttggagccatagttgtctcagatgttctaattctctttgtatgcttggaaacagcatagatatgttgctgtggttttcagaattttctcttttaatcacaagaagccttttaaaaaatgacttacacatattctcaatgtacagtaaaacagacagaagtgagcttatctgtttgatgctgtggcagggtcccagtcactgggcatatcctccttctccttaaccagctcctcagcagcccctgagtcacctgcacaaggtgcttgggaactgctggttatgagcattcctggttttcttcagccaaataacaggtaatcactgtcaattggatttggtcttcattattttatattctgattttatcagaattattctattttaaaattgttttaaaatttaaaaacatttaattcatgatcatgttcatcagtagatgctattattcataagaactgtgattccagcaaactagggtaattggtgcctttttacagttttgaataaaagcatttacaatttctaaattatcagttttcacagtttcagcactcaacctcatcatacgctgatttaatattgttttacattaaaatagtccttttccctgttgtgccaccattcatttaagtgctgtttgttcttaaaatgcatttaaagaaaaattacccatattgacttttcaccactcttaatataaattcggaatctaattaccaaattttataattcggaaagttgaccggtgccccacggaatagatggtaaattaatttctttaccaggaattcctgtcaaccagagggtttttataccccggcttttctggc

SEQ ID NO: 445584 - DNA, 4766 bp, Homo sapiens
gagccctaggttctcctgaatccctgcggtcccagcgtcgctccggacgctgccaacctgttctccaccgtcgctcgacttccacctctaagactcccacgaaactcaggttgaataattcatcaaattacacaactgaactcaagacatggctgcccagtgtgtcacaaaggtggcgctgaatgtttcctgtgccaatcttttggataaagatatagggtcaaagtcagaccctttatgtgtgttgtttttgaatacaagtggtcaacagtggtatgaggttgagcgcacagaaaggattaagaattgcttgaatccccaattttccaagacatttattattgattactactttgaagtggttcagaaattgaaatttggggtttatgacatcgacaacaaaactattgagctgagtgatgatgacttcttaggggaatgtgaatgtacccttggacaaattgtttccagcaagaagctaactcgaccactggtgatgaaaactggcagacctgcaggaaaagggagcattacgatttcagctgaagaaataaaagataatagagtggtcttgtttgaaatggaagccagaaaactggataataaggatctatttggaaagtcagacccatacctggaattccacaagcagacatctgatggaaactggctaatggttcatcggacagaggttgttaaaaacaacttgaatcctgtttggaggcctttcaagatctctcttaactcactgtgttacggagatatggacaaaaccattaaggtggagtgttatgattatgacaatgatgggtcacatgatctcattggaacatttcagaccaccatgacaaaactgaaagaagcctccagaagctcacctgttgaatttgaatgcataaatgagaaaaaaaggcaaaagaaaaaaagctacaagaattcaggtgttatcagtgtgaaacagtgtgagattacagtagaatgcacattccttgactatataatgggaggatgtcagctgaattttactgtgggagtggacttcactggctccaatggtgacccaaggtctccagactcccttcattacatcagccccaatggcgttaatgagtatttgactgctctctggtctgtgggactggtcattcaagattatgatgctgataagatgtttccagcttttggttttggcgctcagatacctcctcagtggcaggtatcacatgaatttccaatgaacttcaacccatccaatccctactgcaatggaatccaaggcattgtagaggcgtatcggtcttgtcttcctcagataaaactctatggaccaactaatttttctccaatcataaatcacgtggccaggtttgctgctgcagccacgcaacagcagacagcttctcaatattttgtgcttttgattattactgatggtgtgatcacagaccttgatgaaaccagacaagctatagttaatgcctccaggctgcctatgtccatcataattgttggagttggaggtgctgacttcagcgccatggagtttctggatggtgatggtggaagtctccgctccccattgggcgaagtggccatcagagatattgtccagtttgtgcctttcagacagttccagaatgctccaaaagaagcacttgctcagtgtgtcttggcagagattccccagcaggtggtgggctacttcaatacatacaaactccttcctcccaagaacccagccacgaaacaacagaagcagtgaccacttcaacagaattcttttgtgttatgtggagcaatgccatctctcaccccaaatcgtgtatctgtcattctacgtactttttacccccagcatttatgatgtaaatctctttctctatggattatatctgtttaaagcattctttctaggttattttggggggacagtgccaagtccatctttgcccagtcaattcagtgattgatagcaatttacattaattgcagtaaagctctttggattagaaattagtgtggggaaagcttattctgttgttgtttttgtttactttcatatgatgaaaatgctgtgtttaagtgtttgtcaataggaagaatggaaaactgttgggatgatgtggtttgcaggttgctgtgcctgattcacagtgtatgttgtataagccaatgtccatacctgattatgagagcttcttaaattatatgatatcaaatttgttcctgtaactctgtatacagtgcttttctgcaaggtaaaaataacctgtctatgcatctgatttttgctacagtttagacactgtggtttacaaaacagcatgcactcaacttgggactttatgaaaagtactgaatgagcaggaaaaggcacatactcagttttttaaatgtacaatcaacaagtaaaaataacctcatgtaagtaagccatttttatttgcctttctagatattttattttattgtggaaaactgtaaacatggtcagatttggctttttttttcattaactgagcaagactttcaggatattgtagatgcacagatggtaggttgtcctgaattctacattattagattactttaattgagatttgttaaaacggttaggactgttttgtccaggaaagataagaggaccaaacatataaggtgaaattcagaattccgtttccttctaactaatgaaaaactgcttactaaaaaaaaattttatactttccttgctaaggtcccatatattgatttgtacagatccacttagtcattttctcctttttttaagaaccattttcatctgatttttaaactcacgataccagttatctgttaatcaaaattgcattttacaatttaataatgtgatatttcctatgtctacagcataccttattaggtataaaacctactgcaacttagaaaaaggaaagaaaaaagaaaacttttccaactgctgcattaagatagggtggattttatgtgctttttttttttaagagttgaatttcttttcctgacttttaccttttacagcgtattacttagtgaacattacattttcagaatagatcctaatattttattgagggcctatgtgctaaaaactatgcatatctatatattggccaattatctttaataatttaccttttgaaattgcatgtttatcatatatccttaagtggacacatacagtgccatgttgatgtgcctctcagttttattgaaaagctgccccacagcccatgtctcttgttctctgcaatgcctcaagggagtgagctctcaaccacagatagctgtggcttctcagaagcagctcattgccaaggccaggctgagaggggacctgcttgctgtggtggttgcctagcccagatgagcatttacctaccaccttcccacttggctagctgtcctttggatatgtgctgttaactggggaaggcatctaactagtagcctgctactccatagtatggctcaatagatgacacatcattttgacattatcaataggagaaaagaaaactaacccttcttctgattgtttggagccatagttgtctcagatgttctaattctctttgtatgcttggaaacagcatagatatgttgctgtggttttcagaattttctcttttaatcacaagaagccttttaaaaaatgacttacacatattctcaatgtacagtaaaacagacagaagtgagcttatctgtttgatgctgtggcagggtcccagtcactgggcatatcctccttctccttaaccagctcctcagcagcccctgagtcacctgcacaaggtgcttgggaactgctggttatgagcattcctggttttcttcagccaaataacaggtaatcactgtcaattggatttggtcttcattattttatattctgattttatcagaattattctattttaaaattgttttaaaatttaaaaacatttaattcatgatcatgttcatcagtagatgctattattcataagaactgtgattccagcaaactagggtaattggtgcctttttacagttttgaataaaagcatttacaatttctaaattatcagttttcacagtttcagcactcaacctcatcatacgctgatttaatattgttttacattaaaatagtccttttccctgttgtgccaccattcatttaagtgctgtttgttcttaaaatgcatttaaagaaaaattacccatattgactttcacacctcatataatcagatctattacaaatatatatcggagtgacggtgcccaggatagatgtaatatttcttacagatgctggcacagaggaaataatataccagctaatctagtcacctaaccttgtggttagaattgcaattttaagaccagaaaaatttgaagtctgatcagagatttacaactgttcattatagtggtgccttaggcaatctttccaaagtaaattcagggccccattgctacttatgccatatttggacatactttttttttcttcaattttgtaaacttcctggaaagctgtcttcactaagtatcccctagtctctatatatgtggttagtagtcatggaaatgacacataaagtacgccagaagtttgatggaacgtgttagaaactgttttgtgcttttatggatgtcatacttgacaatacatgtgtaagttactaatatatgaattgatgctaaatatatcttacatttgaattccttttggataaagttatttcttgatgtga

SEQ ID NO: 445585 - DNA, 4732 bp, Homo sapiens
gagccctaggttctcctgaatccctgcggtcccagcgtcgctccggacgctgccaacctgttctccaccgtcgctcgacttccacctctaagactcccacgaaactcaggttgaataattcatcaaattacacaactgaactcaagacatggctgcccagtgtgtcacaaaggtggcgctgaatgtttcctgtgccaatcttttggataaagatatagggtcaaagtcagaccctttatgtgtgttgtttttgaatacaagtggtcaacagtggtatgaggttgagcgcacagaaaggattaagaattgcttgaatccccaattttccaagacatttattattgattactactttgaagtggttcagaaattgaaatttggggtttatgacatcgacaacaaaactattgagctgagtgatgatgacttcttaggggaatgtgaatgtacccttggacaaattgtttccagcaagaagctaactcgaccactggtgatgaaaactggcagacctgcaggaaaagggagcattacgatttcagctgaagaaataaaagataatagagtggtcttgtttgaaatggaagccagaaaactggataataaggatctatttggaaagtcagacccatacctggaattccacaagcagacatctgatggaaactggctaatggttcatcggacagaggttgttaaaaacaacttgaatcctgtttggaggcctttcaagatctctcttaactcactgtgttacggagatatggacaaaaccattaaggtggagtgttatgattatgacaatgatgggtcacatgatctcattggaacatttcagaccaccatgacaaaactgaaagaagcctccagaagctcacctgttgaatttgaatgcataaatgagaaaaaaaggcaaaagaaaaaaagctacaagaattcaggtgttatcagtgtgaaacagtgtgagattacagtagaatgcacattccttgactatataatgggaggatgtcagctgaattttactgtgggagtggacttcactggctccaatggtgacccaaggtctccagactcccttcattacatcagccccaatggcgttaatgagtatttgactgctctctggtctgtgggactggtcattcaagattatgatgctgataagatgtttccagcttttggttttggcgctcagatacctcctcagtggcaggtatcacatgaatttccaatgaacttcaacccatccaatccctactgcaatggaatccaaggcattgtagaggcgtatcggtcttgtcttcctcagataaaactctatggaccaactaatttttctccaatcataaatcacgtggccaggtttgctgctgcagccacgcaacagcagacagcttctcaatattttgtgcttttgattattactgatggtgtgatcacagaccttgatgaaaccagacaagctatagttaatgcctccaggctgcctatgtccatcataattgttggagttggaggtgctgacttcagcgccatggagtttctggatggtgatggtggaagtctccgctccccattgggcgaagtggccatcagagatattgtccagtttgtgcctttcagacagttccagaatgctccaaaagaagcacttgctcagtgtgtcttggcagagattccccagcaggtggtgggctacttcaatacatacaaactccttcctcccaagaacccagccacgaaacaacagaagcagtgaccacttcaacagaattcttttgtgttatgtggagcaatgccatctctcaccccaaatcgtgtatctgtcattctacgtactttttacccccagcatttatgatgtaaatctctttctctatggattatatctgtttaaagcattctttctaggttattttggggggacagtgccaagtccatctttgcccagtcaattcagtgattgatagcaatttacattaattgcagtaaagctctttggattagaaattagtgtggggaaagcttattctgttgttgtttttgtttactttcatatgatgaaaatgctgtgtttaagtgtttgtcaataggaagaatggaaaactgttgggatgatgtggtttgcaggttgctgtgcctgattcacagtgtatgttgtataagccaatgtccatacctgattatgagagcttcttaaattatatgatatcaaatttgttcctgtaactctgtatacagtgcttttctgcaaggtaaaaataacctgtctatgcatctgatttttgctacagtttagacactgtggtttacaaaacagcatgcactcaacttgggactttatgaaaagtactgaatgagcaggaaaaggcacatactcagttttttaaatgtacaatcaacaagtaaaaataacctcatgtaagtaagccatttttatttgcctttctagatattttattttattgtggaaaactgtaaacatggtcagatttggctttttttttcattaactgagcaagactttcaggatattgtagatgcacagatggtaggttgtcctgaattctacattattagattactttaattgagatttgttaaaacggttaggactgttttgtccaggaaagataagaggaccaaacatataaggtgaaattcagaattccgtttccttctaactaatgaaaaactgcttactaaaaaaaaattttatactttccttgctaaggtcccatatattgatttgtacagatccacttagtcattttctcctttttttaagaaccattttcatctgatttttaaactcacgataccagttatctgttaatcaaaattgcattttacaatttaataatgtgatatttcctatgtctacagcataccttattaggtataaaacctactgcaacttagaaaaaggaaagaaaaaagaaaacttttccaactgctgcattaagatagggtggattttatgtgctttttttttttaagagttgaatttcttttcctgacttttaccttttacagcgtattacttagtgaacattacattttcagaatagatcctaatattttattgagggcctatgtgctaaaaactatgcatatctatatattggccaattatctttaataatttaccttttgaaattgcatgtttatcatatatccttaagtggacacatacagtgccatgttgatgtgcctctcagttttattgaaaagctgccccacagcccatgtctcttgttctctgcaatgcctcaagggagtgagctctcaaccacagatagctgtggcttctcagaagcagctcattgccaaggccaggctgagaggggacctgcttgctgtggtggttgcctagcccagatgagcatttacctaccaccttcccacttggctagctgtcctttggatatgtgctgttaactggggaaggcatctaactagtagcctgctactccatagtatggctcaatagatgacacatcattttgacattatcaataggagaaaagaaaactaacccttcttctgattgtttggagccatagttgtctcagatgttctaattctctttgtatgcttggaaacagcatagatatgttgctgtggttttcagaattttctcttttaatcacaagaagccttttaaaaaatgacttacacatattctcaatgtacagtaaaacagacagaagtgagcttatctgtttgatgctgtggcagggtcccagtcactgggcatatcctccttctccttaaccagctcctcagcagcccctgagtcacctgcacaaggtgcttgggaactgctggttatgagcattcctggttttcttcagccaaataacaggtaatcactgtcaattggatttggtcttcattattttatattctgattttatcagaattattctattttaaaattgttttaaaatttaaaaacatttaattcatgatcatgttcatcagtagatgctattattcataagaactgtgattccagcaaactagggtaattggtgcctttttacagttttgaataaaagcatttacaatttctaaattatcagttttcacagtttcagcactcaacctcatcatacgctgatttaatattgttttacattaaaatagtccttttccctgttgtgccaccattcatttaagtgctgtttgttcttaaaatgcatttaaagaaaaattacccatattgactttcacacctcatataatcagatctattacaaatatatatcggagtgacggtgcccaggatagatgtaatatttcttacagatgctggcacagaggaaataatataccagctaatctagtcacctaaccttgtggttagaattgcaattttaagaccagaaaaatttgaagtctgatcagagatttacaactgttcattatagtggtgccttaggcaatctttccaaagtaaattcagggccccattgctacttatgccatatttggacatactttttttttcttcaattttgtaaacttcctggaaagctgtcttcactaagtatcccctagtctctatatatgtggttagtagtcatggaaatgacacataaagtacgccagaagtttgatggaacgtgttagaaactgttttgtgcttttatggatgtcatacttgacaatacatgtgtaagttactaatatatgaattgatgctaaatatatcttacatttg

SEQ ID NO: 445586 - DNA, 3748 bp, Homo sapiens
  misc_feature (54)..(54): n is a, c, g, or t
tgcattagaggatccccacctctaccccacggggactggtcattcaagattatnatgctgataagatgtttccagcttttggttttggcgctcagatacctcctcagtggcaggtatcacatgaatttccaatgaacttcaacccatccaatccctactgcaatggaatccaaggcattgtagaggcgtatcggtcttgtcttcctcagataaaactctatggaccaactaatttttctccaatcataaatcacgtggccaggtttgctgctgcagccacgcaacagcagacagcttctcaatattttgtgcttttgattattactgatggtgtgatcacagaccttgatgaaaccagacaagctatagttaatgcctccaggctgcctatgtccatcataattgttggagttggaggtgctgacttcagcgccatggagtttctggatggtgatggtggaagtctccgctccccattgggcgaagtggccatcagagatattgtccagtttgtgcctttcagacagttccagaatgctccaaaagaagcacttgctcagtgtgtcttggcagagattccccagcaggtggtgggctacttcaatacatacaaactccttcctcccaagaacccagccacgaaacaacagaagcagtgaccacttcaacagaattcttttgtgttatgtggagcaatgccatctctcaccccaaatcgtgtatctgtcattctacgtactttttacccccagcatttatgatgtaaatctctttctctatggattatatctgtttaaagcattctttctaggttattttggggggacagtgccaagtccatctttgcccagtcaattcagtgattgatagcaatttacattaattgcagtaaagctctttggattagaaattagtgtggggaaagcttattctgttgttgtttttgtttactttcatatgatgaaaatgctgtgtttaagtgtttgtcaataggaagaatggaaaactgttgggatgatgtggtttgcaggttgctgtgcctgattcacagtgtatgttgtataagccaatgtccatacctgattatgagagcttcttaaattatatgatatcaaatttgttcctgtaactctgtatacagtgcttttctgcaaggtaaaaataacctgtctatgcatctgatttttgctacagtttagacactgtggtttacaaaacagcatgcactcaacttgggactttatgaaaagtactgaatgagcaggaaaaggcacatactcagttttttaaatgtacaatcaacaagtaaaaataacctcatgtaagtaagccatttttatttgcctttctagatattttattttattgtggaaaactgtaaacatggtcagatttggctttttttttcattaactgagcaagactttcaggatattgtagatgcacagatggtaggttgtcctgaattctacattattagattactttaattgagatttgttaaaacggttaggactgttttgtccaggaaagataagaggaccaaacatataaggtgaaattcagaattccgtttccttctaactaatgaaaaactgcttactaaaaaaaaattttatactttccttgctaaggtcccatatattgatttgtacagatccacttagtcattttctcctttttttaagaaccattttcatctgatttttaaactcacgataccagttatctgttaatcaaaattgcattttacaatttaataatgtgatatttcctatgtctacagcataccttattaggtataaaacctactgcaacttagaaaaaggaaagaaaaaagaaaacttttccaactgctgcattaagatagggtggattttatgtgctttttttttttaagagttgaatttcttttcctgacttttaccttttacagcgtattacttagtgaacattacattttcagaatagatcctaatattttattgagggcctatgtgctaaaaactatgcatatctatatattggccaattatctttaataatttaccttttgaaattgcatgtttatcatatatccttaagtggacacatacagtgccatgttgatgtgcctctcagttttattgaaaagctgccccacagcccatgtctcttgttctctgcaatgcctcaagggagtgagctctcaaccacagatagctgtggcttctcagaagcagctcattgccaaggccaggctgagaggggacctgcttgctgtggtggttgcctagcccagatgagcatttacctaccaccttcccacttggctagctgtcctttggatatgtgctgttaactggggaaggcatctaactagtagcctgctactccatagtatggctcaatagatgacacatcattttgacattatcaataggagaaaagaaaactaacccttcttctgattgtttggagccatagttgtctcagatgttctaattctctttgtatgcttggaaacagcatagatatgttgctgtggttttcagaattttctcttttaatcacaagaagccttttaaaaaatgacttacacatattctcaatgtacagtaaaacagacagaagtgagcttatctgtttgatgctgtggcagggtcccagtcactgggcatatcctccttctccttaaccagctcctcagcagcccctgagtcacctgcacaaggtgcttgggaactgctggttatgagcattcctggttttcttcagccaaataacaggtaatcactgtcaattggatttggtcttcattattttatattctgattttatcagaattattctattttaaaattgttttaaaatttaaaaacatttaattcatgatcatgttcatcagtagatgctattattcataagaactgtgattccagcaaactagggtaattggtgcctttttacagttttgaataaaagcatttacaatttctaaattatcagttttcacagtttcagcactcaacctcatcatacgctgatttaatattgttttacattaaaatagtccttttccctgttgtgccaccattcatttaagtgctgtttgttcttaaaatgcatttaaagaaaaattacccatattgactttcacacctcatataatcagatctattacaaatatatatcggagtgacggtgcccaggatagatgtaatatttcttacagatgctggcacagaggaaataatataccagctaatctagtcacctaaccttgtggttagaattgcaattttaagaccagaaaaatttgaagtctgatcagagatttacaactgttcattatagtggtgccttaggcaatctttccaaagtaaattcagggccccattgctacttatgccatatttggacatactttttttttcttcaattttgtaaacttcctggaaagctgtcttcactaagtatcccctagtctctatatatgtggttagtagtcatggaaatgacacataaagtacgccagaagtttgatggaacgtgttagaaactgttttgtgcttttatggatgtcatacttgacaatacatgtgtaagttactaatatatgaattgatgctaaatatatcttacatttgaattccttttggataaagttatttcttgatgtgacacagtagtgtgttttcatttttattctttacatgtgaccaaaacaatagaaaagttaaaaataaaatatagtgttttaggtggc

SEQ ID NO: 445587 - DNA, 889 bp, Homo sapiens
tgtattttttgatttttaagtatatatatattttatatggaaacagtatatactagcacatagtaacaatatatatcagcgaagaaaggaatacaccagaaagttaagcatgcttatttctgagtggtgaaatgatagaaaatgtgtaatcagattttttaaaatgcctaaagacaaaagttcccaaggagtacctaagatcaagcaagtcttcttgctggggcctcattatcttactatcttccctgattgggtatgagtatcaccctgttctgcagggttaccaggttcgagcctgtgttcaaggtggtctgaaatgttacacaaacccacagcccttctcccttttccagccacctaatgatccccatggtatccagagagaagacctcatcctgagtcttcgcgctgtgctggcttctacaccacgatttgctgagtttctgctgcccctgttgattgagaaagtggattctgaggttctgagtgccaagttggattctctacagactctggtgagtgatttttcctccttgcaggacccagctaccttttgacaagttaggggtcctaaaggatatagattctaggatagccaaggaacagttcatgggcctcagaagaggatacccaggatttgggcctttgtgtcgacctgaagcccccagctgcatatcgtcgtgtcccatcccccatcccatagtaactgaggaaaggctgaccaggactccctctttaggcttctattttatcaaccagggttatctcctacttctctgttcccttagtaggactgttaaaaatcttaactggtttttctgctgagaccagggctccttcaggtgccattatgctgaggtacctgcacatcctagggtgtctgagtgtg

SEQ ID NO: 445588 - DNA, 582 bp, Homo sapiens
tgtattttttgatttttaagtatatatatattttatatggaaacagtatatactagcacatagtaacaatatatatcagcgaagaaaggaatacaccagaaagttaagcatgcttatttctgagtggtgaaatgatagaaaatgtgtaatcagattttttaaaatgcctaaagacaaaagttcccaaggagtacctaagatcaagcaagtcttcttgctggggcctcattatcttactatcttccctgattgggtatgagtatcaccctgttctgcagggttaccaggttcgagcctgtgttcaaggtggtctgaaatgttacacaaacccacagcccttctcccttttccagccacctaatgatccccatggtatccagagagaagacctcatcctgagtcttcgcgctgtgctggcttctacaccacgatttgctgaggtgggtctagccaaggttagggtatatagcctctgcccatagatggctctgaagaaagagcagtaaaagcatggagaaaaaaatatctggtatacattttagggcatgacaccctgcaagtgtcttgtgtggcaggtatctt

SEQ ID NO: 445589 - DNA, 512 bp, Homo sapiens
aactgtcatgggtctcagtctccaacctctgtggactgtaggggagtcaggcaccatttggcctcctccccagctctgtgatgtgctgcttctctagactgcaggcaccacctgtgtgaaccggacatgaaactggtgtggcctagtgccaagctgttgcaggcagctgcaggtgcatctgcccgggcctgtgactctgtcaccagcaatgtactgcctttactgctggaacagttccacaagcacagtcaggtaagggagcagaatctttgggggaaatgatgggacctgtgtgctaggttccctttctcagagagtgagctaagttttagcttgggccaacatagtagaccttgggttttgctcccattagctgctgctgctgcttcccttactcactttttccctgtctcatacataaaaggatcattctcccaagacaggaggatagcttgaagccaggagttcaagatcagcctgggcaacaaagtgagatcccatctctaaaaaaa

SEQ ID NO: 445590 - DNA, 667 bp, Homo sapiens
aaccagttggagagatgtaggactgctctcttcttaggctttaagaagccctgtccaactcagtggtgtaggtacttgagttctgctcttttagcaaggaggcgttgggagctcacactcctgaatctgcctaatatcagacgtaggcaagagagctgtgagcccaggctcagccaatgcttatctgctctgcgcctccagcagggtggcagcactggaagcatcaggaaccctggctgctctctaccctgtggccttcagcagccacctcgtacccaagctcgctgaggagctgcgtgtaggtatgtgtctctaatcctctgtggcccatccctttccagcaaggctttggggccttcgtgcttcctatcacacagtaaacctttgtctcatgggttgctttcaggggagtcaaatttgactaacggagatgagcccacccaatgctcccggcatctgtgctgtctgcaagccttgtcagctgtatcaacacatcccagcatcgtcaaggagacactgcctctgctgctgcagcatctctggcaagtgaacagaggtaactactaggaataaccaccaacggactgggctgaatagggagctgtagtctctaaggcagtggttctagctgtagctatacataagagtaacagaatcaactctttta

SEQ ID NO: 445591 - DNA, 469 bp, Homo sapiens
ttccccaattgctctctctgtctccaattacaggtaacaaaggccctagtgctcagataccatcctctcagctcctgccttacagcccgggtacgtcctttctggagacagaagaacccaggacctaaacaaactttctggttgctcctattcctcccaaggacttccatcctcccctgtgtgttttttgttttcttttcttttttctttttggagacagggtcttactctgtcacccaggctggagtacagtagtgcaatcacagctcactccagcctcaacctccgtaggctcaagtgatcctcccacttcagcctcgcaagtagctgggactacaggggcaccccaccacacccaactaatgtttgtattttttgtaagaactgggtttggccatgttgcccagactcctagactcaagcagtccacctgccttggcctcccaaagtgctaggattacaggcatga

SEQ ID NO: 445592 - DNA, 3453 bp, Homo sapiens
ttgctacgtctaggcccgcgtggtttatcggccttcgcgttatggccgctgccgcggctgtggaggcggcggcgcctatgggtgccctatggggcctcgtgcacgacttcgtcgtgggtcagcaagagggccccgctgaccaggtggctgcaggtcctctctagagaatccagaaccccgaactcgggcacgaggaatccagcttttgtcacaggtgctactccactgtcacaccttgctcctggagaaggaagtggtacacctgatactgttctatgagaaccggctgaaggaccatcatcttgtgatcccatctgtcctgcagggtttgaaggcacttagcctgtgtgtggccctgcccccagggctggctgtttctgtgcttaaagccatcttccaggaagtgcatgtacagtccctgccacaggtggaccgacacacagtctacaatatcatcaccaattttatgcgaacccgggaagaagagctaaagagcctaggagctgacttcacctttggcttcatccaggtgatggatggggaaaaggatccccgtaatcttctggtggccttccgcatcgtccatgacctcatctccagggactatagcctgggaccctttgtggaggagttgtttgaagtgacatcctgttatttccctatcgattttacccctccacctaatgatccccatggtatccagagagaagacctcatcctgagtcttcgcgctgtgctggcttctacaccacgatttgctgagtttctgctgcccctgttgattgagaaagtggattctgaggttctgagtgccaagttggattctctacagactctgaatgcttgctgtgctgtgtatggacagaaggaactgaaggacttcctccccagcctttgggcttctatccgcagagaggtgttccagacggcaagtgagcgggtggaggcagagggcctggcggccctccactccctgactgcgtgtttgtctcgctctgtgctgagggctgatgctgaggacctccttgactccttccttagcaacattctacaggactgcaggcaccacctgtgtgaaccggacatgaaactggtgtggcctagtgccaagctgttgcaggcagctgcaggtgcatctgcccgggcctgtgactctgtcaccagcaatgtactgcctttactgctggaacagttccacaagcacagtcagagcagccagcggcggacaatccttgaaatgctcctgggtttcttgaagctgcagcagaaatggagctatgaagacaaagatcaaaggcctctgaatggcttcaaggaccagctgtgctcactggtattcatggctctaacagaccccagcacccagcttcagcttgttggcatccgtacactgacagtcttgggtgcccagccagatctcctatcttatgaggacttggagctggcagtgggtcacctgtacagactgagcttcctgaaggaggattcccagagttgcagggtggcagcactggaagcatcaggaaccctggctgctctctaccctgtggccttcagcagccacctcgtacccaagctcgctgaggagctgcgtgtaggggagtcaaatttgactaacggagatgagcccacccaatgctcccggcatctgtgctgtctgcaagccttgtcagctgtatcaacacatcccagcatcgtcaaggagacactgcctctgctgctgcagcatctctggcaagtgaacagagggaatatggttgcacaatccagtgacgttattgctgtctgtcagagcctcagacagatggcagaaaaatgtcagcaggaccctgagagttgctggtatttccaccagacagctataccttgcctgcttgccttggctgtgcaggcctctatgccagagaaggagccctcagttctgagaaaagtactattggaggatgaggtgttggctgccatggtgtctgtcattggcactgctacaacccacctgagccctgagttagctgcccagagtgtgacacacattgtgcccctcttcttggatggcaacgtgtcctttctgcctgaaaacagcttcccgagcagattccagccattccaggatggctcctcagggcagaggcggctgattgcactgcttatggcctttgtctgctccctgcctcgaaatgtggaaatccctcagctgaaccaactcatgcgggagcttttggaactgagctgctgccacagctgccccttttcttccaccgctgctgccaagtgctttgcaggactcctcaacaagcaccctgcagggcagcagctggatgaattcctacagctagctgtggacaaagtggaggctggcctgggctctgggccctgtcgtagtcaggccttcactcttcttctctgggtaacaaaggccctagtgctcagataccatcctctcagctcctgccttacagcccggctcatgggcctcctgagtgacccagaattaggtccagcagcagctgatggcttctctctgctcatgtctgactgcactgatgtgctgactcgtgctggccatgccgaagtgcggatcatgttccgccagcggttcttcacagataatgtgcctgctttggtccagggcttccatgctgctccccaagatgtgaagccaaactacttgaagggtctttctcatgtacttaacaggctgcccaagcctgtactcttgccagagctgcccacgcttctttccttgctgctggaggccctgtcctgccctgactgtgtggtgcagctctccaccctcagctgccttcagcctcttctactggaagcaccccaagtcatgagtcttcacgtggacaccctcgtcaccaagtttctgaacctcagctctagcccttccatggctgtccggatcgccgcactgcagtgcatgcatgctctcactcgcctgcccacccctgtgctgctgccgtacaaaccacaggtgattcgggccttagccaaacccctggatgacaagaagagactggtgcgcaaggaagcagtgtcagccagaggggagtggtttctgttggggagccctggcagctgagccctcagtcctggcctagactgttctgacaatctaacctgggattactaactgttgagccatcttccccaaagcagggaaaccactggtctctgactgcctttcccacagacacagcacaaatgctaggcctctgttgcatggctgtacaaagaacataagagtccatatttctagtggatttgtaaaataagtgtgtgtgagacacttgcgtttgaagaaagatctagggtcctgggtctcttgcatttatatgtcagaaaaggggcgatatgctgctgaggggtgagtgcatatgagtgtggccctgaggaccagggctggcagatgttgtctacctgctgaagaataaagatttcttttggtaa

SEQ ID NO: 445593 - DNA, 3130 bp, Homo sapiens
tgtattttttgatttttaagtatatatatattttatatggaaacagtatatactagcacatagtaacaatatatatcagcgaagaaaggaatacaccagaaagttaagcatgcttatttctgagtggtgaaatgatagaaaatgtgtaatcagattttttaaaatgcctaaagacaaaagttcccaaggagtacctaagatcaagcaagtcttcttgctggggcctcattatcttactatcttccctgattgggtatgagtatcaccctgttctgcagggttaccaggttcgagcctgtgttcaaggtggtctgaaatgttacacaaacccacagcccttctcccttttccagccacctaatgatccccatggtatccagagagaagacctcatcctgagtcttcgcgctgtgctggcttctacaccacgatttgctgagtttctgctgcccctgttgattgagaaagtggattctgaggttctgagtgccaagttggattctctacagactctgaatgcttgctgtgctgtgtatggacagaaggaactgaaggacttcctccccagcctttgggcttctatccgcagagaggtgttccagacggcaagtgagcgggtggaggcagagggcctggcggccctccactccctgactgcgtgtttgtctcgctctgtgctgagggctgatgctgaggacctccttgactccttccttagcaacattctacaggactgcaggcaccacctgtgtgaaccggacatgaaactggtgtggcctagtgccaagctgttgcaggcagctgcaggtgcatctgcccgggcctgtgactctgtcaccagcaatgtactgcctttactgctggaacagttccacaagcacagtcagagcagccagcggcggacaatccttgaaatgctcctgggtttcttgaagctgcagcagaaatggagctatgaagacaaagatcaaaggcctctgaatggcttcaaggaccagctgtgctcactggtattcatggctctaacagaccccagcacccagcttcagcttgttggcatccgtacactgacagtcttgggtgcccagccagatctcctatcttatgaggacttggagctggcagtgggtcacctgtacagactgagcttcctgaaggaggattcccagagttgcagggtggcagcactggaagcatcaggaaccctggctgctctctaccctgtggccttcagcagccacctcgtacccaagctcgctgaggagctgcgtgtaggggagtcaaatttgactaacggagatgagcccacccaatgctcccggcatctgtgctgtctgcaagccttgtcagctgtatcaacacatcccagcatcgtcaaggagacactgcctctgctgctgcagcatctctggcaagtgaacagagggaatatggttgcacaatccagtgacgttattgctgtctgtcagagcctcagacagatggcagaaaaatgtcagcaggaccctgagagttgctggtatttccaccagacagctataccttgcctgcttgccttggctgtgcaggcctctatgccagagaaggagccctcagttctgagaaaagtactattggaggatgaggtgttggctgccatggtgtctgtcattggcactgctacaacccacctgagccctgagttagctgcccagagtgtgacacacattgtgcccctcttcttggatggcaacgtgtcctttctgcctgaaaacagcttcccgagcagattccagccattccaggatggctcctcagggcagaggcggctgattgcactgcttatggcctttgtctgctccctgcctcgaaatgtggaaatccctcagctgaaccaactcatgcgggagcttttggaactgagctgctgccacagctgccccttttcttccaccgctgctgccaagtgctttgcaggactcctcaacaagcaccctgcagggcagcagctggatgaattcctacagctagctgtggacaaagtggaggctggcctgggctctgggccctgtcgtagtcaggccttcactcttcttctctgggtaacaaaggccctagtgctcagataccatcctctcagctcctgccttacagcccggctcatgggcctcctgagtgacccagaattaggtccagcagcagctgatggcttctctctgctcatgtctgactgcactgatgtgctgactcgtgctggccatgccgaagtgcggatcatgttccgccagcggttcttcacagataatgtgcctgctttggtccagggcttccatgctgctccccaagatgtgaagccaaactacttgaagggtctttctcatgtacttaacaggctgcccaagcctgtactcttgccagagctgcccacgcttctttccttgctgctggaggccctgtcctgccctgactgtgtggtgcagctctccaccctcagctgccttcagcctcttctactggaagcaccccaagtcatgagtcttcacgtggacaccctcgtcaccaagtttctgaacctcagctctagcccttccatggctgtccggatcgccgcactgcagtgcatgcatgctctcactcgcctgcccacccctgtgctgctgccgtacaaaccacaggtgattcgggccttagccaaacccctggatgacaagaagagactggtgcgcaaggaagcagtgtcagccagaggggagtggtttctgttggggagccctggcagctgagccctcagtcctggcctagactgttctgacaatctaacctgggattactaactgttgagccatcttccccaaagcagggaaaccactggtctctgactgcctttcccacagacacagcacaaatgctaggcctctgttgcatggctgtacaaagaacataagagtccatatttctagtggatttgtaaaataagtgtgtgtgagacacttgcgtttgaagaaagatctagggtcctgggtctcttgcatttatatgtcagaaaaggggcgatatgctgctgaggggtgagtgcatatgagtgtggccctgaggaccagggctggcagatgttgtctacctgctgaagaataaagatttcttttggtaa

SEQ ID NO: 445594 - DNA, 2807 bp, Homo sapiens
tatctgagtacgaggccggtgtgaattaggccacctaatgatccccatggtatccagagagaagacctcatcctgagtcttcgcgctgtgctggcttctacaccacgatttgctgagtttctgctgcccctgttgattgagaaagtggattctgaggttctgagtgccaagttggattctctacagactctgaatgcttgctgtgctgtgtatggacagaaggaactgaaggacttcctccccagcctttgggcttctatccgcagagaggtgttccagacggcaagtgagcgggtggaggcagagggcctggcggccctccactccctgactgcgtgtttgtctcgctctgtgctgagggctgatgctgaggacctccttgactccttccttagcaacattctacaggactgcaggcaccacctgtgtgaaccggacatgaaactggtgtggcctagtgccaagctgttgcaggcagctgcaggtgcatctgcccgggcctgtgactctgtcaccagcaatgtactgcctttactgctggaacagttccacaagcacagtcagagcagccagcggcggacaatccttgaaatgctcctgggtttcttgaagctgcagcagaaatggagctatgaagacaaagatcaaaggcctctgaatggcttcaaggaccagctgtgctcactggtattcatggctctaacagaccccagcacccagcttcagcttgttggcatccgtacactgacagtcttgggtgcccagccagatctcctatcttatgaggacttggagctggcagtgggtcacctgtacagactgagcttcctgaaggaggattcccagagttgcagggtggcagcactggaagcatcaggaaccctggctgctctctaccctgtggccttcagcagccacctcgtacccaagctcgctgaggagctgcgtgtaggggagtcaaatttgactaacggagatgagcccacccaatgctcccggcatctgtgctgtctgcaagccttgtcagctgtatcaacacatcccagcatcgtcaaggagacactgcctctgctgctgcagcatctctggcaagtgaacagagggaatatggttgcacaatccagtgacgttattgctgtctgtcagagcctcagacagatggcagaaaaatgtcagcaggaccctgagagttgctggtatttccaccagacagctataccttgcctgcttgccttggctgtgcaggcctctatgccagagaaggagccctcagttctgagaaaagtactattggaggatgaggtgttggctgccatggtgtctgtcattggcactgctacaacccacctgagccctgagttagctgcccagagtgtgacacacattgtgcccctcttcttggatggcaacgtgtcctttctgcctgaaaacagcttcccgagcagattccagccattccaggatggctcctcagggcagaggcggctgattgcactgcttatggcctttgtctgctccctgcctcgaaatgtggaaatccctcagctgaaccaactcatgcgggagcttttggaactgagctgctgccacagctgccccttttcttccaccgctgctgccaagtgctttgcaggactcctcaacaagcaccctgcagggcagcagctggatgaattcctacagctagctgtggacaaagtggaggctggcctgggctctgggccctgtcgtagtcaggccttcactcttcttctctgggtaacaaaggccctagtgctcagataccatcctctcagctcctgccttacagcccggctcatgggcctcctgagtgacccagaattaggtccagcagcagctgatggcttctctctgctcatgtctgactgcactgatgtgctgactcgtgctggccatgccgaagtgcggatcatgttccgccagcggttcttcacagataatgtgcctgctttggtccagggcttccatgctgctccccaagatgtgaagccaaactacttgaagggtctttctcatgtacttaacaggctgcccaagcctgtactcttgccagagctgcccacgcttctttccttgctgctggaggccctgtcctgccctgactgtgtggtgcagctctccaccctcagctgccttcagcctcttctactggaagcaccccaagtcatgagtcttcacgtggacaccctcgtcaccaagtttctgaacctcagctctagcccttccatggctgtccggatcgccgcactgcagtgcatgcatgctctcactcgcctgcccacccctgtgctgctgccgtacaaaccacaggtgattcgggccttagccaaacccctggatgacaagaagagactggtgcgcaaggaagcagtgtcagccagaggggagtggtttctgttggggagccctggcagctgagccctcagtcctggcctagactgttctgacaatctaacctgggattactaactgttgagccatcttccccaaagcagggaaaccactggtctctgactgcctttcccacagacacagcacaaatgctaggcctctgttgcatggctgtacaaagaacataagagtccatatttctagtggatttgtaaaataagtgtgtgtgagacacttgcgtttgaagaaagatctagggtcctgggtctcttgcatttatatgtcagaaaaggggcgatatgctgctgaggggtgagtgcatatgagtgtggccctgaggaccagggctggcagatgttgtctacctgctgaagaataaagatttcttttggtaa

SEQ ID NO: 445595 - DNA, 2881 bp, Homo sapiens
cctgtttttgaggtagtggggctctggtcactgcttggcaggaaggttagcttacattcatagctcctgacttgagtacagctccttgatgtagtacctgcttttagggactgatggcaaggacagggttgaccttgatgtgactgacacaccacccatctcaggcttaagatcttccttctgtcccacagtttctgctgcccctgttgattgagaaagtggattctgaggttctgagtgccaagttggattctctacagactctgaatgcttgctgtgctgtgtatggacagaaggaactgaaggacttcctccccagcctttgggcttctatccgcagagaggtgttccagacggcaagtgagcgggtggaggcagagggcctggcggccctccactccctgactgcgtgtttgtctcgctctgtgctgagggctgatgctgaggacctccttgactccttccttagcaacattctacaggactgcaggcaccacctgtgtgaaccggacatgaaactggtgtggcctagtgccaagctgttgcaggcagctgcaggtgcatctgcccgggcctgtgactctgtcaccagcaatgtactgcctttactgctggaacagttccacaagcacagtcagagcagccagcggcggacaatccttgaaatgctcctgggtttcttgaagctgcagcagaaatggagctatgaagacaaagatcaaaggcctctgaatggcttcaaggaccagctgtgctcactggtattcatggctctaacagaccccagcacccagcttcagcttgttggcatccgtacactgacagtcttgggtgcccagccagatctcctatcttatgaggacttggagctggcagtgggtcacctgtacagactgagcttcctgaaggaggattcccagagttgcagggtggcagcactggaagcatcaggaaccctggctgctctctaccctgtggccttcagcagccacctcgtacccaagctcgctgaggagctgcgtgtaggggagtcaaatttgactaacggagatgagcccacccaatgctcccggcatctgtgctgtctgcaagccttgtcagctgtatcaacacatcccagcatcgtcaaggagacactgcctctgctgctgcagcatctctggcaagtgaacagagggaatatggttgcacaatccagtgacgttattgctgtctgtcagagcctcagacagatggcagaaaaatgtcagcaggaccctgagagttgctggtatttccaccagacagctataccttgcctgcttgccttggctgtgcaggcctctatgccagagaaggagccctcagttctgagaaaagtactattggaggatgaggtgttggctgccatggtgtctgtcattggcactgctacaacccacctgagccctgagttagctgcccagagtgtgacacacattgtgcccctcttcttggatggcaacgtgtcctttctgcctgaaaacagcttcccgagcagattccagccattccaggatggctcctcagggcagaggcggctgattgcactgcttatggcctttgtctgctccctgcctcgaaatgtggaaatccctcagctgaaccaactcatgcgggagcttttggaactgagctgctgccacagctgccccttttcttccaccgctgctgccaagtgctttgcaggactcctcaacaagcaccctgcagggcagcagctggatgaattcctacagctagctgtggacaaagtggaggctggcctgggctctgggccctgtcgtagtcaggccttcactcttcttctctgggtaacaaaggccctagtgctcagataccatcctctcagctcctgccttacagcccggctcatgggcctcctgagtgacccagaattaggtccagcagcagctgatggcttctctctgctcatgtctgactgcactgatgtgctgactcgtgctggccatgccgaagtgcggatcatgttccgccagcggttcttcacagataatgtgcctgctttggtccagggcttccatgctgctccccaagatgtgaagccaaactacttgaagggtctttctcatgtacttaacaggctgcccaagcctgtactcttgccagagctgcccacgcttctttccttgctgctggaggccctgtcctgccctgactgtgtggtgcagctctccaccctcagctgccttcagcctcttctactggaagcaccccaagtcatgagtcttcacgtggacaccctcgtcaccaagtttctgaacctcagctctagcccttccatggctgtccggatcgccgcactgcagtgcatgcatgctctcactcgcctgcccacccctgtgctgctgccgtacaaaccacaggtgattcgggccttagccaaacccctggatgacaagaagagactggtgcgcaaggaagcagtgtcagccagaggggagtggtttctgttggggagccctggcagctgagccctcagtcctggcctagactgttctgacaatctaacctgggattactaactgttgagccatcttccccaaagcagggaaaccactggtctctgactgcctttcccacagacacagcacaaatgctaggcctctgttgcatggctgtacaaagaacataagagtccatatttctagtggatttgtaaaataagtgtgtgtgagacacttgcgtttgaagaaagatctagggtcctgggtctcttgcatttatatgtcagaaaaggggcgatatgctgctgaggggtgagtgcatatgagtgtggccctgaggaccagggctggcagatgttgtctacctgctgaagaataaagatttcttttggtaa

SEQ ID NO: 445596 - DNA, 3432 bp, Homo sapiens
ttgctacgtctaggcccgcgtggtttatcggccttcgcgttatggccgctgccgcggctgtggaggcggcggcgcctatgggtgccctatggggcctcgtgcacgacttcgtcgtgggtcagcaagagggccccgctgaccaggtggctgcaggtcctctctagagaatccagaaccccgaactcgggcacgaggaatccagcttttgtcacaggtgctactccactgtcacaccttgctcctggagaaggaagtggtacacctgatactgttctatgagaaccggctgaaggaccatcatcttgtgatcccatctgtcctgcagggtttgaaggcacttagcctgtgtgtggccctgcccccagggctggctgtttctgtgcttaaagccatcttccaggaagtgcatgtacagtccctgccacaggtggaccgacacacagtctacaatatcatcaccaattttatgcgaacccgggaagaagagctaaagagcctaggagctgacttcacctttggcttcatccaggtgatggatggggaaaaggatccccgtaatcttctggtggccttccgcatcgtccatgacctcatctccagggactatagcctgggaccctttgtggaggagttgtttgaagtgacatcctgttatttccctatcgattttacccctccacctaatgatccccatggtatccagagagaagacctcatcctgagtcttcgcgctgtgctggcttctacaccacgatttgctgagtttctgctgcccctgttgattgagaaagtggattctgaggttctgagtgccaagttggattctctacagactctgaatgcttgctgtgctgtgtatggacagaaggaactgaaggacttcctccccagcctttgggcttctatccgcagagaggtgttccagacggcaagtgagcgggtggaggcagagggcctggcggccctccactccctgactgcgtgtttgtctcgctctgtgctgagggctgatgctgaggacctccttgactccttccttagcaacattctacaggactgcaggcaccacctgtgtgaaccggacatgaaactggtgtggcctagtgccaagctgttgcaggcagctgcaggtgcatctgcccgggcctgtgactctgtcaccagcaatgtactgcctttactgctggaacagttccacaagcacagtcagagcagccagcggcggacaatccttgaaatgctcctgggtttcttgaagctgcagcagaaatggagctatgaagacaaagatcaaaggcctctgaatggcttcaaggaccagctgtgctcactggtattcatggctctaacagaccccagcacccagcttcagcttgttggcatccgtacactgacagtcttgggtgcccagccagatctcctatcttatgaggacttggagctggcagtgggtcacctgtacagactgagcttcctgaaggaggattcccagagttgcagggtggcagcactggaagcatcaggaaccctggctgctctctaccctgtggccttcagcagccacctcgtacccaagctcgctgaggagctgcgtgtaggggagtcaaatttgactaacggagatgagcccacccaatgctcccggcatctgtgctgtctgcaagccttgtcagctgtatcaacacatcccagcatcgtcaaggagacactgcctctgctgctgcagcatctctggcaagtgaacagagggaatatggttgcacaatccagtgacgttattgctgtctgtcagagcctcagacagatggcagaaaaatgtcagcaggaccctgagagttgctggtatttccaccagacagctataccttgcctgcttgccttggctgtgcaggcctctatgccagagaaggagccctcagttctgagaaaagtactattggaggatgaggtgttggctgccatggtgtctgtcattggcactgctacaacccacctgagccctgagttagctgcccagagtgtgacacacattgtgcccctcttcttggatggcaacgtgtcctttctgcctgaaaacagcttcccgagcagattccagccattccaggatggctcctcagggcagaggcggctgattgcactgcttatggcctttgtctgctccctgcctcgaaatgtggaaatccctcagctgaaccaactcatgcgggagcttttggaactgagctgctgccacagctgccccttttcttccaccgctgctgccaagtgctttgcaggactcctcaacaagcaccctgcagggcagcagctggatgaattcctacagctagctgtggacaaagtggaggctggcctgggctctgggccctgtcgtagtcaggccttcactcttcttctctgggtaacaaaggccctagtgctcagataccatcctctcagctcctgccttacagcccggctcatgggcctcctgagtgacccagaattaggtccagcagcagctgatggcttctctctgctcatgtctgactgcactgatgtgctgactcgtgctggccatgccgaagtgcggatcatgttccgccagcggttcttcacagataatgtgcctgctttggtccagggcttccatgctgctccccaagatgtgaagccaaactacttgaagggtctttctcatgtacttaacaggctgcccaagcctgtactcttgccagagctgcccacggccctgtcctgccctgactgtgtggtgcagctctccaccctcagctgccttcagcctcttctactggaagcaccccaagtcatgagtcttcacgtggacaccctcgtcaccaagtttctgaacctcagctctagcccttccatggctgtccggatcgccgcactgcagtgcatgcatgctctcactcgcctgcccacccctgtgctgctgccgtacaaaccacaggtgattcgggccttagccaaacccctggatgacaagaagagactggtgcgcaaggaagcagtgtcagccagaggggagtggtttctgttggggagccctggcagctgagccctcagtcctggcctagactgttctgacaatctaacctgggattactaactgttgagccatcttccccaaagcagggaaaccactggtctctgactgcctttcccacagacacagcacaaatgctaggcctctgttgcatggctgtacaaagaacataagagtccatatttctagtggatttgtaaaataagtgtgtgtgagacacttgcgtttgaagaaagatctagggtcctgggtctcttgcatttatatgtcagaaaaggggcgatatgctgctgaggggtgagtgcatatgagtgtggccctgaggaccagggctggcagatgttgtctacctgctgaagaataaagatttcttttggtaa

SEQ ID NO: 445597 - DNA, 3658 bp, Homo sapiens
ttgctacgtctaggcccgcgtggtttatcggccttcgcgttatggccgctgccgcggctgtggaggcggcggcgcctatgggtgccctatggggcctcgtgcacgacttcgtcgtgggtcagcaagagggccccgctgaccaggtggctgcaggtcctctctagagaatccagaaccccgaactcgggcacgaggaatccagcttttgtcacaggtgctactccactgtcacaccttgctcctggagaaggaagtggtacacctgatactgttctatgagaaccggctgaaggaccatcatcttgtgatcccatctgtcctgcagggtttgaaggcacttagcctgtgtgtggccctgcccccagggctggctgtttctgtgcttaaagccatcttccaggaagtgcatgtacagtccctgccacaggtggaccgacacacagtctacaatatcatcaccaattttatgcgaacccgggaagaagagctaaagagcctaggagctgacttcacctttggcttcatccaggtgatggatggggaaaaggatccccgtaatcttctggtggccttccgcatcgtccatgacctcatctccagggactatagcctgggaccctttgtggaggagttgtttgaagtgacatcctgttatttccctatcgattttacccctccacctaatgatccccatggtatccagagagaagacctcatcctgagtcttcgcgctgtgctggcttctacaccacgatttgctgagtttctgctgcccctgttgattgagaaagtggattctgaggttctgagtgccaagttggattctctacagactctgaatgcttgctgtgctgtgtatggacagaaggaactgaaggacttcctccccagcctttgggcttctatccgcagagaggtgttccagacggcaagtgagcgggtggaggcagagggcctggcggccctccactccctgactgcgtgtttgtctcgctctgtgctgagggctgatgctgaggacctccttgactccttccttagcaacattctacaggactgcaggcaccacctgtgtgaaccggacatgaaactggtgtggcctagtgccaagctgttgcaggcagctgcaggtgcatctgcccgggcctgtgactctgtcaccagcaatgtactgcctttactgctggaacagttccacaagcacagtcagagcagccagcggcggacaatccttgaaatgctcctgggtttcttgaagctgcagcagaaatggagctatgaagacaaagatcaaaggcctctgaatggcttcaaggaccagctgtgctcactggtattcatggctctaacagaccccagcacccagcttcagcttgttggcatccgtacactgacagtcttgggtgcccagccagatctcctatcttatgaggacttggagctggcagtgggtcacctgtacagactgagcttcctgaaggaggattcccagagttgcagggtggcagcactggaagcatcaggaaccctggctgctctctaccctgtggccttcagcagccacctcgtacccaagctcgctgaggagctgcgtgtaggggagtcaaatttgactaacggagatgagcccacccaatgctcccggcatctgtgctgtctgcaagccttgtcagctgtatcaacacatcccagcatcgtcaaggagacactgcctctgctgctgcagcatctctggcaagtgaacagagggaatatggttgcacaatccagtgacgttattgctgtctgtcagagcctcagacagatggcagaaaaatgtcagcaggaccctgagagttgctggtatttccaccagacagctataccttgcctgcttgccttggctgtgcaggcctctatgccagagaaggagccctcagttctgagaaaagtactattggaggatgaggtgttggctgccatggtgtctgtcattggcactgctacaacccacctgagccctgagttagctgcccagagtgtgacacacattgtgcccctcttcttggatggcaacgtgtcctttctgcctgaaaacagcttcccgagcagattccagccattccaggatggctcctcagggcagaggcggctgattgcactgcttatggcctttgtctgctccctgcctcgaaatgtaagtgagcacatttgggaagtactgttatttaaccttgacaaggtgactccgggctgaaatttgccacaggctaagctgatcttttacttcccccaccagagaagttagttctcatccgtcccggtccctgctgccactatgtactggttctcttggagttcaagtgttctctgggtccattacatggccaggttttctgtaggtggaaatccctcagctgaaccaactcatgcgggagcttttggaactgagctgctgccacagctgccccttttcttccaccgctgctgccaagtgctttgcaggactcctcaacaagcaccctgcagggcagcagctggatgaattcctacagctagctgtggacaaagtggaggctggcctgggctctgggccctgtcgtagtcaggccttcactcttcttctctgggtaacaaaggccctagtgctcagataccatcctctcagctcctgccttacagcccggctcatgggcctcctgagtgacccagaattaggtccagcagcagctgatggcttctctctgctcatgtctgactgcactgatgtgctgactcgtgctggccatgccgaagtgcggatcatgttccgccagcggttcttcacagataatgtgcctgctttggtccagggcttccatgctgctccccaagatgtgaagccaaactacttgaagggtctttctcatgtacttaacaggctgcccaagcctgtactcttgccagagctgcccacgcttctttccttgctgctggaggccctgtcctgccctgactgtgtggtgcagctctccaccctcagctgccttcagcctcttctactggaagcaccccaagtcatgagtcttcacgtggacaccctcgtcaccaagtttctgaacctcagctctagcccttccatggctgtccggatcgccgcactgcagtgcatgcatgctctcactcgcctgcccacccctgtgctgctgccgtacaaaccacaggtgattcgggccttagccaaacccctggatgacaagaagagactggtgcgcaaggaagcagtgtcagccagaggggagtggtttctgttggggagccctggcagctgagccctcagtcctggcctagactgttctgacaatctaacctgggattactaactgttgagccatcttccccaaagcagggaaaccactggtctctgactgcctttcccacagacacagcacaaatgctaggcctctgttgcatggctgtacaaagaacataagagtccatatttctagtggatttgtaaaataagtgtgtgtgagacacttgcgtttgaagaaagatctagggtcctgggtctcttgcatttatatgtcagaaaaggggcgatatgctgctgaggggtgagtgcatatgagtgtggccctgaggaccagggctggcagatgttgtctacctgctgaagaataaagatttcttttggtaa

SEQ ID NO: 445598 - DNA, 3473 bp, Homo sapiens
ttgctacgtctaggcccgcgtggtttatcggccttcgcgttatggccgctgccgcggctgtggaggcggcggcgcctatgggtgccctatggggcctcgtgcacgacttcgtcgtgggtcagcaagagggccccgctgaccaggtggctgcaggtcctctctagagaatccagaaccccgaactcgggcacgaggaatccagcttttgtcacaggtgctactccactgtcacaccttgctcctggagaaggaagtggtacacctgatactgttctatgagaaccggctgaaggaccatcatcttgtgatcccatctgtcctgcagggtttgaaggcacttagcctgtgtgtggccctgcccccagggctggctgtttctgtgcttaaagccatcttccaggaagtgcatgtacagtccctgccacaggtggaccgacacacagtctacaatatcatcaccaattttatgcgaacccgggaagaagagctaaagagcctaggagctgacttcacctttggcttcatccaggtgatggatggggaaaaggatccccgtaatcttctggtggccttccgcatcgtccatgacctcatctccagggactatagcctgggaccctttgtggaggagttgtttgaagtgacatcctgttatttccctatcgattttacccctccacctaatgatccccatggtatccagagagaagacctcatcctgagtcttcgcgctgtgctggcttctacaccacgatttgctgagtttctgctgcccctgttgattgagaaagtggattctgaggttctgagtgccaagttggattctctacagactctgaatgcttgctgtgctgtgtatggacagaaggaactgaaggacttcctccccagcctttgggcttctatccgcagagaggtgttccagacggcaagtgagcgggtggaggcagagggcctggcggccctccactccctgactgcgtgtttgtctcgctctgtgctgagggctgatgctgaggacctccttgactccttccttagcaacattctacaggactgcaggcaccacctgtgtgaaccggacatgaaactggtgtggcctagtgccaagctgttgcaggcagctgcaggtgcatctgcccgggcctgtgactctgtcaccagcaatgtactgcctttactgctggaacagttccacaagcacagtcagtaccccttgaaacgttacagagcagccagcggcggacaatccttgaaatgctcctgggtttcttgaagctgcagcagaaatggagctatgaagacaaagatcaaaggcctctgaatggcttcaaggaccagctgtgctcactggtattcatggctctaacagaccccagcacccagcttcagcttgttggcatccgtacactgacagtcttgggtgcccagccagatctcctatcttatgaggacttggagctggcagtgggtcacctgtacagactgagcttcctgaaggaggattcccagagttgcagggtggcagcactggaagcatcaggaaccctggctgctctctaccctgtggccttcagcagccacctcgtacccaagctcgctgaggagctgcgtgtaggggagtcaaatttgactaacggagatgagcccacccaatgctcccggcatctgtgctgtctgcaagccttgtcagctgtatcaacacatcccagcatcgtcaaggagacactgcctctgctgctgcagcatctctggcaagtgaacagagggaatatggttgcacaatccagtgacgttattgctgtctgtcagagcctcagacagatggcagaaaaatgtcagcaggaccctgagagttgctggtatttccaccagacagctataccttgcctgcttgccttggctgtgcaggcctctatgccagagaaggagccctcagttctgagaaaagtactattggaggatgaggtgttggctgccatggtgtctgtcattggcactgctacaacccacctgagccctgagttagctgcccagagtgtgacacacattgtgcccctcttcttggatggcaacgtgtcctttctgcctgaaaacagcttcccgagcagattccagccattccaggatggctcctcagggcagaggcggctgattgcactgcttatggcctttgtctgctccctgcctcgaaatgtggaaatccctcagctgaaccaactcatgcgggagcttttggaactgagctgctgccacagctgccccttttcttccaccgctgctgccaagtgctttgcaggactcctcaacaagcaccctgcagggcagcagctggatgaattcctacagctagctgtggacaaagtggaggctggcctgggctctgggccctgtcgtagtcaggccttcactcttcttctctgggtaacaaaggccctagtgctcagataccatcctctcagctcctgccttacagcccggctcatgggcctcctgagtgacccagaattaggtccagcagcagctgatggcttctctctgctcatgtctgactgcactgatgtgctgactcgtgctggccatgccgaagtgcggatcatgttccgccagcggttcttcacagataatgtgcctgctttggtccagggcttccatgctgctccccaagatgtgaagccaaactacttgaagggtctttctcatgtacttaacaggctgcccaagcctgtactcttgccagagctgcccacgcttctttccttgctgctggaggccctgtcctgccctgactgtgtggtgcagctctccaccctcagctgccttcagcctcttctactggaagcaccccaagtcatgagtcttcacgtggacaccctcgtcaccaagtttctgaacctcagctctagcccttccatggctgtccggatcgccgcactgcagtgcatgcatgctctcactcgcctgcccacccctgtgctgctgccgtacaaaccacaggtgattcgggccttagccaaacccctggatgacaagaagagactggtgcgcaaggaagcagtgtcagccagaggggagtggtttctgttggggagccctggcagctgagccctcagtcctggcctagactgttctgacaatctaacctgggattactaactgttgagccatcttccccaaagcagggaaaccactggtctctgactgcctttcccacagacacagcacaaatgctaggcctctgttgcatggctgtacaaagaacataagagtccatatttctagtggatttgtaaaataagtgtgtgtgagacacttgcgtttgaagaaagatctagggtcctgggtctcttgcatttatatgtcagaaaaggggcgatatgctgctgaggggtgagtgcatatgagtgtggccctgaggaccagggctggcagatgttgtctacctgctgaagaataaagatttcttttggtaa

SEQ ID NO: 445599 - DNA, 3594 bp, Homo sapiens
ttgctacgtctaggcccgcgtggtttatcggccttcgcgttatggccgctgccgcggctgtggaggcggcggcgcctatgggtgccctatggggcctcgtgcacgacttcgtcgtgggtcagcaagagggccccgctgaccaggtggctgcaggtcctctctagagaatccagaaccccgaactcgggcacgaggaatccagcttttgtcacaggtgctactccactgtcacaccttgctcctggagaaggaagtggtacacctgatactgttctatgagaaccggctgaaggaccatcatcttgtgatcccatctgtcctgcagggtttgaaggcacttagcctgtgtgtggccctgcccccagggctggctgtttctgtgcttaaagccatcttccaggaagtgcatgtacagtccctgccacaggtggaccgacacacagtctacaatatcatcaccaattttatgcgaacccgggaagaagagctaaagagcctaggagctgacttcacctttggcttcatccaggtgatggatggggaaaaggatccccgtaatcttctggtggccttccgcatcgtccatgacctcatctccagggactatagcctgggaccctttgtggaggagttgtttgaagtgacatcctgttatttccctatcgattttacccctccacctaatgatccccatggtatccagagagaagacctcatcctgagtcttcgcgctgtgctggcttctacaccacgatttgctgagtttctgctgcccctgttgattgagaaagtggattctgaggttctgagtgccaagttggattctctacagactctgaatgcttgctgtgctgtgtatggacagaaggaactgaaggacttcctccccagcctttgggcttctatccgcagagaggtgttccagacggcaagtgagcgggtggaggcagagggcctggcggccctccactccctgactgcgtgtttgtctcgctctgtgctgagggctgatgctgaggacctccttgactccttccttagcaacattctacaggactgcaggcaccacctgtgtgaaccggacatgaaactggtgtggcctagtgccaagctgttgcaggcagctgcaggtgcatctgcccgggcctgtgactctgtcaccagcaatgtactgcctttactgctggaacagttccacaagcacagtcagagcagccagcggcggacaatccttgaaatgctcctgggtttcttgaagctgcagcagaaatggagctatgaagacaaagatcaaaggcctctgaatggcttcaaggaccagctgtgctcactggtattcatggctctaacagaccccagcacccagcttcagcttgttggcatccgtacactgacagtcttgggtgcccagccagatctcctatcttatgaggacttggagctggcagtgggtcacctgtacagactgagcttcctgaaggaggattcccagagttgcagggtggcagcactggaagcatcaggaaccctggctgctctctaccctgtggccttcagcagccacctcgtacccaagctcgctgaggagctgcgtgtaggggagtcaaatttgactaacggagatgagcccacccaatgctcccggcatctgtgctgtctgcaagccttgtcagctgtatcaacacatcccagcatcgtcaaggagacactgcctctgctgctgcagcatctctggcaagtgaacagagggaatatggttgcacaatccagtgacgttattgctgtctgtcagagcctcagacagatggcagaaaaatgtcagcaggaccctgagagttgctggtatttccaccagacagctataccttgcctgcttgccttggctgtgcaggcctctatgccagagaaggagccctcagttctgagaaaagtactattggaggatgaggtgttggctgccatggtgtctgtcattggcactgctacaacccacctgagccctgagttagctgcccagagtgtgacacacattgtgcccctcttcttggatggcaacgtgtcctttctgcctgaaaacagcttcccgagcagattccagccattccaggatggctcctcagggcagaggcggctgattgcactgcttatggcctttgtctgctccctgcctcgaaatgtggaaatccctcagctgaaccaactcatgcgggagcttttggaactgagctgctgccacagctgccccttttcttccaccgctgctgccaagtgctttgcaggactcctcaacaagcaccctgcagggcagcagctggatgaattcctacagctagctgtggacaaagtggaggctggcctgggctctgggccctgtcgtagtcaggccttcactcttcttctctgggtaacaaaggccctagtgctcagataccatcctctcagctcctgccttacagcccggctcatgggcctcctgagtgacccagaattaggtccagcagcagctgatggcttctctctgctcatgtctgactgcactgatgtgctgactcgtgctggccatgccgaagtgcggatcatgttccgccagcggttcttcacagataatgtgcctgctttggtccagggcttccatgctgctccccaagatgtgaagccaaactacttgaagggtctttctcatgtacttaacaggctgcccaagcctgtactcttgccagagctgcccacgcttctttccttgctgctggaggccctgtcctgccctgactgtgtggtgcagctctccaccctcagctgccttcagcctcttctactggaagcaccccaagtcatgagtcttcacgtggacaccctcgtcaccaagtttctgaacctcagctctagcccttccatggctgtccggatcgccgcactgcagtgcatgcatgctctcactcgcctgcccacccctgtgctgctgccgtacaaaccacaggtgattcgggccttagccaaacccctggatgacaagaagagactggtgcgcaaggaagcagtgtcagccagaggggagtggtttctgttggggagccctggcagctgagccctcagtcctggcctagactgttctgacaatctaacctgggattactaactgttgagccatcttccccaaagcagggaaaccactggtctctgactgcctttcccacagacacagcacaaatgctaggcctctgttgcatggctgtacaaagaacataagagtccatatttctagtggatttgtaaaataagtgtgtgtgagacacttgcgtttgaagaaagatctagggtcctgggtctcttgcatttatatgtcagaaaaggggcgatatgctgctgaggggtgagtgcatatgagtgtggccctgaggaccagggctggcagatgttgtctacctgctgaagaataaagatttcttttggtaatggggctgtcagatatttcccccaccccacatatgcctcatataaccagaggcatcactggaataacaatgacagggattggccaaaaatttttcagggtaaccaggacagtagcacatgcctgtaaccccaacacttcag

SEQ ID NO: 445600 - DNA, 3028 bp, Homo sapiens
ttgctacgtctaggcccgcgtggtttatcggccttcgcgttatggccgctgccgcggctgtggaggcggcggcgcctatgggtgccctatggggcctcgtgcacgacttcgtcgtgggtcagcaagagggccccgctgaccaggtggctgcaggtcctctctagagaatccagaaccccgaactcgggcacgaggaatccagcttttgtcacaggtgctactccactgtcacaccttgctcctggagaaggaagtggtacacctgatactgttctatgagaaccggctgaaggaccatcatcttgtgatcccatctgtcctgcagggtttgaaggcacttagcctgtgtgtggccctgcccccagggctggctgtttctgtgcttaaagccatcttccaggaagtgcatgtacagtccctgccacaggtggaccgacacacagtctacaatatcatcaccaattttatgcgaacccgggaagaagagctaaagagcctaggagctgacttcacctttggcttcatccaggtgatggatggggaaaaggatccccgtaatcttctggtggccttccgcatcgtccatgacctcatctccagggactatagcctgggaccctttgtggaggagttgtttgaagtgacatcctgttatttccctatcgattttacccctccacctaatgatccccatggtatccagagagaagacctcatcctgagtcttcgcgctgtgctggcttctacaccacgatttgctgagtttctgctgcccctgttgattgagaaagtggattctgaggttctgagtgccaagttggattctctacagactctgaatgcttgctgtgctgtgtatggacagaaggaactgaaggacttcctccccagcctttgggcttctatccgcagagaggtgttccagacggcaagtgagcgggtggaggcagagggcctggcggccctccactccctgactgcgtgtttgtctcgctctgtgctgagggctgatgctgaggacctccttgactccttccttagcaacattctacaggactgcaggcaccacctgtgtgaaccggacatgaaactggtgtggcctagtgccaagctgttgcaggcagctgcaggtgcatctgcccgggcctgtgactctgtcaccagcaatgtactgcctttactgctggaacagttccacaagcacagtcagagcagccagcggcggacaatccttgaaatgctcctgggtttcttgaagctgcagcagaaatggagctatgaagacaaagatcaaaggcctctgaatggcttcaaggaccagctgtgctcactggtattcatggctctaacagaccccagcacccagcttcagcttgttggcatccgtacactgacagtcttgggtgcccagccagatctcctatcttatgaggacttggagctggcagtgggtcacctgtacagactgagcttcctgaaggaggattcccagagttgcagggtggcagcactggaagcatcaggaaccctggctgctctctaccctgtggccttcagcagccacctcgtacccaagctcgctgaggagctgcgtgtaggggagtcaaatttgactaacggagatgagcccacccaatgctcccggcatctgtgctgtctgcaagccttgtcagctgtatcaacacatcccagcatcgtcaaggagacactgcctctgctgctgcagcatctctggcaagtgaacagagggaatatggttgcacaatccagtgacgttattgctgtctgtcagagcctcagacagatggcagaaaaatgtcagcaggaccctgagagttgctggtatttccaccagacagctataccttgcctgcttgccttggctgtgcaggcctctatgccagagaaggagccctcagttctgagaaaagtactattggaggatgaggtgttggctgccatggtgtctgtcattggcactgctacaacccacctgagccctgagttagctgcccagagtgtgacacacattgtgcccctcttcttggatggcaacgtgtcctttctgcctgaaaacagcttcccgagcagattccagccattccaggatggctcctcagggcagaggcggctgattgcactgcttatggcctttgtctgctccctgcctcgaaatgtggaaatccctcagctgaaccaactcatgcgggagcttttggaactgagctgctgccacagctgccccttttcttccaccgctgctgccaagtgctttgcaggactcctcaacaagcaccctgcagggcagcagctggatgaattcctacagctagctgtggacaaagtggaggctggcctgggctctgggccctgtcgtagtcaggccttcactcttcttctctgggtaacaaaggccctagtgctcagataccatcctctcagctcctgccttacagcccggctcatgggcctcctgagtgacccagaattaggtccagcagcagctgatggcttctctctgctcatgtctgactgcactgatgtgctgactcgtgctggccatgccgaagtgcggatcatgttccgccagcggttcttcacagataatgtgcctgctttggtccagggcttccatgctgctccccaagatgtgaagccaaactacttgaagggtctttctcatgtacttaacaggctgcccaagcctgtactcttgccagagctgcccacgcttctttccttgctgctggaggccctgtcctgccctgactgtgtggtgcagctctccaccctctgttgcatggctgtacaaagaacataagagtccatatttctagtggatttgtaaaataagtgtgtgtgagacacttgcgtttgaagaaagatctagggtcctgggtctcttgcatttatatgtcagaaaaggggcgatatgctgctgaggggtgagtgcatatgagtgtggccctgaggaccagggctggcagatgttgtctacctgctgaagaataaagatttcttttggtaa

SEQ ID NO: 445601 - DNA, 2157 bp, Homo sapiens
aaccagttggagagatgtaggactgctctcttcttaggctttaagaagccctgtccaactcagtggtgtaggtacttgagttctgctcttttagcaaggaggcgttgggagctcacactcctgaatctgcctaatatcagacgtaggcaagagagctgtgagcccaggctcagccaatgcttatctgctctgcgcctccagcagggtggcagcactggaagcatcaggaaccctggctgctctctaccctgtggccttcagcagccacctcgtacccaagctcgctgaggagctgcgtgtaggggagtcaaatttgactaacggagatgagcccacccaatgctcccggcatctgtgctgtctgcaagccttgtcagctgtatcaacacatcccagcatcgtcaaggagacactgcctctgctgctgcagcatctctggcaagtgaacagagggaatatggttgcacaatccagtgacgttattgctgtctgtcagagcctcagacagatggcagaaaaatgtcagcaggaccctgagagttgctggtatttccaccagacagctataccttgcctgcttgccttggctgtgcaggcctctatgccagagaaggagccctcagttctgagaaaagtactattggaggatgaggtgttggctgccatggtgtctgtcattggcactgctacaacccacctgagccctgagttagctgcccagagtgtgacacacattgtgcccctcttcttggatggcaacgtgtcctttctgcctgaaaacagcttcccgagcagattccagccattccaggatggctcctcagggcagaggcggctgattgcactgcttatggcctttgtctgctccctgcctcgaaatgtggaaatccctcagctgaaccaactcatgcgggagcttttggaactgagctgctgccacagctgccccttttcttccaccgctgctgccaagtgctttgcaggactcctcaacaagcaccctgcagggcagcagctggatgaattcctacagctagctgtggacaaagtggaggctggcctgggctctgggccctgtcgtagtcaggccttcactcttcttctctgggtaacaaaggccctagtgctcagataccatcctctcagctcctgccttacagcccggctcatgggcctcctgagtgacccagaattaggtccagcagcagctgatggcttctctctgctcatgtctgactgcactgatgtgctgactcgtgctggccatgccgaagtgcggatcatgttccgccagcggttcttcacagataatgtgcctgctttggtccagggcttccatgctgctccccaagatgtgaagccaaactacttgaagggtctttctcatgtacttaacaggctgcccaagcctgtactcttgccagagctgcccacgcttctttccttgctgctggaggccctgtcctgccctgactgtgtggtgcagctctccaccctcagctgccttcagcctcttctactggaagcaccccaagtcatgagtcttcacgtggacaccctcgtcaccaagtttctgaacctcagctctagcccttccatggctgtccggatcgccgcactgcagtgcatgcatgctctcactcgcctgcccacccctgtgctgctgccgtacaaaccacaggtgattcgggccttagccaaacccctggatgacaagaagagactggtgcgcaaggaagcagtgtcagccagaggggagtggtttctgttggggagccctggcagctgagccctcagtcctggcctagactgttctgacaatctaacctgggattactaactgttgagccatcttccccaaagcagggaaaccactggtctctgactgcctttcccacagacacagcacaaatgctaggcctctgttgcatggctgtacaaagaacataagagtccatatttctagtggatttgtaaaataagtgtgtgtgagacacttgcgtttgaagaaagatctagggtcctgggtctcttgcatttatatgtcagaaaaggggcgatatgctgctgaggggtgagtgcatatgagtgtggccctgaggaccagggctggcagatgttgtctacctgctgaagaataaagatttcttttggtaa

SEQ ID NO: 445602 - DNA, 2644 bp, Homo sapiens
ttgctacgtctaggcccgcgtggtttatcggccttcgcgttatggccgctgccgcggctgtggaggcggcggcgcctatgggtgccctatggggcctcgtgcacgacttcgtcgtgggtcagcaagagggccccgctgaccaggtggctgcaggtcctctctagagaatccagaaccccgaactcgggcacgaggaatccagcttttgtcacaggtgctactccactgtcacaccttgctcctggagaaggaagtggtacacctgatactgttctatgagaaccggctgaaggaccatcatcttgtgatcccatctgtcctgcagggtttgaaggcacttagcctgtgtgtggccctgcccccagggctggctgtttctgtgcttaaagccatcttccaggaagtgcatgtacagtccctgccacaggtggaccgacacacagtctacaatatcatcaccaattttatgcgaacccgggaagaagagctaaagagcctaggagctgacttcacctttggcttcatccaggtgatggatggggaaaaggatccccgtaatcttctggtggccttccgcatcgtccatgacctcatctccagggactatagcctgggaccctttgtggaggagttgtttgaagtgacatcctgttatttccctatcgattttacccctccacctaatgatccccatggtatccagagagaagacctcatcctgagtcttcgcgctgtgctggcttctacaccacgatttgctgagtttctgctgcccctgttgattgagaaagtggattctgaggttctgagtgccaagttggattctctacagactctgaatgcttgctgtgctgtgtatggacagaaggaactgaaggacttcctccccagcctttgggcttctatccgcagagaggtgttccagacggcaagtgagcgggtggaggcagagggcctggcggccctccactccctgactgcgtgtttgtctcgctctgtgctgagggctgatgctgaggacctccttgactccttccttagcaacattctacaggactgcaggcaccacctgtgtgaaccggacatgaaactggtgtggcctagtgccaagctgttgcaggcagctgcaggtgcatctgcccgggcctgtgactctgtcaccagcaatgtactgcctttactgctggaacagttccacaagcacagtcagagcagccagcggcggacaatccttgaaatgctcctgggtttcttgaagctgcagcagaaatggagctatgaagacaaagatcaaaggcctctgaatggcttcaaggaccagctgtgctcactggtattcatggctctaacagaccccagcacccagcttcagcttgttggcatccgtacactgacagtcttgggtgcccagccagatctcctatcttatgaggacttggagctggcagtgggtcacctgtacagactgagcttcctgaaggaggattcccagagttgcagggtggcagcactggaagcatcaggaaccctggctgctctctaccctgtggccttcagcagccacctcgtacccaagctcgctgaggagctgcgtgtaggggagtcaaatttgactaacggagatgagcccacccaatgctcccggcatctgtgctgtctgcaagccttgtcagctgtatcaacacatcccagcatcgtcaaggagacactgcctctgctgctgcagcatctctggcaagtgaacagagggaatatggttgcacaatccagtgacgttattgctgtctgtcagagcctcagacagatggcagaaaaatgtcagcaggaccctgagagttgctggtatttccaccagacagctataccttgcctgcttgccttggctgtgcaggcctctatgccagagaaggagccctcagttctgagaaaagtactattggaggatgaggtgttggctgccatggtgtctgtcattggcactgctacaacccacctgagccctgagttagctgcccagagtgtgacacacattgtgcccctcttcttggatggcaacgtgtcctttctgcctgaaaacagcttcccgagcagattccagccattccaggatggctcctcagggcagaggcggctgattgcactgcttatggcctttgtctgctccctgcctcgaaatgtggaaatccctcagctgaaccaactcatgcgggagcttttggaactgagctgctgccacagctgccccttttcttccaccgctgctgccaagtgctttgcaggactcctcaacaagcaccctgcagggcagcagctggatgaattcctacagctagctgtggacaaagtggaggctggcctgggctctgggccctgtcgtagtcaggccttcactcttcttctctgggtaacaaaggccctagtgctcagataccatcctctcagctcctgccttacagcccggctcatgggcctcctgagtgacccagaattaggtccagcagcagctgatggcttctctctgctcatgtctgactgcactgatgtgctgactcgtgctggccatgccgaagtgcggatcatgttccgccagcggttcttcacagatgttgtctacctgctgaagaataaagatttcttttggtaa

SEQ ID NO: 445603 - DNA, 2073 bp, Homo sapiens
ttgctacgtctaggcccgcgtggtttatcggccttcgcgttatggccgctgccgcggctgtggaggcggcggcgcctatgggtgccctatggggcctcgtgcacgacttcgtcgtgggtcagcaagagggccccgctgaccaggtggctgcaggtcctctctagagaatccagaaccccgaactcgggcacgaggaatccagcttttgtcacaggtgctactccactgtcacaccttgctcctggagaaggaagtggtacacctgatactgttctatgagaaccggctgaaggaccatcatcttgtgatcccatctgtcctgcagggtttgaaggcacttagcctgtgtgtggccctgcccccagggctggctgtttctgtgcttaaagccatcttccaggaagtgcatgtacagtccctgccacaggtggaccgacacacagtctacaatatcatcaccaattttatgcgaacccgggaagaagagctaaagagcctaggagctgacttcacctttggcttcatccaggtgatggatggggaaaaggatccccgtaatcttctggtggccttccgcatcgtccatgacctcatctccagggactatagcctgggaccctttgtggaggagttgtttgaagtgacatcctgttatttccctatcgattttacccctccacctaatgatccccatggtatccagagagaagacctcatcctgagtcttcgcgctgtgctggcttctacaccacgatttgctgagtttctgctgcccctgttgattgagaaagtggattctgaggttctgagtgccaagttggattctctacagactctgaatgcttgctgtgctgtgtatggacagaaggaactgaaggacttcctccccagcctttgggcttctatccgcagagaggtgttccagacggcaagtgagcgggtggaggcagagggcctggcggccctccactccctgactgcgtgtttgtctcgctctgtgctgagggctgatgctgaggacctccttgactccttccttagcaacattctacaggactgcaggcaccacctgtgtgaaccggacatgaaactggtgtggcctagtgccaagctgttgcaggcagctgcaggtgcatctgcccgggcctgtgactctgtcaccagcaatgtactgcctttactgctggaacagttccacaagcacagtcagagcagccagcggcggacaatccttgaaatgctcctgggtttcttgaagctgcagcagaaatggagctatgaagacaaagatcaaaggcctctgaatggcttcaaggaccagctgtgctcactggtattcatggctctaacagaccccagcacccagcttcagcttgttggcatccgtacactgacagtcttgggtgcccagccagatctcctatcttatgaggacttggagctggcagtgggtcacctgtacagactgagcttcctgaaggaggattcccagagttgcagggtggcagcactggaagcatcaggaaccctggctgctctctaccctgtggccttcagcagccacctcgtacccaagctcgctgaggagctgcgtgtaggggagtcaaatttgactaacggagatgagcccacccaatgctcccggcatctgtgctgtctgcaagccttgtcagctgtatcaacacatcccagcatcgtcaaggagacactgcctctgctgctgcagcatctctggcaagtgaacagagggaatatggttgcacaatccagtgacgttattgctgtctgtcagagcctcagacagatggcagaaaaatgtcagcaggaccctgagagttgctggtatttccaccagacagctataccttgcctgcttgccttggctgtgcaggcctctatgccagagaaggaggcctcagtctgaggaaacgactatgcacgaagaggtgtcgaagcacgggcgccgtcaggggcaggaaaaacaagctaactaatagggccaacggtgaccgtggcccgcatcgaggacggcgctcgcaacagacccgacagaaagcaccgaacccagcacgg

SEQ ID NO: 445604 - DNA, 749 bp, Homo sapiens
tcacgctttatacttccagagcgcacgcttctttccttgctgctggaggccctgtcctgccctgactgtgtggtgcagctctccaccctcagctgccttcagcctcttctactggaagcaccccaagtcatgagtcttcacgtggacaccctcgtcaccaagtttctgaacctcagctctagcccttccatggctgtccggatcgccgcactgcagtgcatgcatgctctcactcgcctgcccacccctgtgctgctgccgtacaaaccacaggtgattcgggccttagccaaacccctggatgacaagaagagactggtgcgcaaggaagcagtgtcagccagaggggagtggtttctgttggggagccctggcagctgagccctcagtcctggcctagactgttctgacaatctaacctgggattactaactgttgagccatcttccccaaagcagggaaaccactggtctctgactgcctttcccacagacacagcacaaatgctaggcctctgttgcatggctgtacaaagaacataagagtccatatttctagtggatttgtaaaataagtgtgtgtgagacacttgcgtttgaagaaagatctagggtcctgggtctcttgcatttatatgtcagaaaaggggcgatatgctgctgaggggtgagtgcatatgagtgtggccctgaggaccagggctggcagatgttgtctacctgctgaagaataaagatttcttttggtaa

SEQ ID NO: 445605 - DNA, 1470 bp, Homo sapiens
ttgctacgtctaggcccgcgtggtttatcggccttcgcgttatggccgctgccgcggctgtggaggcggcggcgcctatgggtgccctatggggcctcgtgcacgacttcgtcgtgggtcagcaagagggccccgctgaccaggtggctgcaggtcctctctagagaatccagaaccccgaactcgggcacgaggaatccagcttttgtcacaggtgctactccactgtcacaccttgctcctggagaaggaagtggtacacctgatactgttctatgagaaccggctgaaggaccatcatcttgtgatcccatctgtcctgcagggtttgaaggcacttagcctgtgtgtggccctgcccccagggctggctgtttctgtgcttaaagccatcttccaggaagtgcatgtacagtccctgccacaggtggaccgacacacagtctacaatatcatcaccaattttatgcgaacccgggaagaagagctaaagagcctaggagctgacttcacctttggcttcatccaggtgatggatggggaaaaggatccccgtaatcttctggtggccttccgcatcgtccatgacctcatctccagggactatagcctgggaccctttgtggaggagttgtttgaagtgacatcctgttatttccctatcgattttacccctccacctaatgatccccatggtatccagagagaagacctcatcctgagtcttcgcgctgtgctggcttctacaccacgatttgctgagtttctgctgcccctgttgattgagaaagtggattctgaggttctgagtgccaagttggattctctacagactctgaatgcttgctgtgctgtgtatggacagaaggaactgaaggacttcctccccagcctttgggcttctatccgcagagaggtgttccagacggcaagtgagcgggtggaggcagagggcctggcggccctccactccctgactgcgtgtttgtctcgctctgtgctgagggctgatgctgaggacctccttgactccttccttagcaacattctacaggactgcaggcaccacctgtgtgaaccggacatgaaactggtgtggcctagtgccaagctgttgcaggcagctgcaggtgcatctgcccgggcctgtgactctgtcaccagcaatgtactgcctttactgctggaacagttccacaagcacagtcaggtaagggagcagaatctttgggggaaatgatgggacctgtgtgctaggttccctttctcagagagtgagctaagttttagcttgggccaacatagtagaccttgggttttgctcccattagctgctgctgctgcttcccttactcactttttccctgtctcatacataaaaggatcattctcccaagacaggaggatagcttgaagccaggagttcaagatcagcctgggcaacaaagtgagatcccatctctaaaaaaa

SEQ ID NO: 445606 - DNA, 1232 bp, Homo sapiens
ttgctacgtctaggcccgcgtggtttatcggccttcgcgttatggccgctgccgcggctgtggaggcggcggcgcctatgggtgccctatggggcctcgtgcacgacttcgtcgtgggtcagcaagagggccccgctgaccaggtggctgcaggtcctctctagagaatccagaaccccgaactcgggcacgaggaatccagcttttgtcacaggtgctactccactgtcacaccttgctcctggagaaggaagtggtacacctgatactgttctatgagaaccggctgaaggaccatcatcttgtgatcccatctgtcctgcagggtttgaaggcacttagcctgtgtgtggccctgcccccagggctggctgtttctgtgcttaaagccatcttccaggaagtgcatgtacagtccctgccacaggtggaccgacacacagtctacaatatcatcaccaattttatgcgaacccgggaagaagagctaaagagcctaggagctgacttcacctttggcttcatccaggtgatggatggggaaaaggatccccgtaatcttctggtggccttccgcatcgtccatgacctcatctccagggactatagcctgggaccctttgtggaggagttgtttgaagtgacatcctgttatttccctatcgattttacccctccacctaatgatccccatggtatccagagagaagacctcatcctgagtcttcgcgctgtgctggcttctacaccacgatttgctgagtttctgctgcccctgttgattgagaaagtggattctgaggttctgagtgccaagttggattctctacagactctgaatgcttgctgtgctgtgtatggacagaaggaactgaaggacttcctccccagcctttgggcttctatccgcagagaggtgttccagacggcaagtgagcgggtggaggcagagggcctggcggccctccactccctgactgcgtgtttgtctcgctctgtgctgagggctgatgctgaggacctccttgactccttccttagcaacattctacagggtaatggggccgtggcagccaggaaggggagtgagcacaatagaaacgacattccttgcctgggtgcggtggctcacgcctgtaatccctgcactttaggaggccgaggcgggtggatcacctgaggtcaggagttaaagaccagcctggccaacatggtgaaacctcgtctctact

SEQ ID NO: 445607 - DNA, 452 bp, Homo sapiens
gatgggaccaagatgagcctcatcactaatgctgccaactttctttttgcctacaggtttctgttggggagccctggcagctgagccctcagtcctggcctagactgttctgacaatctaacctgggattactaactgttgagccatcttccccaaagcagggaaaccactggtctctgactgcctttcccacagacacagcacaaatgctaggcctctgttgcatggctgtacaaagaacataagagtccatatttctagtggatttgtaaaataagtgtgtgtgagacacttgcgtttgaagaaagatctagggtcctgggtctcttgcatttatatgtcagaaaaggggcgatatgctgctgaggggtgagtgcatatgagtgtggccctgaggaccagggctggcagatgttgtctacctgctgaagaataaagatttcttttggtaa

SEQ ID NO: 445608 - DNA, 870 bp, Homo sapiens
  misc_feature (14)..(14): n is a, c, g, or t
  misc_feature (16)..(16): n is a, c, g, or t
  misc_feature (870)..(870): n is a, c, g, or t
aagcaggcgtacgncngaggtagattcgcgttatggccgctgccgcggctgtggaggcggcggcgcctatgggtgccctatggggcctcgtgcacgacttcgtcgtgggtcagcaagagggccccgctgaccaggtggctgcagatgtgaaatctggcaactatacagtgttacaagttgtggaagcccttgggtcctctctagagaatccagaaccccgaactcgggcacgaggaatccagcttttgtcacaggtgctactccactgtcacaccttgctcctggagaaggaagaaggtactggtgtcactaataggaatgtcttcctggattgctgagcccagtggtacacctgatactgttctatgagaaccggctgaaggaccatcatcttgtgatcccatctgtcctgcagggtttgaaggcacttagcctgtgtgtggccctgcccccagggctggctgtttctgtgcttaaagccatcttccaggaagtgcatgtacagtccctgccacaggtggaccgacacacagtctacaatatcatcaccaattttatgcgaacccgggaagaagagctaaagagcctaggagctgacttcacctttggcttcatccaggtgatggatggggaaaaggatccccgtaatcttctggtggccttccgcatcgtccatgacctcatctccagggactatagcctgggacctttgtggaggagtgttgaaagtgaatcctgttatttcctatgatcttacccttcaattaatgatccatggttcccgagagaagactcatctgaatttcgcgatgtgctggttctaacagaatggagtcggtgcccgcgatgcaacggacccggcactgccan

SEQ ID NO: 445609 - DNA, 355 bp, Homo sapiens
atcccctgcagcagaaacagcatttgccccttccatagggatttgtggcactttgaacttgagagagatgatctagggtcctgggtctcttgcatttatatgtcagaaaaggggcgatatgctgctgaggggtgagtgcatatgagtgtggccctgaggaccagggctggcagatgttgtctacctgctgaagaataaagatttcttttggtaatggggctgtcagatatttcccccaccccacatatgcctcatataaccagaggcatcactggaataacaatgacagggattggccaaaaatttttcagggtaaccaggacagtagcacatgcctgtaaccccaacacttcag

SEQ ID NO: 445610 - DNA, 463 bp, Homo sapiens
tctgttgcatggctgtacaaagaacataagagtccatatttctagtggatttgtaaaataagtgtgtgtgagacacttgcgtttgaagaaagatctagggtcctgggtctcttgcatttatatgtcagaaaaggggcgatatgctgctgaggggtgagtgcatatgagtgtggccctgaggaccagggctggcagatgttgtctacctgctgaagaataaagatttcttttggtaatggggctgtcagatatttcccccaccccacatatgcctcatataaccagaggcatcactggaataacaatgacagggattggccaaaaatttttcagggtaaccaggacagtagcacatgcctgtaaccccaacacttcaggaggctgaggcaggcggatcacttgaggctaggagtttgagactagccctggcagtatagcaagaacccatctctacaaataatta

SEQ ID NO: 445611 - DNA, 519 bp, Homo sapiens
gtagagcattttaaaatataccttgacttcccagatgggaacctgaatggaaatgattactggcacatatgtgccaaattaatatttgttcaatgcatgaatgatcagggcatgtcccattgacgtggtgatcctaattcaaaccctaggttgaaaagcacgtctgtggaggagagggctgctttagaatcctagctccttggtcatacctagtactctgcccccaggttagctgcccagagtgtgacacacattgtgcccctcttcttggatggcaacgtgtcctttctgcctgaaaacagcttcccgagcagattccagccattccaggtaacagtcttagaacttacatccttcaagctggtttttttttagggctaatctggaatgggtagaggggcagacaagcttattgctggcaggcttgatcgggctctccttcctttataggatggctcctcagggcagaggcggctgattgcactgcttatggcctttgtctgctccctgcctcgaaat

SEQ ID NO: 445612 - DNA, 469 bp, Homo sapiens
actctggatgatttgggatttctaataagagcttagaagggttgtgatggctgcaggggaagaaagatgagattcatgttcccttctaactacagatctcctatcttatgaggacttggagctggcagtgggtcacctgtacagactgagcttcctgaaggaggattcccagagttggtgagaatttaaagcaatgagatagagcaagctgttccctgcctctgtattggcagcaaaagatcaagctaggaccagggctctgtgcttctgacccttggctctccttaggggaggtgagctctgtgttagactctggctgctaaccagttggagagatgtaggactgctctcttcttaggctttaagaagccctgtccaactcagtggtgtaggtacttgagttctgctcttttagcaaggaggcgttgggagctcacactcctgaatctgcctaatatcagacgtaggc

SEQ ID NO: 445613 - DNA, 279 bp, Homo sapiens
gaaagaattttccctatatccagagtagcaggattgaaatcctttaaaatattctttgactctagtaccccttgaaacgttacagagcagccagcggcggacaatccttgaaatgctcctgggtttcttgaagctgcagcagaaatggagctatgaagacaaaggtgaggttgccttccattgcagtgctctggggactgttgaacacttcagcctataaaggatagcagggcaaagagtgctgtggaaaagtagtctagaacagtggtcctattctga

SEQ ID NO: 445614 - DNA, 613 bp, Homo sapiens
tgagtcaatatccataccctttctctgtagtttctcttagattgatcttatgctggtataaagagcactgttcacttagagattatgaagcaggaactagctgtgtcagctgaggtattctttgagcattttcttcacttctttctcccccacccccaagtccctgccacaggtggaccgacacacagtctacaatatcatcaccaattttatgcgaacccgggaagaaggtaagagacagagctttctgggaaatgtcaaaagcaagcacatcctactttttcccctattagtaggactcattttacctggggttatatagaagagctggtatcctgagagagaatgataaagggaaagagggggtctgctccctcccagtgaagtaaagaaagggtagagtttgtttgagccagtgttttaaattcttgcctccacagcaatgtgtatattgttgcacatctcttcactgagtactttcttggaatggaaaaagggtcagccctgaagagaaaggggaggcaatgatagcagagggagaacacaggctaggagaaagcccacactttctgtgctgtgggacagtatagtaaccttattctctccttcccag

SEQ ID NO: 445615 - DNA, 3534 bp, Homo sapiens
  misc_feature (4)..(4): n is a, c, g, or t
tggnatgtgaccgacagcaccgccccctagggctgggcctgattttctcattggcttcccccgtgttcgcgttatggccgctgccgcggctgtggaggcggcggcgcctatgggtgccctatggggcctcgtgcacgacttcgtcgtgggtcagcaagagggccccgctgaccaggtggctgcagatgtgaaatctggcaactatacagtgttacaagttgtggaagcccttgggtcctctctagagaatccagaaccccgaactcgggcacgaggaatccagcttttgtcacaggtgctactccactgtcacaccttgctcctggagaaggaagtggtacacctgatactgttctatgagaaccggctgaaggaccatcatcttgtgatcccatctgtcctgcagggtttgaaggcacttagcctgtgtgtggccctgcccccagggctggctgtttctgtgcttaaagccatcttccaggaagtgcatgtacagtccctgccacaggtggaccgacacacagtctacaatatcatcaccaattttatgcgaacccgggaagaagagctaaagagcctaggagctgacttcacctttggcttcatccaggtgatggatggggaaaaggatccccgtaatcttctggtggccttccgcatcgtccatgacctcatctccagggactatagcctgggaccctttgtggaggagttgtttgaagtgacatcctgttatttccctatcgattttacccctccacctaatgatccccatggtatccagagagaagacctcatcctgagtcttcgcgctgtgctggcttctacaccacgatttgctgagtttctgctgcccctgttgattgagaaagtggattctgaggttctgagtgccaagttggattctctacagactctgaatgcttgctgtgctgtgtatggacagaaggaactgaaggacttcctccccagcctttgggcttctatccgcagagaggtgttccagacggcaagtgagcgggtggaggcagagggcctggcggccctccactccctgactgcgtgtttgtctcgctctgtgctgagggctgatgctgaggacctccttgactccttccttagcaacattctacaggactgcaggcaccacctgtgtgaaccggacatgaaactggtgtggcctagtgccaagctgttgcaggcagctgcaggtgcatctgcccgggcctgtgactctgtcaccagcaatgtactgcctttactgctggaacagttccacaagcacagtcagagcagccagcggcggacaatccttgaaatgctcctgggtttcttgaagctgcagcagaaatggagctatgaagacaaagatcaaaggcctctgaatggcttcaaggaccagctgtgctcactggtattcatggctctaacagaccccagcacccagcttcagcttgttggcatccgtacactgacagtcttgggtgcccagccagatctcctatcttatgaggacttggagctggcagtgggtcacctgtacagactgagcttcctgaaggaggattcccagagttgcagggtggcagcactggaagcatcaggaaccctggctgctctctaccctgtggccttcagcagccacctcgtacccaagctcgctgaggagctgcgtgtaggggagtcaaatttgactaacggagatgagcccacccaatgctcccggcatctgtgctgtctgcaagccttgtcagctgtatcaacacatcccagcatcgtcaaggagacactgcctctgctgctgcagcatctctggcaagtgaacagagggaatatggttgcacaatccagtgacgttattgctgtctgtcagagcctcagacagatggcagaaaaatgtcagcaggaccctgagagttgctggtatttccaccagacagctataccttgcctgcttgccttggctgtgcaggcctctatgccagagaaggagccctcagttctgagaaaagtactattggaggatgaggtgttggctgccatggtgtctgtcattggcactgctacaacccacctgagccctgagttagctgcccagagtgtgacacacattgtgcccctcttcttggatggcaacgtgtcctttctgcctgaaaacagcttcccgagcagattccagccattccaggatggctcctcagggcagaggcggctgattgcactgcttatggcctttgtctgctccctgcctcgaaatgtggaaatccctcagctgaaccaactcatgcgggagcttttggaactgagctgctgccacagctgccccttttcttccaccgctgctgccaagtgctttgcaggactcctcaacaagcaccctgcagggcagcagctggatgaattcctacagctagctgtggacaaagtggaggctggcctgggctctgggccctgtcgtagtcaggccttcactcttcttctctgggtaacaaaggccctagtgctcagataccatcctctcagctcctgccttacagcccggctcatgggcctcctgagtgacccagaattaggtccagcagcagctgatggcttctctctgctcatgtctgactgcactgatgtgctgactcgtgctggccatgccgaagtgcggatcatgttccgccagcggttcttcacagataatgtgcctgctttggtccagggcttccatgctgctccccaagatgtgaagccaaactacttgaagggtctttctcatgtacttaacaggctgcccaagcctgtactcttgccagagctgcccacgcttctttccttgctgctggaggccctgtcctgccctgactgtgtggtgcagctctccaccctcagctgccttcagcctcttctactggaagcaccccaagtcatgagtcttcacgtggacaccctcgtcaccaagtttctgaacctcagctctagcccttccatggctgtccggatcgccgcactgcagtgcatgcatgctctcactcgcctgcccacccctgtgctgctgccgtacaaaccacaggtgattcgggccttagccaaacccctggatgacaagaagagactggtgcgcaaggaagcagtgtcagccagaggggagtggtttctgttggggagccctggcagctgagccctcagtcctggcctagactgttctgacaatctaacctgggattactaactgttgagccatcttccccaaagcagggaaaccactggtctctgactgcctttcccacagacacagcacaaatgctaggcctctgttgcatggctgtacaaagaacataagagtccatatttctagtggatttgtaaaataagtgtgtgtgagacacttgcgtttgaagaaagatctagggtcctgggtctcttgcatttatatgtcagaaaaggggcgatatgctgctgaggggtgagtgcatatgagtgtggccctgaggaccagggctggcagatgttgtctacctgctgaagaataaagatttcttttggtaa

SEQ ID NO: 445616 - DNA, 687 bp, Homo sapiens
  misc_feature (14)..(14): n is a, c, g, or t
  misc_feature (16)..(16): n is a, c, g, or t
aagcaggcgtacgncngaggtagattcgcgttatggccgctgccgcggctgtggaggcggcggcgcctatgggtgccctatggggcctcgtgcacgacttcgtcgtgggtcagcaagagggccccgctgaccaggtggctgcagatgtgaaatctggcaactatacagtgttacaagttgtggaagcccttgggtcctctctagagaatccagaaccccgaactcgggcacgaggaatccagcttttgtcacaggtgctactccactgtcacaccttgctcctggagaaggaagtggtacacctgatactgttctatgagaaccggctgaaggaccatcatcttgtgatcccatctgtcctgcagggtttgaaggcacttagcctgtgtgtggccctgcccccagggctggctgtttctgtgcttaaagccatcttccaggaagtgcatgtacagtccctgccacaggtggaccgacacacagtctacaatatcatcaccaattttatgcgaacccgggaagaaggtaagagacagagctttctgggaaatgtcaaaagcaagcacatcctactttttcccctattagtaggactcattttacctggggttatatagaagagctggtatcctgagagagaatgataaagggaaagagggggtctgctccctcccagtgaagtaaaga

SEQ ID NO: 445617 - DNA, 3543 bp, Homo sapiens
  misc_feature (14)..(14): n is a, c, g, or t
  misc_feature (16)..(16): n is a, c, g, or t
aagcaggcgtacgncngaggtagattcgcgttatggccgctgccgcggctgtggaggcggcggcgcctatgggtgccctatggggcctcgtgcacgacttcgtcgtgggtcagcaagagggccccgctgaccaggtggctgcagatgtgaaatctggcaactatacagtgttacaagttgtggaagcccttgggtcctctctagagaatccagaaccccgaactcgggcacgaggaatccagcttttgtcacaggtgctactccactgtcacaccttgctcctggagaaggaagaaggtactggtgtcactaataggaatgtcttcctggattgctgagcccagtggtacacctgatactgttctatgagaaccggctgaaggaccatcatcttgtgatcccatctgtcctgcagggtttgaaggcacttagcctgtgtgtggccctgcccccagggctggctgtttctgtgcttaaagccatcttccaggaagtgcatgtacagtccctgccacaggtggaccgacacacagtctacaatatcatcaccaattttatgcgaacccgggaagaagagctaaagagcctaggagctgacttcacctttggcttcatccaggtgatggatggggaaaaggatccccgtaatcttctggtggccttccgcatcgtccatgacctcatctccagggactatagcctgggaccctttgtggaggagttgtttgaagtgacatcctgttatttccctatcgattttacccctccacctaatgatccccatggtatccagagagaagacctcatcctgagtcttcgcgctgtgctggcttctacaccacgatttgctgagtttctgctgcccctgttgattgagaaagtggattctgaggttctgagtgccaagttggattctctacagactctgaatgcttgctgtgctgtgtatggacagaaggaactgaaggacttcctccccagcctttgggcttctatccgcagagaggtgttccagacggcaagtgagcgggtggaggcagagggcctggcggccctccactccctgactgcgtgtttgtctcgctctgtgctgagggctgatgctgaggacctccttgactccttccttagcaacattctacaggactgcaggcaccacctgtgtgaaccggacatgaaactggtgtggcctagtgccaagctgttgcaggcagctgcaggtgcatctgcccgggcctgtgactctgtcaccagcaatgtactgcctttactgctggaacagttccacaagcacagtcagagcagccagcggcggacaatccttgaaatgctcctgggtttcttgaagctgcagcagaaatggagctatgaagacaaagatcaaaggcctctgaatggcttcaaggaccagctgtgctcactggtattcatggctctaacagaccccagcacccagcttcagcttgttggcatccgtacactgacagtcttgggtgcccagccagatctcctatcttatgaggacttggagctggcagtgggtcacctgtacagactgagcttcctgaaggaggattcccagagttgcagggtggcagcactggaagcatcaggaaccctggctgctctctaccctgtggccttcagcagccacctcgtacccaagctcgctgaggagctgcgtgtaggggagtcaaatttgactaacggagatgagcccacccaatgctcccggcatctgtgctgtctgcaagccttgtcagctgtatcaacacatcccagcatcgtcaaggagacactgcctctgctgctgcagcatctctggcaagtgaacagagggaatatggttgcacaatccagtgacgttattgctgtctgtcagagcctcagacagatggcagaaaaatgtcagcaggaccctgagagttgctggtatttccaccagacagctataccttgcctgcttgccttggctgtgcaggcctctatgccagagaaggagccctcagttctgagaaaagtactattggaggatgaggtgttggctgccatggtgtctgtcattggcactgctacaacccacctgagccctgagttagctgcccagagtgtgacacacattgtgcccctcttcttggatggcaacgtgtcctttctgcctgaaaacagcttcccgagcagattccagccattccaggatggctcctcagggcagaggcggctgattgcactgcttatggcctttgtctgctccctgcctcgaaatgtggaaatccctcagctgaaccaactcatgcgggagcttttggaactgagctgctgccacagctgccccttttcttccaccgctgctgccaagtgctttgcaggactcctcaacaagcaccctgcagggcagcagctggatgaattcctacagctagctgtggacaaagtggaggctggcctgggctctgggccctgtcgtagtcaggccttcactcttcttctctgggtaacaaaggccctagtgctcagataccatcctctcagctcctgccttacagcccggctcatgggcctcctgagtgacccagaattaggtccagcagcagctgatggcttctctctgctcatgtctgactgcactgatgtgctgactcgtgctggccatgccgaagtgcggatcatgttccgccagcggttcttcacagataatgtgcctgctttggtccagggcttccatgctgctccccaagatgtgaagccaaactacttgaagggtctttctcatgtacttaacaggctgcccaagcctgtactcttgccagagctgcccacgcttctttccttgctgctggaggccctgtcctgccctgactgtgtggtgcagctctccaccctcagctgccttcagcctcttctactggaagcaccccaagtcatgagtcttcacgtggacaccctcgtcaccaagtttctgaacctcagctctagcccttccatggctgtccggatcgccgcactgcagtgcatgcatgctctcactcgcctgcccacccctgtgctgctgccgtacaaaccacaggtgattcgggccttagccaaacccctggatgacaagaagagactggtgcgcaaggaagcagtgtcagccagaggggagtggtttctgttggggagccctggcagctgagccctcagtcctggcctagactgttctgacaatctaacctgggattactaactgttgagccatcttccccaaagcagggaaaccactggtctctgactgcctttcccacagacacagcacaaatgctaggcctctgttgcatggctgtacaaagaacataagagtccatatttctagtggatttgtaaaataagtgtgtgtgagacacttgcgtttgaagaaagatctagggtcctgggtctcttgcatttatatgtcagaaaaggggcgatatgctgctgaggggtgagtgcatatgagtgtggccctgaggaccagggctggcagatgttgtctacctgctgaagaataaagatttcttttggtaa

SEQ ID NO: 445618 - DNA, 2781 bp, Homo sapiens
tcgatcaagggatggcgcttagttataccatactggccctgcgccttacaattacagcgctgtgctggcttctacaccacgatttgctgagtttctgctgcccctgttgattgagaaagtggattctgaggttctgagtgccaagttggattctctacagactctgaatgcttgctgtgctgtgtatggacagaaggaactgaaggacttcctccccagcctttgggcttctatccgcagagaggtgttccagacggcaagtgagcgggtggaggcagagggcctggcggccctccactccctgactgcgtgtttgtctcgctctgtgctgagggctgatgctgaggacctccttgactccttccttagcaacattctacaggactgcaggcaccacctgtgtgaaccggacatgaaactggtgtggcctagtgccaagctgttgcaggcagctgcaggtgcatctgcccgggcctgtgactctgtcaccagcaatgtactgcctttactgctggaacagttccacaagcacagtcagagcagccagcggcggacaatccttgaaatgctcctgggtttcttgaagctgcagcagaaatggagctatgaagacaaagatcaaaggcctctgaatggcttcaaggaccagctgtgctcactggtattcatggctctaacagaccccagcacccagcttcagcttgttggcatccgtacactgacagtcttgggtgcccagccagatctcctatcttatgaggacttggagctggcagtgggtcacctgtacagactgagcttcctgaaggaggattcccagagttgcagggtggcagcactggaagcatcaggaaccctggctgctctctaccctgtggccttcagcagccacctcgtacccaagctcgctgaggagctgcgtgtaggggagtcaaatttgactaacggagatgagcccacccaatgctcccggcatctgtgctgtctgcaagccttgtcagctgtatcaacacatcccagcatcgtcaaggagacactgcctctgctgctgcagcatctctggcaagtgaacagagggaatatggttgcacaatccagtgacgttattgctgtctgtcagagcctcagacagatggcagaaaaatgtcagcaggaccctgagagttgctggtatttccaccagacagctataccttgcctgcttgccttggctgtgcaggcctctatgccagagaaggagccctcagttctgagaaaagtactattggaggatgaggtgttggctgccatggtgtctgtcattggcactgctacaacccacctgagccctgagttagctgcccagagtgtgacacacattgtgcccctcttcttggatggcaacgtgtcctttctgcctgaaaacagcttcccgagcagattccagccattccaggatggctcctcagggcagaggcggctgattgcactgcttatggcctttgtctgctccctgcctcgaaatgtggaaatccctcagctgaaccaactcatgcgggagcttttggaactgagctgctgccacagctgccccttttcttccaccgctgctgccaagtgctttgcaggactcctcaacaagcaccctgcagggcagcagctggatgaattcctacagctagctgtggacaaagtggaggctggcctgggctctgggccctgtcgtagtcaggccttcactcttcttctctgggtaacaaaggccctagtgctcagataccatcctctcagctcctgccttacagcccggctcatgggcctcctgagtgacccagaattaggtccagcagcagctgatggcttctctctgctcatgtctgactgcactgatgtgctgactcgtgctggccatgccgaagtgcggatcatgttccgccagcggttcttcacagataatgtgcctgctttggtccagggcttccatgctgctccccaagatgtgaagccaaactacttgaagggtctttctcatgtacttaacaggctgcccaagcctgtactcttgccagagctgcccacgcttctttccttgctgctggaggccctgtcctgccctgactgtgtggtgcagctctccaccctcagctgccttcagcctcttctactggaagcaccccaagtcatgagtcttcacgtggacaccctcgtcaccaagtttctgaacctcagctctagcccttccatggctgtccggatcgccgcactgcagtgcatgcatgctctcactcgcctgcccacccctgtgctgctgccgtacaaaccacaggtgattcgggccttagccaaacccctggatgacaagaagagactggtgcgcaaggaagcagtgtcagccagaggggagtggtttctgttggggagccctggcagctgagccctcagtcctggcctagactgttctgacaatctaacctgggattactaactgttgagccatcttccccaaagcagggaaaccactggtctctgactgcctttcccacagacacagcacaaatgctaggcctctgttgcatggctgtacaaagaacataagagtccatatttctagtggatttgtaaaataagtgtgtgtgagacacttgcgtttgaagaaagatctagggtcctgggtctcttgcatttatatgtcagaaaaggggcgatatgctgctgaggggtgagtgcatatgagtgtggccctgaggaccagggctggcagatgttgtctacctgctgaagaataaagatttcttttggtaa

SEQ ID NO: 445619 - DNA, 2481 bp, Homo sapiens
tcgatagacggctaggtacgaggccgggtggtgggctgatgctgaggacctccttgactccttccttagcaacattctacaggactgcaggcaccacctgtgtgaaccggacatgaaactggtgtggcctagtgccaagctgttgcaggcagctgcaggtgcatctgcccgggcctgtgactctgtcaccagcaatgtactgcctttactgctggaacagttccacaagcacagtcagagcagccagcggcggacaatccttgaaatgctcctgggtttcttgaagctgcagcagaaatggagctatgaagacaaagatcaaaggcctctgaatggcttcaaggaccagctgtgctcactggtattcatggctctaacagaccccagcacccagcttcagcttgttggcatccgtacactgacagtcttgggtgcccagccagatctcctatcttatgaggacttggagctggcagtgggtcacctgtacagactgagcttcctgaaggaggattcccagagttgcagggtggcagcactggaagcatcaggaaccctggctgctctctaccctgtggccttcagcagccacctcgtacccaagctcgctgaggagctgcgtgtaggggagtcaaatttgactaacggagatgagcccacccaatgctcccggcatctgtgctgtctgcaagccttgtcagctgtatcaacacatcccagcatcgtcaaggagacactgcctctgctgctgcagcatctctggcaagtgaacagagggaatatggttgcacaatccagtgacgttattgctgtctgtcagagcctcagacagatggcagaaaaatgtcagcaggaccctgagagttgctggtatttccaccagacagctataccttgcctgcttgccttggctgtgcaggcctctatgccagagaaggagccctcagttctgagaaaagtactattggaggatgaggtgttggctgccatggtgtctgtcattggcactgctacaacccacctgagccctgagttagctgcccagagtgtgacacacattgtgcccctcttcttggatggcaacgtgtcctttctgcctgaaaacagcttcccgagcagattccagccattccaggatggctcctcagggcagaggcggctgattgcactgcttatggcctttgtctgctccctgcctcgaaatgtggaaatccctcagctgaaccaactcatgcgggagcttttggaactgagctgctgccacagctgccccttttcttccaccgctgctgccaagtgctttgcaggactcctcaacaagcaccctgcagggcagcagctggatgaattcctacagctagctgtggacaaagtggaggctggcctgggctctgggccctgtcgtagtcaggccttcactcttcttctctgggtaacaaaggccctagtgctcagataccatcctctcagctcctgccttacagcccggctcatgggcctcctgagtgacccagaattaggtccagcagcagctgatggcttctctctgctcatgtctgactgcactgatgtgctgactcgtgctggccatgccgaagtgcggatcatgttccgccagcggttcttcacagataatgtgcctgctttggtccagggcttccatgctgctccccaagatgtgaagccaaactacttgaagggtctttctcatgtacttaacaggctgcccaagcctgtactcttgccagagctgcccacgcttctttccttgctgctggaggccctgtcctgccctgactgtgtggtgcagctctccaccctcagctgccttcagcctcttctactggaagcaccccaagtcatgagtcttcacgtggacaccctcgtcaccaagtttctgaacctcagctctagcccttccatggctgtccggatcgccgcactgcagtgcatgcatgctctcactcgcctgcccacccctgtgctgctgccgtacaaaccacaggtgattcgggccttagccaaacccctggatgacaagaagagactggtgcgcaaggaagcagtgtcagccagaggggagtggtttctgttggggagccctggcagctgagccctcagtcctggcctagactgttctgacaatctaacctgggattactaactgttgagccatcttccccaaagcagggaaaccactggtctctgactgcctttcccacagacacagcacaaatgctaggcctctgttgcatggctgtacaaagaacataagagtccatatttctagtggatttgtaaaataagtgtgtgtgagacacttgcgtttgaagaaagatctagggtcctgggtctcttgcatttatatgtcagaaaaggggcgatatgctgctgaggggtgagtgcatatgagtgtggccctgaggaccagggctggcagatgttgtctacctgctgaagaataaagatttcttttggtaa

SEQ ID NO: 445620 - DNA, 3199 bp, Homo sapiens
  misc_feature (14)..(14): n is a, c, g, or t
  misc_feature (16)..(16): n is a, c, g, or t
aagcaggcgtacgncngaggtagattcgcgttatggccgctgccgcggctgtggaggcggcggcgcctatgggtgccctatggggcctcgtgcacgacttcgtcgtgggtcagcaagagggccccgctgaccaggtggctgcagatgtgaaatctggcaactatacagtgttacaagttgtggaagcccttgggtcctctctagagaatccagaaccccgaactcgggcacgaggaatccagcttttgtcacaggtgctactccactgtcacaccttgctcctggagaaggaagtggtacacctgatactgttctatgagaaccggctgaaggaccatcatcttgtgatcccatctgtcctgcagggtttgaaggcacttagcctgtgtgtggccctgcccccagggctggctgtttctgtgcttaaagccatcttccaggaagtgcatgtacagtccctgccacaggtggaccgacacacagtctacaatatcatcaccaattttatgcgaacccgggaagaagagctaaagagcctaggagctgacttcacctttggcttcatccaggtgatggatggggaaaaggatccccgtaatcttctggtggccttccgcatcgtccatgacctcatctccagggactatagcctgggaccctttgtggaggagttgtttgaagtgacatcctgttatttccctatcgattttacccctccacctaatgatccccatggtatccagagagaagacctcatcctgagtcttcgcgctgtgctggcttctacaccacgatttgctgagtttctgctgcccctgttgattgagaaagtggattctgaggttctgagtgccaagttggattctctacagactctgaatgcttgctgtgctgtgtatggacagaaggaactgaaggacttcctccccagcctttgggcttctatccgcagagagagcagccagcggcggacaatccttgaaatgctcctgggtttcttgaagctgcagcagaaatggagctatgaagacaaagatcaaaggcctctgaatggcttcaaggaccagctgtgctcactggtattcatggctctaacagaccccagcacccagcttcagcttgttggcatccgtacactgacagtcttgggtgcccagccagatctcctatcttatgaggacttggagctggcagtgggtcacctgtacagactgagcttcctgaaggaggattcccagagttgcagggtggcagcactggaagcatcaggaaccctggctgctctctaccctgtggccttcagcagccacctcgtacccaagctcgctgaggagctgcgtgtaggggagtcaaatttgactaacggagatgagcccacccaatgctcccggcatctgtgctgtctgcaagccttgtcagctgtatcaacacatcccagcatcgtcaaggagacactgcctctgctgctgcagcatctctggcaagtgaacagagggaatatggttgcacaatccagtgacgttattgctgtctgtcagagcctcagacagatggcagaaaaatgtcagcaggaccctgagagttgctggtatttccaccagacagctataccttgcctgcttgccttggctgtgcaggcctctatgccagagaaggagccctcagttctgagaaaagtactattggaggatgaggtgttggctgccatggtgtctgtcattggcactgctacaacccacctgagccctgagttagctgcccagagtgtgacacacattgtgcccctcttcttggatggcaacgtgtcctttctgcctgaaaacagcttcccgagcagattccagccattccaggatggctcctcagggcagaggcggctgattgcactgcttatggcctttgtctgctccctgcctcgaaatgtggaaatccctcagctgaaccaactcatgcgggagcttttggaactgagctgctgccacagctgccccttttcttccaccgctgctgccaagtgctttgcaggactcctcaacaagcaccctgcagggcagcagctggatgaattcctacagctagctgtggacaaagtggaggctggcctgggctctgggccctgtcgtagtcaggccttcactcttcttctctgggtaacaaaggccctagtgctcagataccatcctctcagctcctgccttacagcccggctcatgggcctcctgagtgacccagaattaggtccagcagcagctgatggcttctctctgctcatgtctgactgcactgatgtgctgactcgtgctggccatgccgaagtgcggatcatgttccgccagcggttcttcacagataatgtgcctgctttggtccagggcttccatgctgctccccaagatgtgaagccaaactacttgaagggtctttctcatgtacttaacaggctgcccaagcctgtactcttgccagagctgcccacgcttctttccttgctgctggaggccctgtcctgccctgactgtgtggtgcagctctccaccctcagctgccttcagcctcttctactggaagcaccccaagtcatgagtcttcacgtggacaccctcgtcaccaagtttctgaacctcagctctagcccttccatggctgtccggatcgccgcactgcagtgcatgcatgctctcactcgcctgcccacccctgtgctgctgccgtacaaaccacaggtgattcgggccttagccaaacccctggatgacaagaagagactggtgcgcaaggaagcagtgtcagccagaggggagtggtttctgttggggagccctggcagctgagccctcagtcctggcctagactgttctgacaatctaacctgggattactaactgttgagccatcttccccaaagcagggaaaccactggtctctgactgcctttcccacagacacagcacaaatgctaggcctctgttgcatggctgtacaaagaacataagagtccatatttctagtggatttgtaaaataagtgtgtgtgagacacttgcgtttgaagaaagatctagggtcctgggtctcttgcatttatatgtcagaaaaggggcgatatgctgctgaggggtgagtgcatatgagtgtggccctgaggaccagggctggcagatgttgtctacctgctgaagaataaagatttcttttggtaa

SEQ ID NO: 445621 - DNA, 3314 bp, Homo sapiens
ttgctacgtctaggcccgcgtggtttatcggccttcgcgttatggccgctgccgcggctgtggaggcggcggcgcctatgggtgccctatggggcctcgtgcacgacttcgtcgtgggtcagcaagagggccccgctgaccaggtggctgcaggtcctctctagagaatccagaaccccgaactcgggcacgaggaatccagcttttgtcacaggtgctactccactgtcacaccttgctcctggagaaggaagtggtacacctgatactgttctatgagaaccggctgaaggaccatcatcttgtgatcccatctgtcctgcagggtttgaaggcacttagcctgtgtgtggccctgcccccagggctggctgtttctgtgcttaaagccatcttccaggaagtgcatgtacagtccctgccacaggtggaccgacacacagtctacaatatcatcaccaattttatgcgaacccgggaagaagagctaaagagcctaggagctgacttcacctttggcttcatccaggtgatggatggggaaaaggatccccgtaatcttctggtggccttccgcatcgtccatgacctcatctccagggactatagcctgggaccctttgtggaggagttgtttgaagtgacatcctgttatttccctatcgattttacccctccacctaatgatccccatggtatccagagagaagacctcatcctgagtcttcgcgctgtgctggcttctacaccacgatttgctgagtttctgctgcccctgttgattgagaaagtggattctgaggttctgagtgccaagttggattctctacagactctgaatgcttgctgtgctgtgtatggacagaaggaactgaaggacttcctccccagcctttgggcttctatccgcagagagactgcaggcaccacctgtgtgaaccggacatgaaactggtgtggcctagtgccaagctgttgcaggcagctgcaggtgcatctgcccgggcctgtgactctgtcaccagcaatgtactgcctttactgctggaacagttccacaagcacagtcagagcagccagcggcggacaatccttgaaatgctcctgggtttcttgaagctgcagcagaaatggagctatgaagacaaagatcaaaggcctctgaatggcttcaaggaccagctgtgctcactggtattcatggctctaacagaccccagcacccagcttcagcttgttggcatccgtacactgacagtcttgggtgcccagccagatctcctatcttatgaggacttggagctggcagtgggtcacctgtacagactgagcttcctgaaggaggattcccagagttgcagggtggcagcactggaagcatcaggaaccctggctgctctctaccctgtggccttcagcagccacctcgtacccaagctcgctgaggagctgcgtgtaggggagtcaaatttgactaacggagatgagcccacccaatgctcccggcatctgtgctgtctgcaagccttgtcagctgtatcaacacatcccagcatcgtcaaggagacactgcctctgctgctgcagcatctctggcaagtgaacagagggaatatggttgcacaatccagtgacgttattgctgtctgtcagagcctcagacagatggcagaaaaatgtcagcaggaccctgagagttgctggtatttccaccagacagctataccttgcctgcttgccttggctgtgcaggcctctatgccagagaaggagccctcagttctgagaaaagtactattggaggatgaggtgttggctgccatggtgtctgtcattggcactgctacaacccacctgagccctgagttagctgcccagagtgtgacacacattgtgcccctcttcttggatggcaacgtgtcctttctgcctgaaaacagcttcccgagcagattccagccattccaggatggctcctcagggcagaggcggctgattgcactgcttatggcctttgtctgctccctgcctcgaaatgtggaaatccctcagctgaaccaactcatgcgggagcttttggaactgagctgctgccacagctgccccttttcttccaccgctgctgccaagtgctttgcaggactcctcaacaagcaccctgcagggcagcagctggatgaattcctacagctagctgtggacaaagtggaggctggcctgggctctgggccctgtcgtagtcaggccttcactcttcttctctgggtaacaaaggccctagtgctcagataccatcctctcagctcctgccttacagcccggctcatgggcctcctgagtgacccagaattaggtccagcagcagctgatggcttctctctgctcatgtctgactgcactgatgtgctgactcgtgctggccatgccgaagtgcggatcatgttccgccagcggttcttcacagataatgtgcctgctttggtccagggcttccatgctgctccccaagatgtgaagccaaactacttgaagggtctttctcatgtacttaacaggctgcccaagcctgtactcttgccagagctgcccacgcttctttccttgctgctggaggccctgtcctgccctgactgtgtggtgcagctctccaccctcagctgccttcagcctcttctactggaagcaccccaagtcatgagtcttcacgtggacaccctcgtcaccaagtttctgaacctcagctctagcccttccatggctgtccggatcgccgcactgcagtgcatgcatgctctcactcgcctgcccacccctgtgctgctgccgtacaaaccacaggtgattcgggccttagccaaacccctggatgacaagaagagactggtgcgcaaggaagcagtgtcagccagaggggagtggtttctgttggggagccctggcagctgagccctcagtcctggcctagactgttctgacaatctaacctgggattactaactgttgagccatcttccccaaagcagggaaaccactggtctctgactgcctttcccacagacacagcacaaatgctaggcctctgttgcatggctgtacaaagaacataagagtccatatttctagtggatttgtaaaataagtgtgtgtgagacacttgcgtttgaagaaagatctagggtcctgggtctcttgcatttatatgtcagaaaaggggcgatatgctgctgaggggtgagtgcatatgagtgtggccctgaggaccagggctggcagatgttgtctacctgctgaagaataaagatttcttttggtaa

SEQ ID NO: 445622 - DNA, 3347 bp, Homo sapiens
ttgctacgtctaggcccgcgtggtttatcggccttcgcgttatggccgctgccgcggctgtggaggcggcggcgcctatgggtgccctatggggcctcgtgcacgacttcgtcgtgggtcagcaagagggccccgctgaccaggtggctgcaggtcctctctagagaatccagaaccccgaactcgggcacgaggaatccagcttttgtcacaggtgctactccactgtcacaccttgctcctggagaaggaagtggtacacctgatactgttctatgagaaccggctgaaggaccatcatcttgtgatcccatctgtcctgcagggtttgaaggcacttagcctgtgtgtggccctgcccccagggctggctgtttctgtgcttaaagccatcttccaggaagtgcatgtacagtccctgccacaggtggaccgacacacagtctacaatatcatcaccaattttatgcgaacccgggaagaagagctaaagagcctaggagctgacttcacctttggcttcatccaggtgatggatggggaaaaggatccccgtaatcttctggtggccttccgcatcgtccatgacctcatctccagggactatagcctgggaccctttgtggaggagttgtttgaagtgacatcctgttatttccctatcgattttacccctccacctaatgatccccatggtatccagagagaagacctcatcctgagtcttcgcgctgtgctggcttctacaccacgatttgctgagtttctgctgcccctgttgattgagaaagtggattctgaggttctgagtgccaagttggattctctacagactctgaatgcttgctgtgctgtgtatggacagaaggaactgaaggacttcctccccagcctttgggcttctatccgcagagaggtgttccagacggcaagtgagcgggtggaggcagagggcctggcggccctccactccctgactgcgtgtttgtctcgctctgtgctgagggctgatgctgaggacctccttgactccttccttagcaacattctacaggactgcaggcaccacctgtgtgaaccggacatgaaactggtgtggcctagtgccaagctgttgcaggcagctgcaggtgcatctgcccgggcctgtgactctgtcaccagcaatgtactgcctttactgctggaacagttccacaagcacagtcagagcagccagcggcggacaatccttgaaatgctcctgggtttcttgaagctgcagcagaaatggagctatgaagacaaagatcaaaggcctctgaatggcttcaaggaccagctgtgctcactggtattcatggctctaacagaccccagcacccagcttcagcttgttggcatccgtacactgacagtcttgggtgcccagccagatctcctatcttatgaggacttggagctggcagtgggtcacctgtacagactgagcttcctgaaggaggattcccagagttgcagggtggcagcactggaagcatcaggaaccctggctgctctctaccctgtggccttcagcagccacctcgtacccaagctcgctgaggagctgcgtgtaggggagtcaaatttgactaacggagatgagcccacccaatgctcccggcatctgtgctgtctgcaagccttgtcagctgtatcaacacatcccagcatcgtcaaggagacactgcctctgctgctgcagcatctctggcaagtgaacagagggaatatggttgcacaatccagtgacgttattgctgtctgtcagagcctcagacagatggcagaaaaatgtcagcaggaccctgagagttgctggtatttccaccagacagctataccttgcctgcttgccttggctgtgcaggcctctatgccagagaaggagccctcagttctgagaaaagtactattggaggatgaggtgttggctgccatggtgtctgtcattggcactgctacaacccacctgagccctgagttagctgcccagagtgtgacacacattgtgcccctcttcttggatggcaacgtgtcctttctgcctgaaaacagcttcccgagcagattccagccattccaggatggctcctcagggcagaggcggctgattgcactgcttatggcctttgtctgctccctgcctcgaaatgtggaaatccctcagctgaaccaactcatgcgggagcttttggaactgagctgctgccacagctgccccttttcttccaccgctgctgccaagtgctttgcaggactcctcaacaagcaccctgcagggcagcagctggatgaattcctacagctagctgtggacaaagtggaggctggcctgggctctgggccctgtcgtagtcaggccttcactcttcttctctgggtaacaaaggccctagtgctcagataccatcctctcagctcctgccttacagcccggctcatgggcctcctgagtgacccagaattaggtccagcagcagctgatggcttctctctgctcatgtctgactgcactgatgtgctgactcgtgctggccatgccgaagtgcggatcatgttccgccagcggttcttcacagataatgtgcctgctttggtccagggcttccatgctgctccccaagatgtgaagccaaactacttgaagggtctttctcatgtacttaacaggctgcccaagcctgtactcttgccagagctgcccacgcttctttccttgctgctggaggccctgtcctgccctgactgtgtggtgcagctctccaccctcagctgccttcagcctcttctactggaagcaccccaagtcatgagtcttcacgtggacaccctcgtcaccaagtttctgaacctcagctctagcccttccatggctgtccggatcgccgcactgcagtgcatgcatgctctcactcgcctgcccacccctgtgctgctgccgtacaaaccacaggtgattcgggccttagccaaacccctggatgacaagaagagactggtgcgcaaggaagcagtgtcagccagaggggagtggtttctgttggggagccctggcagctgagccctcagtcctggcctagactgttctgacaatctaacctgggattactaactgttgagccatatttctagtggatttgtaaaataagtgtgtgtgagacacttgcgtttgaagaaagatctagggtcctgggtctcttgcatttatatgtcagaaaaggggcgatatgctgctgaggggtgagtgcatatgagtgtggccctgaggaccagggctggcagatgttgtctacctgctgaagaataaagatttcttttggtaa

SEQ ID NO: 445623 - DNA, 2066 bp, Homo sapiens
agcaggctgtagggagcaggctgcccagatctcctatcttatgaggacttggagctggcagtgggtcacctgtacagactgagcttcctgaaggaggattcccagagttgcagggtggcagcactggaagcatcaggaaccctggctgctctctaccctgtggccttcagcagccacctcgtacccaagctcgctgaggagctgcgtgtaggggagtcaaatttgactaacggagatgagcccacccaatgctcccggcatctgtgctgtctgcaagccttgtcagctgtatcaacacatcccagcatcgtcaaggagacactgcctctgctgctgcagcatctctggcaagtgaacagagggaatatggttgcacaatccagtgacgttattgctgtctgtcagagcctcagacagatggcagaaaaatgtcagcaggaccctgagagttgctggtatttccaccagacagctataccttgcctgcttgccttggctgtgcaggcctctatgccagagaaggagccctcagttctgagaaaagtactattggaggatgaggtgttggctgccatggtgtctgtcattggcactgctacaacccacctgagccctgagttagctgcccagagtgtgacacacattgtgcccctcttcttggatggcaacgtgtcctttctgcctgaaaacagcttcccgagcagattccagccattccaggatggctcctcagggcagaggcggctgattgcactgcttatggcctttgtctgctccctgcctcgaaatgtggaaatccctcagctgaaccaactcatgcgggagcttttggaactgagctgctgccacagctgccccttttcttccaccgctgctgccaagtgctttgcaggactcctcaacaagcaccctgcagggcagcagctggatgaattcctacagctagctgtggacaaagtggaggctggcctgggctctgggccctgtcgtagtcaggccttcactcttcttctctgggtaacaaaggccctagtgctcagataccatcctctcagctcctgccttacagcccggctcatgggcctcctgagtgacccagaattaggtccagcagcagctgatggcttctctctgctcatgtctgactgcactgatgtgctgactcgtgctggccatgccgaagtgcggatcatgttccgccagcggttcttcacagataatgtgcctgctttggtccagggcttccatgctgctccccaagatgtgaagccaaactacttgaagggtctttctcatgtacttaacaggctgcccaagcctgtactcttgccagagctgcccacgcttctttccttgctgctggaggccctgtcctgccctgactgtgtggtgcagctctccaccctcagctgccttcagcctcttctactggaagcaccccaagtcatgagtcttcacgtggacaccctcgtcaccaagtttctgaacctcagctctagcccttccatggctgtccggatcgccgcactgcagtgcatgcatgctctcactcgcctgcccacccctgtgctgctgccgtacaaaccacaggtgattcgggccttagccaaacccctggatgacaagaagagactggtgcgcaaggaagcagtgtcagccagaggggagtggtttctgttggggagccctggcagctgagccctcagtcctggcctagactgttctgacaatctaacctgggattactaactgttgagccatcttccccaaagcagggaaaccactggtctctgactgcctttcccacagacacagcacaaatgctaggcctctgttgcatggctgtacaaagaacataagagtccatatttctagtggatttgtaaaataagtgtgtgtgagacacttgcgtttgaagaaagatctagggtcctgggtctcttgcatttatatgtcagaaaaggggcgatatgctgctgaggggtgagtgcatatgagtgtggccctgaggaccagggctggcagatgttgtctacctgctgaagaataaagatttcttttggtaa

SEQ ID NO: 445624 - DNA, 2840 bp, Homo sapiens
ttgctacgtctaggcccgcgtggtttatcggccttcgcgttatggccgctgccgcggctgtggaggcggcggcgcctatgggtgccctatggggcctcgtgcacgacttcgtcgtgggtcagcaagagggccccgctgaccaggtggctgcaggtcctctctagagaatccagaaccccgaactcgggcacgaggaatccagcttttgtcacaggtgctactccactgtcacaccttgctcctggagaaggaagtggtacacctgatactgttctatgagaaccggctgaaggaccatcatcttgtgatcccatctgtcctgcagggtttgaaggcacttagcctgtgtgtggccctgcccccagggctggctgtttctgtgcttaaagccatcttccaggaagtgcatgtacagtccctgccacaggtggaccgacacacagtctacaatatcatcaccaattttatgcgaacccgggaagaagagctaaagagcctaggagctgacttcacctttggcttcatccaggtgatggatggggaaaaggatccccgtaatcttctggtggccttccgcatcgtccatgacctcatctccagggactatagcctgggaccctttgtggaggagttgtttgaagtgacatcctgttatttccctatcgattttacccctccacctaatgatccccatggtatccagagagaagacctcatcctgagtcttcgcgctgtgctggcttctacaccacgatttgctgagtttctgctgcccctgttgattgagaaagtggattctgaggttctgagtgccaagttggattctctacagactctgaatgcttgctgtgctgtgtatggacagaaggaactgaaggacttcctccccagcctttgggcttctatccgcagagaggtgttccagacggcaagtgagcgggtggaggcagagggcctggcggccctccactccctgactgcgtgtttgtctcgctctgtgctgagggctgatgctgaggacctccttgactccttccttagcaacattctacaggactgcaggcaccacctgtgtgaaccggacatgaaactggtgtggcctagtgccaagctgttgcaggcagctgcaggtgcatctgcccgggcctgtgactctgtcaccagcaatgtactgcctttactgctggaacagttccacaagcacagtcagagcagccagcggcggacaatccttgaaatgctcctgggtttcttgaagctgcagcagaaatggagctatgaagacaaagatcaaaggcctctgaatggcttcaaggaccagctgtgctcactggtattcatggctctaacagaccccagcacccagcttcagcttgttggcatccgtacactgacagtcttgggtgcccagccagatctcctatcttatgaggacttggagctggcagtgggtcacctgtacagactgagcttcctgaaggaggattcccagagttgcagggtggcagcactggaagcatcaggaaccctggctgctctctaccctgtggccttcagcagccacctcgtacccaagctcgctgaggagctgcgtgtaggggagtcaaatttgactaacggagatgagcccacccaatgctcccggcatctgtgctgtctgcaagccttgtcagctgtatcaacacatcccagcatcgtcaaggagacactgcctctgctgctgcagcatctctggcaagtgaacagagggaatatggttgcacaatccagtgacgttattgctgtctgtcagagcctcagacagatggcagaaaaatgtcagcaggaccctgagagttgctggtatttccaccagacagctataccttgcctgcttgccttggctgtgcaggcctctatgccagagaaggagccctcagttctgagaaaagtactattggaggatgaggtgttggctgccatggtgtctgtcattggcactgctacaacccacctgagccctgagttagctgcccagagtgtgacacacattgtgcccctcttcttggatggcaacgtgtcctttctgcctgaaaacagcttcccgagcagattccagccattccaggatggctcctcagggcagaggcggctgattgcactgcttatggcctttgtctgctccctgcctcgaaatgtggaaatccctcagctgaaccaactcatgcgggagcttttggaactgagctgctgccacagctgccccttttcttccaccgctgctgccaagtgctttgcaggactcctcaacaagcaccctgcagggcagcagctggatgaattcctacagctagctgtggacaaagtggaggctggcctgggctctgggccctgtcgtagtcaggccttcactcttcttctctgggtaacaaaggccctagtgctcagataccatcctctcagctcctgccttacagcccgggtacgtcctttctggagacagaagaacccaggacctaaacaaactttctggttgctcctattcctcccaaggacttccatcctcccctgtgtgttttttgttttcttttcttttttctttttggagacagggtcttactctgtcacccaggctggagtacagtagtgcaatcacagctcactccagcctcaacctccgtaggctcaagtgatcctcccacttcagcctcgcaagtagctgggactacaggggcaccccaccacacccaactaatgtttgtattttttgtaagaactgggtttggccatgttgcccagactcctagactcaagcagtccacctgccttggcctcccaaagtgctaggattacaggcatga

SEQ ID NO: 445625 - DNA, 2078 bp, Homo sapiens
tttccttgcatctccagggacaccagggacaacatttctatttcttatgttaagaatgttcatcttagctatccctctttcccactgttggcctagtctaaagactgtgcagagttctcaggagcgctctgtggccccaggtcagaccactcctgtttctggtgccctgattctcaggactatagcactaccagagaccagattaagaactgctgtcgtggctagagtcaagccccagagtcagtgatgctgacagaacccaatcattcatttcttgaacccgtcatggtcttgtgattgtgtgcatgtgtgtgtgttttgcagagaaggagccctcagttctgagaaaagtactattggaggatgaggtgttggctgccatggtgtctgtcattggcactgctacaacccacctgagccctgagttagctgcccagagtgtgacacacattgtgcccctcttcttggatggcaacgtgtcctttctgcctgaaaacagcttcccgagcagattccagccattccaggatggctcctcagggcagaggcggctgattgcactgcttatggcctttgtctgctccctgcctcgaaatgtaagtgagcacatttgggaagtactgttatttaaccttgacaaggtgactccgggctgaaatttgccacaggctaagctgatcttttacttcccccaccagagaagttagttctcatccgtcccggtccctgctgccactatgtactggttctcttggagttcaagtgttctctgggtccattacatggccaggttttctgtaggtggaaatccctcagctgaaccaactcatgcgggagcttttggaactgagctgctgccacagctgccccttttcttccaccgctgctgccaagtgctttgcaggactcctcaacaagcaccctgcagggcagcagctggatgaattcctacagctagctgtggacaaagtggaggctggcctgggctctgggccctgtcgtagtcaggccttcactcttcttctctgggtaacaaaggccctagtgctcagataccatcctctcagctcctgccttacagcccggctcatgggcctcctgagtgacccagaattaggtccagcagcagctgatggcttctctctgctcatgtctgactgcactgatgtgctgactcgtgctggccatgccgaagtgcggatcatgttccgccagcggttcttcacagataatgtgcctgctttggtccagggcttccatgctgctccccaagatgtgaagccaaactacttgaagggtctttctcatgtacttaacaggctgcccaagcctgtactcttgccagagctgcccacgcttctttccttgctgctggaggccctgtcctgccctgactgtgtggtgcagctctccaccctcagctgccttcagcctcttctactggaagcaccccaagtcatgagtcttcacgtggacaccctcgtcaccaagtttctgaacctcagctctagcccttccatggctgtccggatcgccgcactgcagtgcatgcatgctctcactcgcctgcccacccctgtgctgctgccgtacaaaccacaggtgattcgggccttagccaaacccctggatgacaagaagagactggtgcgcaaggaagcagtgtcagccagaggggagtggtttctgttggggagccctggcagctgagccctcagtcctggcctagactgttctgacaatctaacctgggattactaactgttgagccatcttccccaaagcagggaaaccactggtctctgactgcctttcccacagacacagcacaaatgctaggcctctgttgcatggctgtacaaagaacataagagtccatatttctagtggatttgtaaaataagtgtgtgtgagacacttgcgtttgaagaaagatctagggtcctgggtctcttgcatttatatgtcagaaaaggggcgatatgctgctgaggggtgagtgcatatgagtgtggccctgaggaccagggctggcagatgttgtctacctgctgaagaataaagatttcttttggtaa

SEQ ID NO: 445626 - DNA, 1963 bp, Homo sapiens
ttgctacgtctaggcccgcgtggtttatcggccttcgcgttatggccgctgccgcggctgtggaggcggcggcgcctatgggtgccctatggggcctcgtgcacgacttcgtcgtgggtcagcaagagggccccgctgaccaggtggctgcaggtcctctctagagaatccagaaccccgaactcgggcacgaggaatccagcttttgtcacaggtgctactccactgtcacaccttgctcctggagaaggaagtggtacacctgatactgttctatgagaaccggctgaaggaccatcatcttgtgatcccatctgtcctgcagggtttgaaggcacttagcctgtgtgtggccctgcccccagggctggctgtttctgtgcttaaagccatcttccaggaagtgcatgtacagtccctgccacaggtggaccgacacacagtctacaatatcatcaccaattttatgcgaacccgggaagaagagctaaagagcctaggagctgacttcacctttggcttcatccaggtgatggatggggaaaaggatccccgtaatcttctggtggccttccgcatcgtccatgacctcatctccagggactatagcctgggaccctttgtggaggagttgtttgaagtgacatcctgttatttccctatcgattttacccctccacctaatgatccccatggtatccagagagaagacctcatcctgagtcttcgcgctgtgctggcttctacaccacgatttgctgagtttctgctgcccctgttgattgagaaagtggattctgaggttctgagtgccaagttggattctctacagactctgaatgcttgctgtgctgtgtatggacagaaggaactgaaggacttcctccccagcctttgggcttctatccgcagagaggtgttccagacggcaagtgagcgggtggaggcagagggcctggcggccctccactccctgactgcgtgtttgtctcgctctgtgctgagggctgatgctgaggacctccttgactccttccttagcaacattctacaggactgcaggcaccacctgtgtgaaccggacatgaaactggtgtggcctagtgccaagctgttgcaggcagctgcaggtgcatctgcccgggcctgtgactctgtcaccagcaatgtactgcctttactgctggaacagttccacaagcacagtcagagcagccagcggcggacaatccttgaaatgctcctgggtttcttgaagctgcagcagaaatggagctatgaagacaaagatcaaaggcctctgaatggcttcaaggaccagctgtgctcactggtattcatggctctaacagaccccagcacccagcttcagcttgttggcatccgtacactgacagtcttgggtgcccagccagatctcctatcttatgaggacttggagctggcagtgggtcacctgtacagactgagcttcctgaaggaggattcccagagttgcagggtggcagcactggaagcatcaggaaccctggctgctctctaccctgtggccttcagcagccacctcgtacccaagctcgctgaggagctgcgtgtaggtatgtgtctctaatcctctgtggcccatccctttccagcaaggctttggggccttcgtgcttcctatcacacagtaaacctttgtctcatgggttgctttcaggggagtcaaatttgactaacggagatgagcccacccaatgctcccggcatctgtgctgtctgcaagccttgtcagctgtatcaacacatcccagcatcgtcaaggagacactgcctctgctgctgcagcatctctggcaagtgaacagaggtaactactaggaataaccaccaacggactgggctgaatagggagctgtagtctctaaggcagtggttctagctgtagctatacataagagtaacagaatcaactctttta

SEQ ID NO: 445627 - DNA, 1212 bp, Homo sapiens
ttgctacgtctaggcccgcgtggtttatcggccttcgcgttatggccgctgccgcggctgtggaggcggcggcgcctatgggtgccctatggggcctcgtgcacgacttcgtcgtgggtcagcaagagggccccgctgaccaggtggctgcaggtcctctctagagaatccagaaccccgaactcgggcacgaggaatccagcttttgtcacaggtgctactccactgtcacaccttgctcctggagaaggaagtggtacacctgatactgttctatgagaaccggctgaaggaccatcatcttgtgatcccatctgtcctgcagggtttgaaggcacttagcctgtgtgtggccctgcccccagggctggctgtttctgtgcttaaagccatcttccaggaagtgcatgtacagtccctgccacaggtggaccgacacacagtctacaatatcatcaccaattttatgcgaacccgggaagaagagctaaagagcctaggagctgacttcacctttggcttcatccaggtgatggatggggaaaaggatccccgtaatcttctggtggccttccgcatcgtccatgacctcatctccagggactatagcctgggaccctttgtggaggagttgtttgaagtgacatcctgttatttccctatcgattttacccctccacctaatgatccccatggtatccagagagaagacctcatcctgagtcttcgcgctgtgctggcttctacaccacgatttgctgagtttctgctgcccctgttgattgagaaagtggattctgaggttctgagtgccaagttggattctctacagactctggtgagtgatttttcctccttgcaggacccagctaccttttgacaagttaggggtcctaaaggatatagattctaggatagccaaggaacagttcatgggcctcagaagaggatacccaggatttgggcctttgtgtcgacctgaagcccccagctgcatatcgtcgtgtcccatcccccatcccatagtaactgaggaaaggctgaccaggactccctctttaggcttctattttatcaaccagggttatctcctacttctctgttcccttagtaggactgttaaaaatcttaactggtttttctgctgagaccagggctccttcaggtgccattatgctgaggtacctgcacatcctagggtgtctgagtgtg

SEQ ID NO: 445628 - DNA, 660 bp, Homo sapiens
gagcttgctaataacattaacagggcttcaactgctcaagcactgtcctgggactgcccgtgggaaaagcgtcaagaccacagttgggcagagctttatagtacctaagaagagaagggagcacaaagagtctagttctgccgtcctactccctacagtggggctagtgtggataattctttattggaagtagatgaccctctcttttcaaatggcagcacctctgtattatgagaataccaggctcttatgcaggtgtccaatcattttgtccacaggcaaaaatgatattttccctttctaacagcttctcagggagctctgcacttaaagtgatttgcatttcattgctaaagggaaaatgtgtagcctttatgtcagcatttcctctctcctttttagggcagcagctggatgaattcctacagctagctgtggacaaagtggaggctggcctgggctctgggccctgtcgtagtcaggccttcactcttcttctctgggtaaggagttggagtggagtctggttagccagagaggcaattatgtctggttaaataaaatgtccctgtttgaccctaaaccataaacatctatgtctcagggttctcgggtttgagtgtcattccccaattgctctctctgtctccaattacaggt

SEQ ID NO: 445629 - DNA, 780 bp, Homo sapiens
cccaagtggttatgagattcaataactccttgctgccaacagagccttctcaacagctgcaggcctatgtggcctgggtgaatgcacagctgaagaagaggccagcagtgaagcctgtgcaggacctgcgacaagatctccgggatggggtgatcctggcatatctcatcgagattgttgcaggagaaaagctgagtggggtacagctgagtcccggtaaccaacaggagatgaagaataatgtggagaaagtgctacagtttgtggcctctaaaaagattcgtatgcaccagacttcggctaaagatattgtggatggaaacctgaagtctatcatgaggctggtccttgccttggcagctcatttcaaacctggctccagcaggacggtgaaccaaggacgggactccagagcccctctgcaaagtcaccgaccacactgtgccactgctgttgcccagggagcagctgctgctctggccgatgtgtgtcatgacatgtcccgatcaggacgggatgtctttcgatatagacagaggaacagcagcatggatgaggaaattgagaatccatactggagtgtgcgggccctagtgcagcagtacgaagggcaacaaaggtccccgtctgaatccagctgctccaggtaactgtggcctctgaaacctgaattctggaggattctcggagttctcggcttcaagtaacaatacaacaagcaaaaaggcacctaagccctttttctcccctcagtttatgtttggctttaaagggataccc

SEQ ID NO: 445630 - DNA, 5469 bp, Homo sapiens
tcccgcaggaaagcggggctgggggcagcccggcagcgccgctcaacctagtgcgcgcccagttgtttccataggaaccgcgaccgcgccgggcccctccagcggaggcccccgtgcgagcatgcccagtgcaagccgctagtttggctccagtctaggtttccagtaagtggcatgcgggactccggagggatcccaatgagctgagccgagagcctttgtgtgcagagggaggaggaggaggcggcggcggccgccgggctggagaccccgcccggggagcccccagcaggaacaatgctagcctgcctgacccgagggaacttactggacgtcctgcaggagggcttcaatgagcaacagctgcaggcctatgtggcctgggtgaatgcacagctgaagaagaggccagcagtgaagcctgtgcaggacctgcgacaagatctccgggatggggtgatcctggcatatctcatcgagattgttgcaggagaaaagctgagtggggtacagctgagtcccggtaaccaacaggagatgaagaataatgtggagaaagtgctacagtttgtggcctctaaaaagattcgtatgcaccagacttcggctaaagatattgtggatggaaacctgaagtctatcatgaggctggtccttgccttggcagctcatttcaaacctggctccagcaggacggtgaaccaaggacgggactccagagcccctctgcaaagtcaccgaccacactgtgccactgctgttgcccagggagcagctgctgctctggccgatgtgtgtcatgacatgtcccgatcaggacgggatgtctttcgatatagacagaggaacagcagcatggatgaggaaattgagaatccatactggagtgtgcgggccctagtgcagcagtacgaagggcaacaaaggtccccgtctgaatccagctgctccagcctgacttcacccagtccaatccacagtgcaaagagcgagtccattataacccagtcagaagagaaggcagattttgtgattattcccgctgaaggaatagagaacagaacagaagggacagattctccattatctcgagactggcggccagggagccctggaacctatctggagacctcatgggaagaacagctgttggaacaacaagaatatttagaaaaagaaatggaggaagcaaagaaaatgatatcaggactacaggccttactgctcaatggatccttacctgaagatgaacaggagaggcccttggccctctgtgaaccaggtgtcaatcccgaggaacaactgattataatccaaagtcgtctggatcagagtatggaggagaatcaggacttaaagaaggaactgctgaaatgtaaacaagaagccagaaacttacaggggataaaggatgccttgcagcagagattgactcagcaggacacatctgttcttcagctcaaacaagagctactgagggcaaatatggacaaagatgagctgcacaaccagaatgtggatctgcagaggaagctagatgagaggaaccggctcttgggagaatataaaaaagagctggggcagaaggatcgccttcttcagcagcaccaggccaagttagaagaagcactccggaaactctctgatgtcagttaccaccaggtggatctagagcgagagctagaacacaaagatgtcctcttggctcactgtatgaaaagagaggcagatgaggcgaccaactacaacagtcacaactctcaaagcaatggttttctccttccaacggcaggaaaaggagctacttcagtcagcaacagagggaccagcgacctgcagcttgttcgagatgctctccgcagcctgcgcaacagcttcagtggccacgatcctcagcaccacactattgacagcttggagcagggcatttctagcctcatggagcgcctgcatgttatggagacgcagaagaaacaagaaagaaaggttcgggtcaagtcacccagaactcaagtaggtagtgaataccgggagtcctggccccctaactcaaagttgcctcactcacagagctctccaactgtcagcagcacctgtactaaagtgctctatttcactgaccggtcacttacgcccttcatggtcaatataccaaagaggttggaggaggtgacgttaaaggattttaaagcagctattgatcgggaaggaaatcaccggtatcacttcaaagcactggatcctgagtttggcactgtcaaagaggagattttccatgatgatgatgccatccctggatgggaagggaaaattgtagcttgggtggaagaagaccatggagagaattaatgccaagtatcagattgagggcttatggaacctggtcactccctggctgcttcactcaggaaagggaactaaaaccagaatacactaagaagtttctagtttgtgtgccaaaacagaagcttctccaagcatgatggccacaggtcagtcctctttctgtgcctggcatatctggtacttaaaattctgtccaaatgtagaccatgggttcatctggagttccttgtccgtgggaacacagtgttctattctactctgaggacaacaaaccgaaggccttaaacgatggggatggatgatcccgcctctgtaggggcatggctgctattatctggaaattaggaattggatgcatcattcctgtgtgttacagtattattttaattggcctcaatggttgcagcaatcagagtcccagcgtttgtactcacagacaaggcaaaggtaccagcttttctgtttctttgaacctactgcaaaccaagaataactcatgaggtggtaccaaagatgaaagcccagacttcagtaatcttttgaaccagacgtggatggtgctgaattgttgcttggatggaaaaagggctgcccatgttgtgctacactatgctaaaactgtaatttagtaagaccttgggctgcctcttctgtcttaactggttctgcagcttgtccttttgcccacatagggcctatttcatgtactgttagttttctctggggactctttaactttagagccatttctttttcttcaaactgatgaacttttgtttgaaaggcataaggagtgaaaagctccttgaaaatccaggcgggtatggaaaggtgctgctacccatatctttttgactttctttgtttcatgactttaactcatggcatctcctttgtagtaaaaggagacagaccattaatttcagcatttctttgtgatttataagtactgagcatgaagtacttgtctgcccctcatttcaaggccagagttattttctatttatgtattagtctaggctgatcttttagggcacaatagaaaccatggggcgtggagcatgagttgtgaatggcagggatcattctgggtaaaaaaaacctagaatcatttctgatgtgcaacattgtcaagtgaagaagctaacagttcaactaccgagattatttgataacctgggttttctcattcatccatcaagcaccatcaaccagtcagccattattatttatatatgtattaccaaaagcagtctatctgcctgtgacctccaatgtacactgccaaacacaagagtaggacacatctgttctgggttcttgacctatctgtctccaattcatctccccttttcagccatttcaacaaactactctttggagctctgagatgacatcttgttgttttatatagatgtatcttttaaaaatagttcacgtttggagaattcttttgtactcatttgctttttgtctgagaaccatgtctatttttataactggagtgtgagttctgtatcttctcacattctgtatactgtatccattttctagagaacccagtagcttttatacagtctcttcttaccaccccttgtggtttcagaacaagctttattttattacgagtatattaatgacaactaattcctgttccaattctacctgttttagttgtgaaggtagttttgtgtaatccagttgattgctcctctggcagagagaaggagctcaaaagatacttgatgtctttcatgtaagtttacctggtcttttcctattgaagaatttttcatcagaaacgactgggaaagtttgggaaagtcagcaaaagaaagaatgcatttcgaaagcaaacagaagaaaaaagtatattctcacagtttttccccaggaagtctggagaaaaagtcctcatgtcaccaatttctctgttgcatgaattttagtgttttgctataagacagcatgagggctatcaggccaaaattcattattgtatttccaatacagtttgtcttgaatgtctgtctcttaaaccagtttttacttgtcagttttctctcagcaaacagtcttactattatgtggaatttaacttttcagagaaaatttccaaagtcctctaccttatttggcttttatctgtgtcttttggaaaaggagctgcatggcctcagtgcctccataaaaagcttaagttgagttcatgggagaacattaagatcgttttttttcccttttagctcggtaatctcatgtaccacaggtaatgaccaagcatctctgctagaggatgtaactctcataactcctgtgtaaaatgaggatcctgttggtgatcctcattccagtttccaaagcgagaggagccttctgagcagaagtatgcaagactgattctgtttggaacagtttcctatttggctgcattctaggaggcctcctgacttattcatagtattgtcgcctggtggcattggtgtggggtagcttgtcctgctacttgctaaagttctctttctttgagaaaactgaggaaccagaatgcttagagttcataaaataatctctaaaccatgttaggttaaaacaaaatgaccatctcacaaaaacgagtttagttgaatgctcaattccttacaaaatcttcatttaaggctgagtgtggtggctcatgcctgtaattccagcactttgggaggccgaggcaggaagactgcttgagcccaggagttcaagaccagcctgggcaacgtaggaagactccgtctctacatagaaattttattataaaagtagctggggatggtggcacacacctgtagtcccagctactcaggaggttgaggtgggaagattgcttgagcccaggagtttgaggttgcagtgagctgatcatgccactgcactctagcctaggctacagagcaggaccccatctccaaaaaaaaaaaaaaaaaagtcatttaaaaactgaagaatgttctcttcttgctcagttccctaaattagctggggggattgggatactttacaattttacatttttaaatttgaagaatttgttttaaacttacttggtaatggcacttctacttactgaccaacttttcagctctt

SEQ ID NO: 445631 - DNA, 3667 bp, Homo sapiens
gtcatatcagttgctgttcccctactatgagtgaggagtgatgagtcctcgcgatcgtgtccatgtctgaagcaagtcttgtcctcgtggtcctaggcaaccatagcatatggacattgtgtttggcaagggtgtgagagctgtgggctgtgacctcaggcagctttgttctcccgggacactttgaataactgcagatggctggtttagagcaaatgaatgttctaaccacagtctctttctgattgtagagttgcctcactcacagagctctccaactgtcagcagcacctgtactaaagtgctctatttcactgaccggtcacttacgcccttcatggtcaatataccaaagaggttggaggaggtgacgttaaaggattttaaagcagctattgatcgggaaggaaatcaccggtatcacttcaaagcactggatcctgagtttggcactgtcaaagaggagattttccatgatgatgatgccatccctggatgggaagggaaaattgtagcttgggtggaagaagaccatggagagaattaatgccaagtatcagattgagggcttatggaacctggtcactccctggctgcttcactcaggaaagggaactaaaaccagaatacactaagaagtttctagtttgtgtgccaaaacagaagcttctccaagcatgatggccacaggtcagtcctctttctgtgcctggcatatctggtacttaaaattctgtccaaatgtagaccatgggttcatctggagttccttgtccgtgggaacacagtgttctattctactctgaggacaacaaaccgaaggccttaaacgatggggatggatgatcccgcctctgtaggggcatggctgctattatctggaaattaggaattggatgcatcattcctgtgtgttacagtattattttaattggcctcaatggttgcagcaatcagagtcccagcgtttgtactcacagacaaggcaaaggtaccagcttttctgtttctttgaacctactgcaaaccaagaataactcatgaggtggtaccaaagatgaaagcccagacttcagtaatcttttgaaccagacgtggatggtgctgaattgttgcttggatggaaaaagggctgcccatgttgtgctacactatgctaaaactgtaatttagtaagaccttgggctgcctcttctgtcttaactggttctgcagcttgtccttttgcccacatagggcctatttcatgtactgttagttttctctggggactctttaactttagagccatttctttttcttcaaactgatgaacttttgtttgaaaggcataaggagtgaaaagctccttgaaaatccaggcgggtatggaaaggtgctgctacccatatctttttgactttctttgtttcatgactttaactcatggcatctcctttgtagtaaaaggagacagaccattaatttcagcatttctttgtgatttataagtactgagcatgaagtacttgtctgcccctcatttcaaggccagagttattttctatttatgtattagtctaggctgatcttttagggcacaatagaaaccatggggcgtggagcatgagttgtgaatggcagggatcattctgggtaaaaaaaacctagaatcatttctgatgtgcaacattgtcaagtgaagaagctaacagttcaactaccgagattatttgataacctgggttttctcattcatccatcaagcaccatcaaccagtcagccattattatttatatatgtattaccaaaagcagtctatctgcctgtgacctccaatgtacactgccaaacacaagagtaggacacatctgttctgggttcttgacctatctgtctccaattcatctccccttttcagccatttcaacaaactactctttggagctctgagatgacatcttgttgttttatatagatgtatcttttaaaaatagttcacgtttggagaattcttttgtactcatttgctttttgtctgagaaccatgtctatttttataactggagtgtgagttctgtatcttctcacattctgtatactgtatccattttctagagaacccagtagcttttatacagtctcttcttaccaccccttgtggtttcagaacaagctttattttattacgagtatattaatgacaactaattcctgttccaattctacctgttttagttgtgaaggtagttttgtgtaatccagttgattgctcctctggcagagagaaggagctcaaaagatacttgatgtctttcatgtaagtttacctggtcttttcctattgaagaatttttcatcagaaacgactgggaaagtttgggaaagtcagcaaaagaaagaatgcatttcgaaagcaaacagaagaaaaaagtatattctcacagtttttccccaggaagtctggagaaaaagtcctcatgtcaccaatttctctgttgcatgaattttagtgttttgctataagacagcatgagggctatcaggccaaaattcattattgtatttccaatacagtttgtcttgaatgtctgtctcttaaaccagtttttacttgtcagttttctctcagcaaacagtcttactattatgtggaatttaacttttcagagaaaatttccaaagtcctctaccttatttggcttttatctgtgtcttttggaaaaggagctgcatggcctcagtgcctccataaaaagcttaagttgagttcatgggagaacattaagatcgttttttttcccttttagctcggtaatctcatgtaccacaggtaatgaccaagcatctctgctagaggatgtaactctcataactcctgtgtaaaatgaggatcctgttggtgatcctcattccagtttccaaagcgagaggagccttctgagcagaagtatgcaagactgattctgtttggaacagtttcctatttggctgcattctaggaggcctcctgacttattcatagtattgtcgcctggtggcattggtgtggggtagcttgtcctgctacttgctaaagttctctttctttgagaaaactgaggaaccagaatgcttagagttcataaaataatctctaaaccatgttaggttaaaacaaaatgaccatctcacaaaaacgagtttagttgaatgctcaattccttacaaaatcttcatttaaggctgagtgtggtggctcatgcctgtaattccagcactttgggaggccgaggcaggaagactgcttgagcccaggagttcaagaccagcctgggcaacgtaggaagactccgtctctacatagaaattttattataaaagtagctggggatggtggcacacacctgtagtcccagctactcaggaggttgaggtgggaagattgcttgagcccaggagtttgaggttgcagtgagctgatcatgccactgcactctagcctaggctacagagcaggaccccatctccaaaaaaaaaaaaaaaaaagtcatttaaaaactgaagaatgttctcttcttgctcagttccctaaattagctggggggattgggatactttacaattttacatttttaaatttgaagaatttgttttaaacttacttggtaatggcacttctacttactgaccaacttttcagctctt

SEQ ID NO: 445632 - DNA, 412 bp, Homo sapiens
caacgaaatgtcttgaggaggctgagttgtgattttaacttggggtgagcttaccaagttcaactctggactaagtcatctgaaggagagttaagtttctttctgcctttgtggttattcaggccttactgctcaatggatccttacctgaagatgaacaggagaggcccttggccctctgtgaaccaggtgtcaatcccgaggaacaactggtgagctccatcttttgtgattggacactaaatctgtatgtattttacttgtatttagcatttgacactgctgttcatgccttcttgaaatgctgtcttccttgaccagttctggttttcctcctacatttttgaccattgtttccttcttcattcatttaataaacaaatatttattgagtgctgactatatgccagac

SEQ ID NO: 445633 - DNA, 435 bp, Homo sapiens
tgttgtggaagagatggtagaaaagtatgtagtattttaagcacacttttatgatttaaatttcttggttaagttctctcattgatcataactcttgtgatttttgtgtggctccccaggttcgggtcaagtcacccagaactcaagtaggtagtgaataccgggagtcctggccccctaactcaagtaagtacccatttttgctcagtagggactcctagcatattagaccagaaatttagtatttttcacactacattttggggatgtaatttttcttgtagtacttcacttttatactattttgtttctgtagcaatactgcaattgagttagttctaagactatgaagacatatgccatcaccacccccagtgccatttagccacgtgcaggcaggatgctgttgactcagagaggctaaaatatctttga

SEQ ID NO: 445634 - DNA, 4965 bp, Homo sapiens
actcgaggcgcagcctgcgccgccgggagcctccctcccagtgggagatgggttgagatgcccccgccaggggggatgcccggcaccgtgcgtccgcggaggccaagatgcagcggccaggggccggcagcctgcgaggggaggcagcttccgccggggccgggctgctgcacagtctgagcggccgggactgcgcgcttcagagcctggagcatcccagtcgctggggccgagacgccgccgccgccgccgttcccgctttctcccgcgagccgggccagtagctttgctagctggccttcccgtggaggcgttttccagccccagcgcggggagacatgcctgaatttgggagcgatgtgactctcagcctcccacttcacccggggacgcaggcttgctgaagcccgagacaggagggggaccatgggagggacgcaagtcaaatgcctgacttcacccagtccaatccacagtgcaaagagcgagtccattataacccagtcagaagagaaggcagattttgtgattattcccgctgaaggaatagagaacagaacagaagggacagattctccattatctcgagactggcggccagggagccctggaacctatctggagacctcatgggaagaacagctgttggaacaacaagaatatttagaaaaagaaatggaggaagcaaagaaaatgatatcaggactacaggccttactgctcaatggatccttacctgaagatgaacaggagaggcccttggccctctgtgaaccaggtgtcaatcccgaggaacaactgattataatccaaagtcgtctggatcagagtatggaggagaatcaggacttaaagaaggaactgctgaaatgtaaacaagaagccagaaacttacaggggataaaggatgccttgcagcagagattgactcagcaggacacatctgttcttcagctcaaacaagagctactgagggcaaatatggacaaagatgagctgcacaaccagaatgtggatctgcagaggaagctagatgagaggaaccggctcttgggagaatataaaaaagagctggggcagaaggatcgccttcttcagcagcaccaggccaagttagaagaagcactccggaaactctctgatgtcagttaccaccaggtggatctagagcgagagctagaacacaaagatgtcctcttggctcactgtatgaaaagagaggcagatgaggcgaccaactacaacagtcacaactctcaaagcaatggttttctccttccaacggcaggaaaaggagctacttcagtcagcaacagagggaccagcgacctgcagcttgttcgagatgctctccgcagcctgcgcaacagcttcagtggccacgatcctcagcaccacactattgacagcttggagcagggcatttctagcctcatggagcgcctgcatgttatggagacgcagaagaaacaagaaagaaaggttcgggtcaagtcacccagaactcaagtaggtagtgaataccgggagtcctggccccctaactcaaagttgcctcactcacagagctctccaactgtcagcagcacctgtactaaagtgctctatttcactgaccggtcacttacgcccttcatggtcaatataccaaagaggttggaggaggtgacgttaaaggattttaaagcagctattgatcgggaaggaaatcaccggtatcacttcaaagcactggatcctgagtttggcactgtcaaagaggagattttccatgatgatgatgccatccctggatgggaagggaaaattgtagcttgggtggaagaagaccatggagagaattaatgccaagtatcagattgagggcttatggaacctggtcactccctggctgcttcactcaggaaagggaactaaaaccagaatacactaagaagtttctagtttgtgtgccaaaacagaagcttctccaagcatgatggccacaggtcagtcctctttctgtgcctggcatatctggtacttaaaattctgtccaaatgtagaccatgggttcatctggagttccttgtccgtgggaacacagtgttctattctactctgaggacaacaaaccgaaggccttaaacgatggggatggatgatcccgcctctgtaggggcatggctgctattatctggaaattaggaattggatgcatcattcctgtgtgttacagtattattttaattggcctcaatggttgcagcaatcagagtcccagcgtttgtactcacagacaaggcaaaggtaccagcttttctgtttctttgaacctactgcaaaccaagaataactcatgaggtggtaccaaagatgaaagcccagacttcagtaatcttttgaaccagacgtggatggtgctgaattgttgcttggatggaaaaagggctgcccatgttgtgctacactatgctaaaactgtaatttagtaagaccttgggctgcctcttctgtcttaactggttctgcagcttgtccttttgcccacatagggcctatttcatgtactgttagttttctctggggactctttaactttagagccatttctttttcttcaaactgatgaacttttgtttgaaaggcataaggagtgaaaagctccttgaaaatccaggcgggtatggaaaggtgctgctacccatatctttttgactttctttgtttcatgactttaactcatggcatctcctttgtagtaaaaggagacagaccattaatttcagcatttctttgtgatttataagtactgagcatgaagtacttgtctgcccctcatttcaaggccagagttattttctatttatgtattagtctaggctgatcttttagggcacaatagaaaccatggggcgtggagcatgagttgtgaatggcagggatcattctgggtaaaaaaaacctagaatcatttctgatgtgcaacattgtcaagtgaagaagctaacagttcaactaccgagattatttgataacctgggttttctcattcatccatcaagcaccatcaaccagtcagccattattatttatatatgtattaccaaaagcagtctatctgcctgtgacctccaatgtacactgccaaacacaagagtaggacacatctgttctgggttcttgacctatctgtctccaattcatctccccttttcagccatttcaacaaactactctttggagctctgagatgacatcttgttgttttatatagatgtatcttttaaaaatagttcacgtttggagaattcttttgtactcatttgctttttgtctgagaaccatgtctatttttataactggagtgtgagttctgtatcttctcacattctgtatactgtatccattttctagagaacccagtagcttttatacagtctcttcttaccaccccttgtggtttcagaacaagctttattttattacgagtatattaatgacaactaattcctgttccaattctacctgttttagttgtgaaggtagttttgtgtaatccagttgattgctcctctggcagagagaaggagctcaaaagatacttgatgtctttcatgtaagtttacctggtcttttcctattgaagaatttttcatcagaaacgactgggaaagtttgggaaagtcagcaaaagaaagaatgcatttcgaaagcaaacagaagaaaaaagtatattctcacagtttttccccaggaagtctggagaaaaagtcctcatgtcaccaatttctctgttgcatgaattttagtgttttgctataagacagcatgagggctatcaggccaaaattcattattgtatttccaatacagtttgtcttgaatgtctgtctcttaaaccagtttttacttgtcagttttctctcagcaaacagtcttactattatgtggaatttaacttttcagagaaaatttccaaagtcctctaccttatttggcttttatctgtgtcttttggaaaaggagctgcatggcctcagtgcctccataaaaagcttaagttgagttcatgggagaacattaagatcgttttttttcccttttagctcggtaatctcatgtaccacaggtaatgaccaagcatctctgctagaggatgtaactctcataactcctgtgtaaaatgaggatcctgttggtgatcctcattccagtttccaaagcgagaggagccttctgagcagaagtatgcaagactgattctgtttggaacagtttcctatttggctgcattctaggaggcctcctgacttattcatagtattgtcgcctggtggcattggtgtggggtagcttgtcctgctacttgctaaagttctctttctttgagaaaactgaggaaccagaatgcttagagttcataaaataatctctaaaccatgttaggttaaaacaaaatgaccatctcacaaaaacgagtttagttgaatgctcaattccttacaaaatcttcatttaaggctgagtgtggtggctcatgcctgtaattccagcactttgggaggccgaggcaggaagactgcttgagcccaggagttcaagaccagcctgggcaacgtaggaagactccgtctctacatagaaattttattataaaagtagctggggatggtggcacacacctgtagtcccagctactcaggaggttgaggtgggaagattgcttgagcccaggagtttgaggttgcagtgagctgatcatgccactgcactctagcctaggctacagagcaggaccccatctccaaaaaaaaaaaaaaaaaagtcatttaaaaactgaagaatgttctcttcttgctcagttccctaaattagctggggggattgggatactttacaattttacatttttaaatttgaagaatttgttttaaacttacttggtaatggcacttctacttactgaccaacttttcagctctt

SEQ ID NO: 445635 - DNA, 2400 bp, Homo sapiens
tcccgcaggaaagcggggctgggggcagcccggcagcgccgctcaacctagtgcgcgcccagttgtttccataggaaccgcgaccgcgccgggcccctccagcggaggcccccgtgcgagcatgcccagtgcaagccgctagtttggctccagtctaggtttccagtaagtggcatgcgggactccggagggatcccaatgagctgagccgagagcctttgtgtgcagagggaggaggaggaggcggcggcggccgccgggctggagaccccgcccggggagcccccagcaggaacaatgctagcctgcctgacccgagggaacttactggacgtcctgcaggagggcttcaatgagcaacagctgcaggcctatgtggcctgggtgaatgcacagctgaagaagaggccagcagtgaagcctgtgcaggacctgcgacaagatctccgggatggggtgatcctggcatatctcatcgagattgttgcaggagaaaagctgagtggggtacagctgagtcccggtaaccaacaggagatgaagaataatgtggagaaagtgctacagtttgtggcctctaaaaagattcgtatgcaccagacttcggctaaagatattgtggatggaaacctgaagtctatcatgaggctggtccttgccttggcagctcatttcaaacctggctccagcaggacggtgaaccaaggacgggactccagagcccctctgcaaagtcaccgaccacactgtgccactgctgttgcccagggagcagctgctgctctggccgatgtgtgtcatgacatgtcccgatcaggacgggatgtctttcgatatagacagaggaacagcagcatggatgaggaaattgagaatccatactggagtgtgcgggccctagtgcagcagtacgaagggcaacaaaggtccccgtctgaatccagctgctccagcctgacttcacccagtccaatccacagtgcaaagagcgagtccattataacccagtcagaagagaaggcagattttgtgattattcccgctgaaggaatagagaacagaacagaagggacagattctccattatctcgagactggcggccagggagccctggaacctatctggagacctcatgggaagaacagctgttggaacaacaagaatatttagaaaaagaaatggaggaagcaaagaaaatgatatcaggactacaggccttactgctcaatggatccttacctgaagatgaacaggagaggcccttggccctctgtgaaccaggtgtcaatcccgaggaacaactgattataatccaaagtcgtctggatcagagtatggaggagaatcaggacttaaagaaggaactgctgaaatgtaaacaagaagccagaaacttacaggggataaaggatgccttgcagcagagattgactcagcaggacacatctgttcttcagctcaaacaagagctactgagggcaaatatggacaaagatgagctgcacaaccagaatgtggatctgcagaggaagctagatgagaggaaccggctcttgggagaatataaaaaagagctggggcagaaggatcgccttcttcagcagcaccaggccaagttagaagaagcactccggaaactctctgatgtcagttaccaccaggtggatctagagcgagagctagaacacaaagatgtcctcttggctcactgtatgaaaagagaggcagatgaggcgaccaactacaacagtcacaactctcaaagcaatggttttctccttccaacggcaggaaaaggagctacttcagtcagcaacagagggaccagcgacctgcagcttgttcgagatgctctccgcagcctgcgcaacagcttcagtggccacgatcctcagcaccacactattgacagcttggagcagggcatttctagcctcatggagcgcctgcatgttatggagacgcagaagaaacaagaaagaaaggttcgggtcaagtcacccagaactcaagtaggtagtgaataccgggagtcctggccccctaactcaagtaagtacccatttttgctcagtagggactcctagcatattagaccagaaatttagtatttttcacactacattttggggatgtaatttttcttgtagtacttcacttttatactattttgtttctgtagcaatactgcaattgagttagttctaagactatgaagacatatgccatcaccacccccagtgccatttagccacgtgcaggcaggatgctgttgactcagagaggctaaaatatctttgaagaacacagaagctcaaaagatttatgctgaaaaagcaaaatataaaacaacaaaaacacatacatacgtaaatttttctacactcccaaacagcaca

SEQ ID NO: 445636 - DNA, 4141 bp, Homo sapiens
  misc_feature (3903)..(3903): n is a, c, g, or t
  misc_feature (4006)..(4006): n is a, c, g, or t
gtccctgacctgcaccatttccaaatcttgggtacaatttgggcaggtgaccagggtcctattggaacagaaacctgccattggtggctctgcccccatccccaccacccccaatccgctattgactaggaggtgggtaggggggttggtgctttccttttcctttccatctgcagctttgcgttaaagattaaacactggagctcttatccaagcttgctcttgcagccaaaagactaattgcaaaggcatcttctcagtgaagggggcggggtgggctagggctgagtggaaatggtgagagagattattgtagaaaatatctcttccgggaacttagggcaaagagttttattttcaggaatcacatccctgtctcccccaacctcagaccaggcccccaatctcctccccacaagaaaaagcaaaggcagtctgaaaacctgttgccaaaggaagggaacacttctgaaggaggaagttgagagtcttaggccaggtcttgaaggagggggtatcaattaagcagagactgattggaaggggacctaacgtagcctatgatagactcctttctgaggtttacctgtttttgtcgcgggcggtggcgggggcggggtgcggtaatctagagaggtctgggttgtgtgagatattttgagttgaagaatctatttgactagtaaaaaagttgaactttaaagtggtagctttggggacagaggacatgggggttgcattgcaggagtcagcatggagcagggtgcttgtcacacagtttggatcttgtggtttcttacgcatggggccaaaataaacccaggtgaatggcctatgggagggagagagggaagggagcttgctagagccgaggtagagatgagttctttgagaaagagcgggcgtttgtgattgtgtagggggctgcccatagtggacatcctggtggatgtcctctgtccttaccatcctttctcttctctctccagggtaacaagatgctcaactatagtgctcccagtgcagggggttgcctgctggacagaaaggcagtgggcacccctgctggtgggggcttccctcggaggcactcagtcaccctgcccagctccaagttccaccagaaccagctcctcagcagcctcaagggtgagccagcccccgctctgagctcgcgagacagccgcttccgagaccgctccttctcggaagggggcgagcggctgctgcccacccagaagcagcccgggggcggccaggtcaactccagccgctacaagacggagctgtgccgcccctttgaggaaaacggtgcctgtaagtacggggacaagtgccagttcgcacacggcatccacgagctccgcagcctgacccgccaccccaagtacaagacggagctgtgccgcaccttccacaccatcggcttttgcccctacgggccccgctgccacttcatccacaacgctgaagagcgccgtgccctggccggggcccgggacctctccgctgaccgtccccgcctccagcatagctttagctttgctgggtttcccagtgccgctgccaccgccgctgccaccgggctgctggacagccccacgtccatcaccccaccccctattctgagcgccgatgacctcctgggctcacctaccctgcccgatggcaccaataacccttttgccttctccagccaggagctggcaagcctctttgcccctagcatggggctgcccgggggtggctccccgaccaccttcctcttccggcccatgtccgagtcccctcacatgtttgactctccccccagccctcaggattctctctcggaccaggagggctacctgagcagctccagcagcagccacagtggctcagactccccgaccttggacaactcaagacgcctgcccatcttcagcagactttccatctcagatgactaagccagggtagggagggacctcctgcctactccagcccctaccctgcacccacatcccataccctcttctccctacccatcccattccccacaggccctacattaacaaggttaagctcaacccctttcccccagcacctcagaatgtgccctccctctccccctcataaccccacctaacataaggacaagtcaatttgtcagtagcttcttctggcttgaaaccccctccctggattttatagcccacttaccatgcataacagacaagtcccatattttgtcagtagatgcctttttttttccggcttaagccttaagtgccaaatcacaagagaaaaagcagtaacagtttacagaagcaacttagtgccttgtaatctaactttgtcactgtgactacattacctcttcagcgccagagggcacccgtgggcctcccggagcctctgcccatggcggggtggagacccggaaccagcagccccctccactggcgacacaactgcaccttccctcatttcagtctcccgcacacttattcctcctcccctcttcccggtggcacctctccacctgtacccgcccccgccccaccaccccggccccttggaagagttgttgccagaccagggttttgggggaaacctgtcttgacattcaaaacctttttcttcccgatctgaacccctgttgactaatcttgcctgggtttgtgtaggtctgcaggaaggaaggctgaaaaagcggacgaagattttgacttaagtgggactttgtgatttaattttttcttttttttaagtggggaggaaggggaagctagatggactaggagagacttgattttggtgctaaagttccccagttcatatgtgacatctttttaaaaaaaataacaacaaaaaaaaaatgagagaaaagctaaaaaaaaaaaagtaaggggtgagcagttaatggtattcattccacatacaatatctgtgtaaaacgatttcctgtagaagtagctttaatggtttttgctctagaataccgtaggtctatccttagagcactcacgccatgctttcttccctgggttttaaacttcatataactttcagaaattggagagcaaaaattttgcttgtcactgcacatcaatataaaaaagcttatttaacttatcaaaacgtatttattgccaaactatgcttttttttgttaattttgttcatatttatcgggatgacaaatccatagaatatattcttttatgttaaattatgatcttcatattaatcttaaaattttgtgacgtgtctttttcctttttttccacagttttaatatattattcttcaacgacattttttgtaactttacacttttttggttattttattttaaaaaaatgaaaaattaatttaaaaaaatgcaaaaaactgttggattatttattttagaaattcccccctttgtgttggactgcaaattgagtttctttctctttaggcctttcacaactaggactgagaatgtatgtaaaagttctgtgacagtacagaaggaaaacaactttttatgtatagcttctaaaaggggaaaaaaaaaaaaaagagaaaccctttgacttccacgtgcccatctcaagacattccactcacagatttgaggttctggattccaggtctggagttttccaatgttaatgtaaacagaactggcacacacacattaagatgaatgtaattattattcctcttgctggtcactaccgtcgctttctatttctctttctttgtgtgaatttatttaaaagaaaaaaaaactttttgtaacgactatttgcagtttaaaaatcaataaaccccgttttttcaagaaacattgatggtggagctggttttacttggttttggtttgactttgccagtaaggttctccccttgtataccttgcaagtcctgggnagggggaggcggagagagagggctgtggctgtgggtggcggcatctctcatccctataagctaagcctatagctcccttccttgatgctggcagtttgctgcncttagaggggacggggtggaggttttctgcaaaggagcctgtacttcctgctgtattacttctgaaaagactgtgcagtgtgttagttgttggctgaatagcagcgggcccagccttgccgacacttgtgtggcc

SEQ ID NO: 445637 - DNA, 2122 bp, Homo sapiens
  misc_feature (1994)..(1994): n is a, c, g, or t
gtgtgttgggggtggtgagaatgcgctctcttcggcccgccccgtcctttccaaagaaacgtgctcataatggggtgacctaattacatcgcaatggaactcaatcttagccactccgcagcaccgggtttcataacagactcggcggcctcgagtgctgggaagaaacgtgcgagggccgaggggggcggcggagcccgcgtggaaatcggaaagaagcgcagccctgcgacttccgcctgggtcatcacgccagcagtcgggccaaggcgcagggggcgggtgggggacacgttaactttttatttgggtgggcggcatccaaacctaacagtatatattttatcattttcaagggagtcatgctccattgcgggcccttcggtttcgtggctcccatgtccccctctccacctcccgccaaaacggcgcagcgtgacaagccatatgttccactccggtgggggcgagagagaagcaacaataagttaaaagtgccgcctccctccacctctttaccttcattcttaccaaagtaaccttttttcattgttctagagtcttgaggtgtgtgtggggaggatggaggaggagggagggttgtggcgccgcccagaattcggagcgcgcgtggaaagtagtgagttgctcggtgggctttttctgggaggaaggggcattcaggaaggattagggttttcttgactaaaaagtttaaagattggatgcgtgaaaagaaacggcacgcctaggcctggtaaaacaaacaatcgtcccgggttgtggtctttttttgcggcgccccccacccgcccacacccggagagcgccggctgcaaagcgagcgcgagtgtcgacgcgtgcgacgcactaaattgtgccgcgctcgcgcccgccagaccatgtcctcctggggaaaaagtttccctagtccccccagcaccgcgccccaccctacgccccgctggaaaaaaaacagcaacataaaatcctaggcttgaacattctgtgcgtcccaaatttctaatgtcctcggcctgcccggtttgccgaagggagccgagtgtcgaagagaagtcgggaaaaggtaagttgtgcagacacttggggaagtttcaaggagaccgccagctcaagatggaaaccgcggcccgggcgctaaggacgggcttcagctcccgctggcaaaaagagaaagtcgagcccgccttcctgcccaacaaaaaacaacaacatgacaacaagaaccccggagggagtggaatgagtgacgtcacagccgcgctctgaggctgacaaaggagggggcgcgcccctcccgctctgcgcccgcgcggccccggagagggggcgcctgaagcgccgggtagggaagtcagccgacttgaaacttttcctcttaaagaaaaaaaaaaaaaagttgtgcgcggctcacagtggggtttttttttttccgccttcttttctcgtctcccctcccccttcttccttttgaaagtttcttctcctccccctgccccccctccccgcctgaccgcatggctgattcaactccagtgtcaatcaacttctttttcctcctcttcctcatttaaataagtttaaagctcctcctccccccggcccaccaaatctgaactttataaattgggctttgcgcgccccagcccggagtcagaaaggcgaggggcgccgggaactggcgtgtgggactccagacaggagaggctgcgccttccccgcaccgggaccttcgcgacacaccagatcctcgcccctggctcgcgcgaacgcacaggatgaccaccaccctcgtgtctgccaccatcttcgacttgagcgaagttttatgcaaggtaaaggggggcggagcatttgcttttcaaaaagtctttttcttttgccttaagaaagaacccccaaaagtttgggtcttggaaggcaatggggaaagtggtgcagcgagatgattcttttctcctccggcatttctnccaagtttgaaggaatttggccccgtccttcccaccctttgagtttcaacagttgctggcggggattacatgtgaatctggaggccagggttttgaggggcgaagtttgcctggcagggcagcccggg

SEQ ID NO: 445638 - DNA, 577 bp, Homo sapiens
ttttgtgttgttgttgtgtgtctgtttgtttttcgcaacagagtctggtttaattaataaatctttttggaagttttctttgacagatcctacataaataaatatagttttaaaagtggacttttaaacatcaggtttttcctttccgtcatggttttcctacgacaaggataaaagacccctcttccttatttgaaaattctcgcaatcaactagaactgaaattatgaacaccaactctgtccaaactatacttttgttacttcttggtgagcaagagaaatgaagaaaaccaaagaaaatcatgtgctattttaatgtaatttatcctatacttttttcaaaaagtcacactcacgtctgcttgagagttttagaggaatataactttcagaaattggagagcaaaaattttgcttgtcactgcacatcaatataaaaaagcttatttaacttatcaaaacgtatttattgccaaactatgcttttttttgttaattttgttcatatttatcgggatgaatatgaacaaaattaacaaaaaaaagcatagtttggcaataaatacgttttgata

SEQ ID NO: 445639 - DNA, 4684 bp, Homo sapiens
gtgtgttgggggtggtgagaatgcgctctcttcggcccgccccgtcctttccaaagaaacgtgctcataatggggtgacctaattacatcgcaatggaactcaatcttagccactccgcagcaccgggtttcataacagactcggcggcctcgagtgctgggaagaaacgtgcgagggccgaggggggcggcggagcccgcgtggaaatcggaaagaagcgcagccctgcgacttccgcctgggtcatcacgccagcagtcgggccaaggcgcagggggcgggtgggggacacgttaactttttatttgggtgggcggcatccaaacctaacagtatatattttatcattttcaagggagtcatgctccattgcgggcccttcggtttcgtggctcccatgtccccctctccacctcccgccaaaacggcgcagcgtgacaagccatatgttccactccggtgggggcgagagagaagcaacaataagttaaaagtgccgcctccctccacctctttaccttcattcttaccaaagtaaccttttttcattgttctagagtcttgaggtgtgtgtggggaggatggaggaggagggagggttgtggcgccgcccagaattcggagcgcgcgtggaaagtagtgagttgctcggtgggctttttctgggaggaaggggcattcaggaaggattagggttttcttgactaaaaagtttaaagattggatgcgtgaaaagaaacggcacgcctaggcctggtaaaacaaacaatcgtcccgggttgtggtctttttttgcggcgccccccacccgcccacacccggagagcgccggctgcaaagcgagcgcgagtgtcgacgcgtgcgacgcactaaattgtgccgcgctcgcgcccgccagaccatgtcctcctggggaaaaagtttccctagtccccccagcaccgcgccccaccctacgccccgctggaaaaaaaacagcaacataaaatcctaggcttgaacattctgtgcgtcccaaatttctaatgtcctcggcctgcccggtttgccgaagggagccgagtgtcgaagagaagtcgggaaaaggtaagttgtgcagacacttggggaagtttcaaggagaccgccagctcaagatggaaaccgcggcccgggcgctaaggacgggcttcagctcccgctggcaaaaagagaaagtcgagcccgccttcctgcccaacaaaaaacaacaacatgacaacaagaaccccggagggagtggaatgagtgacgtcacagccgcgctctgaggctgacaaaggagggggcgcgcccctcccgctctgcgcccgcgcggccccggagagggggcgcctgaagcgccgggtagggaagtcagccgacttgaaacttttcctcttaaagaaaaaaaaaaaaaagttgtgcgcggctcacagtggggtttttttttttccgccttcttttctcgtctcccctcccccttcttccttttgaaagtttcttctcctccccctgccccccctccccgcctgaccgcatggctgattcaactccagtgtcaatcaacttctttttcctcctcttcctcatttaaataagtttaaagctcctcctccccccggcccaccaaatctgaactttataaattgggctttgcgcgccccagcccggagtcagaaaggcgaggggcgccgggaactggcgtgtgggactccagacaggagaggctgcgccttccccgcaccgggaccttcgcgacacaccagatcctcgcccctggctcgcgcgaacgcacaggatgaccaccaccctcgtgtctgccaccatcttcgacttgagcgaagttttatgcaagggtaacaagatgctcaactatagtgctcccagtgcagggggttgcctgctggacagaaaggcagtgggcacccctgctggtgggggcttccctcggaggcactcagtcaccctgcccagctccaagttccaccagaaccagctcctcagcagcctcaagggtgagccagcccccgctctgagctcgcgagacagccgcttccgagaccgctccttctcggaagggggcgagcggctgctgcccacccagaagcagcccgggggcggccaggtcaactccagccgctacaagacggagctgtgccgcccctttgaggaaaacggtgcctgtaagtacggggacaagtgccagttcgcacacggcatccacgagctccgcagcctgacccgccaccccaagtacaagacggagctgtgccgcaccttccacaccatcggcttttgcccctacgggccccgctgccacttcatccacaacgctgaagagcgccgtgccctggccggggcccgggacctctccgctgaccgtccccgcctccagcatagctttagctttgctgggtttcccagtgccgctgccaccgccgctgccaccgggctgctggacagccccacgtccatcaccccaccccctattctgagcgccgatgacctcctgggctcacctaccctgcccgatggcaccaataacccttttgccttctccagccaggagctggcaagcctctttgcccctagcatggggctgcccgggggtggctccccgaccaccttcctcttccggcccatgtccgagtcccctcacatgtttgactctccccccagccctcaggattctctctcggaccaggagggctacctgagcagctccagcagcagccacagtggctcagactccccgaccttggacaactcaagacgcctgcccatcttcagcagactttccatctcagatgactaagccagggtagggagggacctcctgcctactccagcccctaccctgcacccacatcccataccctcttctccctacccatcccattccccacaggccctacattaacaaggttaagctcaacccctttcccccagcacctcagaatgtgccctccctctccccctcataaccccacctaacataaggacaagtcaatttgtcagtagcttcttctggcttgaaaccccctccctggattttatagcccacttaccatgcataacagacaagtcccatattttgtcagtagatgcctttttttttccggcttaagccttaagtgccaaatcacaagagaaaaagcagtaacagtttacagaagcaacttagtgccttgtaatctaactttgtcactgtgactacattacctcttcagcgccagagggcacccgtgggcctcccggagcctctgcccatggcggggtggagacccggaaccagcagccccctccactggcgacacaactgcaccttccctcatttcagtctcccgcacacttattcctcctcccctcttcccggtggcacctctccacctgtacccgcccccgccccaccaccccggccccttggaagagttgttgccagaccagggttttgggggaaacctgtcttgacattcaaaacctttttcttcccgatctgaacccctgttgactaatcttgcctgggtttgtgtaggtctgcaggaaggaaggctgaaaaagcggacgaagattttgacttaagtgggactttgtgatttaattttttcttttttttaagtggggaggaaggggaagctagatggactaggagagacttgattttggtgctaaagttccccagttcatatgtgacatctttttaaaaaaaataacaacaaaaaaaaaatgagagaaaagctaaaaaaaaaaaagtaaggggtgagcagttaatggtattcattccacatacaatatctgtgtaaaacgatttcctgtagaagtagctttaatggtttttgctctagaataccgtaggtctatccttagagcactcacgccatgctttcttccctgggttttaaacttcatataactttcagaaattggagagcaaaaattttgcttgtcactgcacatcaatataaaaaagcttatttaacttatcaaaacgtatttattgccaaactatgcttttttttgttaattttgttcatatttatcgggatgacaaatccatagaatatattcttttatgttaaattatgatcttcatattaatcttaaaattttgtgacgtgtctttttcctttttttccacagttttaatatattattcttcaacgacattttttgtaactttacacttttttggttattttattttaaaaaaatgaaaaattaatttaaaaaaatgcaaaaaactgttggattatttattttagaaattcccccctttgtgttggactgcaaattgagtttctttctctttaggcctttcacaactaggactgagaatgtatgtaaaagttctgtgacagtacagaaggaaaacaactttttatgtatagcttctaaaaggggaaaaaaaaaaaaaagagaaaccctttgacttccacgtgcccatctcaagacattccactcacagatttgaggttctggattccaggtctggagttttccaatgttaatgtaaacagaactggcacacacacattaagatgaatgtaattattattcctcttgctggtcactaccgtcgctttctatttctctttctttgtgtgaatttatttaaaagaaaaaaaaactttttgtaacgactatttgcagtttaaaaatcaataaaccccgttttttcaagaa

SEQ ID NO: 445640 - DNA, 4626 bp, Homo sapiens
gtgtgttgggggtggtgagaatgcgctctcttcggcccgccccgtcctttccaaagaaacgtgctcataatggggtgacctaattacatcgcaatggaactcaatcttagccactccgcagcaccgggtttcataacagactcggcggcctcgagtgctgggaagaaacgtgcgagggccgaggggggcggcggagcccgcgtggaaatcggaaagaagcgcagccctgcgacttccgcctgggtcatcacgccagcagtcgggccaaggcgcagggggcgggtgggggacacgttaactttttatttgggtgggcggcatccaaacctaacagtatatattttatcattttcaagggagtcatgctccattgcgggcccttcggtttcgtggctcccatgtccccctctccacctcccgccaaaacggcgcagcgtgacaagccatatgttccactccggtgggggcgagagagaagcaacaataagttaaaagtgccgcctccctccacctctttaccttcattcttaccaaagtaaccttttttcattgttctagagtcttgaggtgtgtgtggggaggatggaggaggagggagggttgtggcgccgcccagaattcggagcgcgcgtggaaagtagtgagttgctcggtgggctttttctgggaggaaggggcattcaggaaggattagggttttcttgactaaaaagtttaaagattggatgcgtgaaaagaaacggcacgcctaggcctggtaaaacaaacaatcgtcccgggttgtggtctttttttgcggcgccccccacccgcccacacccggagagcgccggctgcaaagcgagcgcgagtgtcgacgcgtgcgacgcactaaattgtgccgcgctcgcgcccgccagaccatgtcctcctggggaaaaagtttccctagtccccccagcaccgcgccccaccctacgccccgctggaaaaaaaacagcaacataaaatcctaggcttgaacattctgtgcgtcccaaatttctaatgtcctcggcctgcccggtttgccgaagggagccgagtgtcgaagagaagtcgggaaaaggtaagttgtgcagacacttggggaagtttcaaggagaccgccagctcaagatggaaaccgcggcccgggcgctaaggacgggcttcagctcccgctggcaaaaagagaaagtcgagcccgccttcctgcccaacaaaaaacaacaacatgacaacaagaaccccggagggagtggaatgagtgacgtcacagccgcgctctgaggctgacaaaggagggggcgcgcccctcccgctctgcgcccgcgcggccccggagagggggcgcctgaagcgccgggtagggaagtcagccgacttgaaacttttcctcttaaagaaaaaaaaaaaaaagttgtgcgcggctcacagtggggtttttttttttccgccttcttttctcgtctcccctcccccttcttccttttgaaagtttcttctcctccccctgccccccctccccgcctgaccgcatggctgattcaactccagtgtcaatcaacttctttttcctcctcttcctcatttaaataagtttaaagctcctcctccccccggcccaccaaatctgaactttataaattgggctttgcgcgccccagcccggagtcagaaaggcgaggggcgccgggaactggcgtgtgggactccagacaggagaggctgcgccttccccgcaccgggaccttcgcgacacaccagatcctcgcccctggctcgcgcgaacgcacaggatgaccaccaccctcgtgtctgccaccatcttcgacttgagcgaagttttatgcaagggtaacaagatgctcaactatagtgctcccagtgcagggggttgcctgctggacagaaaggcagtgggcacccctgctggtgggggcttccctcggaggcactcagtcaccctgcccagctccaagttccaccagaaccagctcctcagcagcctcaagggtgagccagcccccgctctgagctcgcgagacagccgcttccgagaccgctccttctcggaagggggcgagcggctgctgcccacccagaagcagcccgggggcggccaggtcaactccagccgctacaagacggagctgtgccgcccctttgaggaaaacggtgcctgtaagtacggggacaagtgccagttcgcacacggcatccacgagctccgcagcctgacccgccaccccaagtacaagacggagctgtgccgcaccttccacaccatcggcttttgcccctacgggccccgctgccacttcatccacaacgctgaagagcgccgtgccctggccggggcccgggacctctccgctgaccgtccccgcctccagcatagctttagctttgctgggtttcccagtgccgctgccaccgccgctgccaccgggctgctggacagccccacgtccatcaccccaccccctattctgagcgccgatgacctcctgggctcacctaccctgcccgatggcaccaataacccttttgccttctccagccaggagctggcaagcctctttgcccctagcatggggctgcccgggggtggctccccgaccaccttcctcttccggcccatgtccgagtcccctcacatgtttgactctccccccagccctcaggattctctctcggaccaggagggctacctgagcagctccagcagcagccacagtggctcagactccccgaccttggacaactcaagacgcctgcccatcttcagcagactttccatctcagatgactaagccagggtagggagggacctcctgcctactccagcccctaccctgcacccacatcccataccctcttctccctacccatcccattccccacaggccctacattaacaaggttaagctcaacccctttcccccagcacctcagaatgtgccctccctctccccctcataaccccacctaacataaggacaagtcaatttgtcagtagcttcttctggcttgaaaccccctccctggattttatagcccacttaccatgcataacagacaagtcccatattttgtcagtagatgcctttttttttccggcttaagccttaagtgccaaatcacaagagaaaaagcagtaacagtttacagaagcaacttagtgccttgtaatctaactttgtcactgtgactacattacctcttcagcgccagagggcacccgtgggcctcccggagcctctgcccatggcggggtggagacccggaaccagcagccccctccactggcgacacaactgcaccttccctcatttcagtctcccgcacacttattcctcctcccctcttcccggtggcacctctccacctgtacccgcccccgccccaccaccccggccccttggaagagttgttgccagaccagggttttgggggaaacctgtcttgacattcaaaacctttttcttcccgatctgaacccctgttgactaatcttgcctgggtttgtgtaggtctgcaggaaggaaggctgaaaaagcggacgaagattttgacttaagtgggactttgtgatttaattttttcttttttttaagtggggaggaaggggaagctagatggactaggagagacttgattttggtgctaaagttccccagttcatatgtgacatctttttaaaaaaaataacaacaaaaaaaaaatgagagaaaagctaaaaaaaagatttcctgtagaagtagctttaatggtttttgctctagaataccgtaggtctatccttagagcactcacgccatgctttcttccctgggttttaaacttcatataactttcagaaattggagagcaaaaattttgcttgtcactgcacatcaatataaaaaagcttatttaacttatcaaaacgtatttattgccaaactatgcttttttttgttaattttgttcatatttatcgggatgacaaatccatagaatatattcttttatgttaaattatgatcttcatattaatcttaaaattttgtgacgtgtctttttcctttttttccacagttttaatatattattcttcaacgacattttttgtaactttacacttttttggttattttattttaaaaaaatgaaaaattaatttaaaaaaatgcaaaaaactgttggattatttattttagaaattcccccctttgtgttggactgcaaattgagtttctttctctttaggcctttcacaactaggactgagaatgtatgtaaaagttctgtgacagtacagaaggaaaacaactttttatgtatagcttctaaaaggggaaaaaaaaaaaaaagagaaaccctttgacttccacgtgcccatctcaagacattccactcacagatttgaggttctggattccaggtctggagttttccaatgttaatgtaaacagaactggcacacacacattaagatgaatgtaattattattcctcttgctggtcactaccgtcgctttctatttctctttctttgtgtgaatttatttaaaagaaaaaaaaactttttgtaacgactatttgcagtttaaaaatcaataaaccccgttttttcaagaa

SEQ ID NO: 445641 - DNA, 4630 bp, Homo sapiens
gtgtgttgggggtggtgagaatgcgctctcttcggcccgccccgtcctttccaaagaaacgtgctcataatggggtgacctaattacatcgcaatggaactcaatcttagccactccgcagcaccgggtttcataacagactcggcggcctcgagtgctgggaagaaacgtgcgagggccgaggggggcggcggagcccgcgtggaaatcggaaagaagcgcagccctgcgacttccgcctgggtcatcacgccagcagtcgggccaaggcgcagggggcgggtgggggacacgttaactttttatttgggtgggcggcatccaaacctaacagtatatattttatcattttcaagggagtcatgctccattgcgggcccttcggtttcgtggctcccatgtccccctctccacctcccgccaaaacggcgcagcgtgacaagccatatgttccactccggtgggggcgagagagaagcaacaataagttaaaagtgccgcctccctccacctctttaccttcattcttaccaaagtaaccttttttcattgttctagagtcttgaggtgtgtgtggggaggatggaggaggagggagggttgtggcgccgcccagaattcggagcgcgcgtggaaagtagtgagttgctcggtgggctttttctgggaggaaggggcattcaggaaggattagggttttcttgactaaaaagtttaaagattggatgcgtgaaaagaaacggcacgcctaggcctggtaaaacaaacaatcgtcccgggttgtggtctttttttgcggcgccccccacccgcccacacccggagagcgccggctgcaaagcgagcgcgagtgtcgacgcgtgcgacgcactaaattgtgccgcgctcgcgcccgccagaccatgtcctcctggggaaaaagtttccctagtccccccagcaccgcgccccaccctacgccccgctggaaaaaaaacagcaacataaaatcctaggcttgaacattctgtgcgtcccaaatttctaatgtcctcggcctgcccggtttgccgaagggagccgagtgtcgaagagaagtcgggaaaaggtaagttgtgcagacacttggggaagtttcaaggagaccgccagctcaagatggaaaccgcggcccgggcgctaaggacgggcttcagctcccgctggcaaaaagagaaagtcgagcccgccttcctgcccaacaaaaaacaacaacatgacaacaagaaccccggagggagtggaatgagtgacgtcacagccgcgctctgaggctgacaaaggagggggcgcgcccctcccgctctgcgcccgcgcggccccggagagggggcgcctgaagcgccgggtagggaagtcagccgacttgaaacttttcctcttaaagaaaaaaaaaaaaaagttgtgcgcggctcacagtggggtttttttttttccgccttcttttctcgtctcccctcccccttcttccttttgaaagtttcttctcctccccctgccccccctccccgcctgaccgcatggctgattcaactccagtgtcaatcaacttctttttcctcctcttcctcatttaaataagtttaaagctcctcctccccccggcccaccaaatctgaactttataaattgggctttgcgcgccccagcccggagtcagaaaggcgaggggcgccgggaactggcgtgtgggactccagacaggagaggctgcgccttccccgcaccgggaccttcgcgacacaccagatcctcgcccctggctcgcgcgaacgcacaggatgaccaccaccctcgtgtctgccaccatcttcgacttgagcgaagttttatgcaagggtaacaagatgctcaactatagtgctcccagtgcagggggttgcctgctggacagaaaggcagtgggcacccctgctggtgggggcttccctcggaggcactcagtcaccctgcccagctccaagttccaccagaaccagctcctcagcagcctcaagggtgagccagcccccgctctgagctcgcgagacagccgcttccgagaccgctccttctcggaagggggcgagcggctgctgcccacccagaagcagcccgggggcggccaggtcaactccagccgctacaagacggagctgtgccgcccctttgaggaaaacggtgcctgtaagtacggggacaagtgccagttcgcacacggcatccacgagctccgcagcctgacccgccaccccaagtacaagacggagctgtgccgcaccttccacaccatcggcttttgcccctacgggccccgctgccacttcatccacaacgctgaagagcgccgtgccctggccggggcccgggacctctccgctgaccgtccccgcctccagcatagctttagctttgctgggtttcccagtgccgctgccaccgccgctgccaccgggctgctggacagccccacgtccatcaccccaccccctattctgagcgccgatgacctcctgggctcacctaccctgcccgatggcaccaataacccttttgccttctccagccaggagctggcaagcctctttgcccctagcatggggctgcccgggggtggctccccgaccaccttcctcttccggcccatgtccgagtcccctcacatgtttgactctccccccagccctcaggattctctctcggaccaggagggctacctgagcagctccagcagcagccacagtggctcagactccccgaccttggacaactcaagacgcctgcccatcttcagcagactttccatctcagatgactaagccagggtagggagggacctcctgcctactccagcccctaccctgcacccacatcccataccctcttctccctacccatcccattccccacaggccctacattaacaaggttaagctcaacccctttcccccagcacctcagaatgtgccctccctctccccctcataaccccacctaacataaggacaagtcaatttgtcagtagcttcttctggcttgaaaccccctccctggattttatagcccacttaccatgcataacagacaagtcccatattttgtcagtagatgcctttttttttccggcttaagccttaagtgccaaatcacaagagaaaaagcagtaacagtttacagaagcaacttagtgccttgtaatctaactttgtcactgtgactacattacctcttcagcgccagagggcacccgtgggcctcccggagcctctgcccatggcggggtggagacccggaaccagcagccccctccactggcgacacaactgcaccttccctcatttcagtctcccgcacacttattcctcctcccctcttcccggtggcacctctccacctgtacccgcccccgccccaccaccccggccccttggaagagttgttgccagaccagggttttgggggaaacctgtcttgacattcaaaacctttttcttcccgatctgaacccctgttgactaatcttgcctgggtttgtgtaggtctgcaggaaggaaggctgaaaaagcggacgaagattttgacttaagtgggactttgtgatttaattttttcttttttttaagtggggaggaaggggaagctagatggactaggagagacttgattttggtgctaaagttccccagttcatatgtgacatctttttaaaaaaaataacaacaaaaaaaaaatgagagaaaagctaaaaaaaaaaaagtaaggggtgagcagttaatggtattcattccacatacaatatctgtgtaaaacgatttcctgtagaagtagctttaatggtttttgctctagaataccgtaggtctatccttagagcactcacgccatgctttcttccctgggttttaaacttcatataactttcagaaattggagagcaaaaattttgcttgtcactgcacatcaatataaaaaagcttatttaacttatctcgggatgacaaatccatagaatatattcttttatgttaaattatgatcttcatattaatcttaaaattttgtgacgtgtctttttcctttttttccacagttttaatatattattcttcaacgacattttttgtaactttacacttttttggttattttattttaaaaaaatgaaaaattaatttaaaaaaatgcaaaaaactgttggattatttattttagaaattcccccctttgtgttggactgcaaattgagtttctttctctttaggcctttcacaactaggactgagaatgtatgtaaaagttctgtgacagtacagaaggaaaacaactttttatgtatagcttctaaaaggggaaaaaaaaaaaaaagagaaaccctttgacttccacgtgcccatctcaagacattccactcacagatttgaggttctggattccaggtctggagttttccaatgttaatgtaaacagaactggcacacacacattaagatgaatgtaattattattcctcttgctggtcactaccgtcgctttctatttctctttctttgtgtgaatttatttaaaagaaaaaaaaactttttgtaacgactatttgcagtttaaaaatcaataaaccccgttttttcaagaa

SEQ ID NO: 445642 - DNA, 3972 bp, Homo sapiens
gtgtgttgggggtggtgagaatgcgctctcttcggcccgccccgtcctttccaaagaaacgtgctcataatggggtgacctaattacatcgcaatggaactcaatcttagccactccgcagcaccgggtttcataacagactcggcggcctcgagtgctgggaagaaacgtgcgagggccgaggggggcggcggagcccgcgtggaaatcggaaagaagcgcagccctgcgacttccgcctgggtcatcacgccagcagtcgggccaaggcgcagggggcgggtgggggacacgttaactttttatttgggtgggcggcatccaaacctaacagtatatattttatcattttcaagggagtcatgctccattgcgggcccttcggtttcgtggctcccatgtccccctctccacctcccgccaaaacggcgcagcgtgacaagccatatgttccactccggtgggggcgagagagaagcaacaataagttaaaagtgccgcctccctccacctctttaccttcattcttaccaaagtaaccttttttcattgttctagagtcttgaggtgtgtgtggggaggatggaggaggagggagggttgtggcgccgcccagaattcggagcgcgcgtggaaagtagtgagttgctcggtgggctttttctgggaggaaggggcattcaggaaggattagggttttcttgactaaaaagtttaaagattggatgcgtgaaaagaaacggcacgcctaggcctggtaaaacaaacaatcgtcccgggttgtggtctttttttgcggcgccccccacccgcccacacccggagagcgccggctgcaaagcgagcgcgagtgtcgacgcgtgcgacgcactaaattgtgccgcgctcgcgcccgccagaccatgtcctcctggggaaaaagtttccctagtccccccagcaccgcgccccaccctacgccccgctggaaaaaaaacagcaacataaaatcctaggcttgaacattctgtgcgtcccaaatttctaatgtcctcggcctgcccggtttgccgaagggagccgagtgtcgaagagaagtcgggaaaaggtaagttgtgcagacacttggggaagtttcaaggagaccgccagctcaagatggaaaccgcggcccgggcgctaaggacgggcttcagctcccgctggcaaaaagagaaagtcgagcccgccttcctgcccaacaaaaaacaacaacatgacaacaagaaccccggagggagtggaatgagtgacgtcacagccgcgctctgaggctgacaaaggagggggcgcgcccctcccgctctgcgcccgcgcggccccggagagggggcgcctgaagcgccgggtagggaagtcagccgacttgaaacttttcctcttaaagaaaaaaaaaaaaaagttgtgcgcggctcacagtggggtttttttttttccgccttcttttctcgtctcccctcccccttcttccttttgaaagtttcttctcctccccctgccccccctccccgcctgaccgcatggctgattcaactccagtgtcaatcaacttctttttcctcctcttcctcatttaaataagtttaaagctcctcctccccccggcccaccaaatctgaactttataaattgggctttgcgcgccccagcccggagtcagaaaggcgaggggcgccgggaactggcgtgtgggactccagacaggagaggctgcgccttccccgcaccgggaccttcgcgacacaccagatcctcgcccctggctcgcgcgaacgcacaggatgaccaccaccctcgtgtctgccaccatcttcgacttgagcgaagttttatgcaagggtaacaagatgctcaactatagtgctcccagtgcagggggttgcctgctggacagaaaggcagtgggcacccctgctggtgggggcttccctcggaggcactcagtcaccctgcccagctccaagttccaccagaaccagctcctcagcagcctcaagggtgagccagcccccgctctgagctcgcgagacagccgcttccgagaccgctccttctcggaagggggcgagcggctgctgcccacccagaagcagcccgggggcggccaggtcaactccagccgctacaagacggagctgtgccgcccctttgaggaaaacggtgcctgtaagtacggggacaagtgccagttcgcacacggcatccacgagctccgcagcctgacccgccaccccaagtacaagacggagctgtgccgcaccttccacaccatcggcttttgcccctacgggccccgctgccacttcatccacaacgctgaagagcgccgtgccctggccggggcccgggacctctccgctgaccgtccccgcctccagcatagctttagctttgctgggtttcccagtgccgctgccaccgccgctgccaccgggctgctggacagccccacgtccatcaccccaccccctattctgagcgccgatgacctcctgggctcacctaccctgcccgatggcaccaataacccttttgccttctccagccaggagctggcaagcctctttgcccctagcatggggctgcccgggggtggctccccgaccaccttcctcttccggcccatgtccgagtcccctcacatgtttgactctccccccagccctcaggattctctctcggaccaggagggctacctgagcagctccagcagcagccacagtggctcagactccccgaccttggacaactcaagacgcctgcccatcttcagcagactttccatctcagatgactaagccagggtatctgcaggaaggaaggctgaaaaagcggacgaagattttgacttaagtgggactttgtgatttaattttttcttttttttaagtggggaggaaggggaagctagatggactaggagagacttgattttggtgctaaagttccccagttcatatgtgacatctttttaaaaaaaataacaacaaaaaaaaaatgagagaaaagctaaaaaaaaaaaagtaaggggtgagcagttaatggtattcattccacatacaatatctgtgtaaaacgatttcctgtagaagtagctttaatggtttttgctctagaataccgtaggtctatccttagagcactcacgccatgctttcttccctgggttttaaacttcatataactttcagaaattggagagcaaaaattttgcttgtcactgcacatcaatataaaaaagcttatttaacttatcaaaacgtatttattgccaaactatgcttttttttgttaattttgttcatatttatcgggatgacaaatccatagaatatattcttttatgttaaattatgatcttcatattaatcttaaaattttgtgacgtgtctttttcctttttttccacagttttaatatattattcttcaacgacattttttgtaactttacacttttttggttattttattttaaaaaaatgaaaaattaatttaaaaaaatgcaaaaaactgttggattatttattttagaaattcccccctttgtgttggactgcaaattgagtttctttctctttaggcctttcacaactaggactgagaatgtatgtaaaagttctgtgacagtacagaaggaaaacaactttttatgtatagcttctaaaaggggaaaaaaaaaaaaaagagaaaccctttgacttccacgtgcccatctcaagacattccactcacagatttgaggttctggattccaggtctggagttttccaatgttaatgtaaacagaactggcacacacacattaagatgaatgtaattattattcctcttgctggtcactaccgtcgctttctatttctctttctttgtgtgaatttatttaaaagaaaaaaaaactttttgtaacgactatttgcagtttaaaaatcaataaaccccgttttttcaagaa

SEQ ID NO: 445643 - DNA, 5111 bp, Homo sapiens
  misc_feature (4929)..(4929): n is a, c, g, or t
gtgtgttgggggtggtgagaatgcgctctcttcggcccgccccgtcctttccaaagaaacgtgctcataatggggtgacctaattacatcgcaatggaactcaatcttagccactccgcagcaccgggtttcataacagactcggcggcctcgagtgctgggaagaaacgtgcgagggccgaggggggcggcggagcccgcgtggaaatcggaaagaagcgcagccctgcgacttccgcctgggtcatcacgccagcagtcgggccaaggcgcagggggcgggtgggggacacgttaactttttatttgggtgggcggcatccaaacctaacagtatatattttatcattttcaagggagtcatgctccattgcgggcccttcggtttcgtggctcccatgtccccctctccacctcccgccaaaacggcgcagcgtgacaagccatatgttccactccggtgggggcgagagagaagcaacaataagttaaaagtgccgcctccctccacctctttaccttcattcttaccaaagtaaccttttttcattgttctagagtcttgaggtgtgtgtggggaggatggaggaggagggagggttgtggcgccgcccagaattcggagcgcgcgtggaaagtagtgagttgctcggtgggctttttctgggaggaaggggcattcaggaaggattagggttttcttgactaaaaagtttaaagattggatgcgtgaaaagaaacggcacgcctaggcctggtaaaacaaacaatcgtcccgggttgtggtctttttttgcggcgccccccacccgcccacacccggagagcgccggctgcaaagcgagcgcgagtgtcgacgcgtgcgacgcactaaattgtgccgcgctcgcgcccgccagaccatgtcctcctggggaaaaagtttccctagtccccccagcaccgcgccccaccctacgccccgctggaaaaaaaacagcaacataaaatcctaggcttgaacattctgtgcgtcccaaatttctaatgtcctcggcctgcccggtttgccgaagggagccgagtgtcgaagagaagtcgggaaaaggtaagttgtgcagacacttggggaagtttcaaggagaccgccagctcaagatggaaaccgcggcccgggcgctaaggacgggcttcagctcccgctggcaaaaagagaaagtcgagcccgccttcctgcccaacaaaaaacaacaacatgacaacaagaaccccggagggagtggaatgagtgacgtcacagccgcgctctgaggctgacaaaggagggggcgcgcccctcccgctctgcgcccgcgcggccccggagagggggcgcctgaagcgccgggtagggaagtcagccgacttgaaacttttcctcttaaagaaaaaaaaaaaaaagttgtgcgcggctcacagtggggtttttttttttccgccttcttttctcgtctcccctcccccttcttccttttgaaagtttcttctcctccccctgccccccctccccgcctgaccgcatggctgattcaactccagtgtcaatcaacttctttttcctcctcttcctcatttaaataagtttaaagctcctcctccccccggcccaccaaatctgaactttataaattgggctttgcgcgccccagcccggagtcagaaaggcgaggggcgccgggaactggcgtgtgggactccagacaggagaggctgcgccttccccgcaccgggaccttcgcgacacaccagatcctcgcccctggctcgcgcgaacgcacaggatgaccaccaccctcgtgtctgccaccatcttcgacttgagcgaagttttatgcaagggtaacaagatgctcaactatagtgctcccagtgcagggggttgcctgctggacagaaaggcagtgggcacccctgctggtgggggcttccctcggaggcactcagtcaccctgcccagctccaagttccaccagaaccagctcctcagcagcctcaagggtgagccagcccccgctctgagctcgcgagacagccgcttccgagaccgctccttctcggaagggggcgagcggctgctgcccacccagaagcagcccgggggcggccaggtcaactccagccgctacaagacggagctgtgccgcccctttgaggaaaacggtgcctgtaagtacggggacaagtgccagttcgcacacggcatccacgagctccgcagcctgacccgccaccccaagtacaagacggagctgtgccgcaccttccacaccatcggcttttgcccctacgggccccgctgccacttcatccacaacgctgaagagcgccgtgccctggccggggcccgggacctctccgctgaccgtccccgcctccagcatagctttagctttgctgggtttcccagtgccgctgccaccgccgctgccaccgggctgctggacagccccacgtccatcaccccaccccctattctgagcgccgatgacctcctgggctcacctaccctgcccgatggcaccaataacccttttgccttctccagccaggagctggcaagcctctttgcccctagcatggggctgcccgggggtggctccccgaccaccttcctcttccggcccatgtccgagtcccctcacatgtttgactctccccccagccctcaggattctctctcggaccaggagggctacctgagcagctccagcagcagccacagtggctcagactccccgaccttggacaactcaagacgcctgcccatcttcagcagactttccatctcagatgactaagccagggtagggagggacctcctgcctactccagcccctaccctgcacccacatcccataccctcttctccctacccatcccattccccacaggccctacattaacaaggttaagctcaacccctttcccccagcacctcagaatgtgccctccctctccccctcataaccccacctaacataaggacaagtcaatttgtcagtagcttcttctggcttgaaaccccctccctggattttatagcccacttaccatgcataacagacaagtcccatattttgtcagtagatgcctttttttttccggcttaagccttaagtgccaaatcacaagagaaaaagcagtaacagtttacagaagcaacttagtgccttgtaatctaactttgtcactgtgactacattacctcttcagcgccagagggcacccgtgggcctcccggagcctctgcccatggcggggtggagacccggaaccagcagccccctccactggcgacacaactgcaccttccctcatttcagtctcccgcacacttattcctcctcccctcttcccggtggcacctctccacctgtacccgcccccgccccaccaccccggccccttggaagagttgttgccagaccagggttttgggggaaacctgtcttgacattcaaaacctttttcttcccgatctgaacccctgttgactaatcttgcctgggtttgtgtaggtctgcaggaaggaaggctgaaaaagcggacgaagattttgacttaagtgggactttgtgatttaattttttcttttttttaagtggggaggaaggggaagctagatggactaggagagacttgattttggtgctaaagttccccagttcatatgtgacatctttttaaaaaaaataacaacaaaaaaaaaatgagagaaaagctaaaaaaaaaaaagtaaggggtgagcagttaatggtattcattccacatacaatatctgtgtaaaacgatttcctgtagaagtagctttaatggtttttgctctagaataccgtaggtctatccttagagcactcacgccatgctttcttccctgggttttaaacttcatataactttcagaaattggagagcaaaaattttgcttgtcactgcacatcaatataaaaaagcttatttaacttatcaaaacgtatttattgccaaactatgcttttttttgttaattttgttcatatttatcgggatgacaaatccatagaatatattcttttatgttaaattatgatcttcatattaatcttaaaattttgtgacgtgtctttttcctttttttccacagttttaatatattattcttcaacgacattttttgtaactttacacttttttggttattttattttaaaaaaatgaaaaattaatttaaaaaaatgcaaaaaactgttggattatttattttagaaattcccccctttgtgttggactgcaaattgagtttctttctctttaggcctttcacaactaggactgagaatgtatgtaaaagttctgtgacagtacagaaggaaaacaactttttatgtatagcttctaaaaggggaaaaaaaaaaaaaagagaaaccctttgacttccacgtgcccatctcaagacattccactcacagatttgaggttctggattccaggtctggagttttccaatgttaatgtaaacagaactggcacacacacattaagatgaatgtaattattattcctcttgctggtcactaccgtcgctttctatttctctttctttgtgtgaatttatttaaaagaaaaaaaaactttttgtaacgactatttgcagtttaaaaatcaataaaccccgttttttcaagaaaaaaaaaacaaaaataaaaaaaaaaaaaacacacacaaaaacaaaaaaacacataacaaaaaaaaacaaaaaataataaaaaaaaacaaaaaaaacaaaaaaaaaaaaaaaaaaaaaaaagagggggggccgccgccccaaaagaattctcccccgcgggggcgcccccagtttatagcgcgaccgaccaccacgtctctgtgtgatgaccaaagggggcgccccattatgatgaggagccgcantctatattaactaacgccagacggcgcccgacccgccggcggtgtataaaaacagcgcgctagagaactggggcagaacaaccaatgctgaccaaccaggcggcaccctggtgggacagaagacgaccccctctacccccggggggggggacgcacaatattggggcaacactcccaccaca

SEQ ID NO: 445644 - DNA, 4630 bp, Homo sapiens
gtgtgttgggggtggtgagaatgcgctctcttcggcccgccccgtcctttccaaagaaacgtgctcataatggggtgacctaattacatcgcaatggaactcaatcttagccactccgcagcaccgggtttcataacagactcggcggcctcgagtgctgggaagaaacgtgcgagggccgaggggggcggcggagcccgcgtggaaatcggaaagaagcgcagccctgcgacttccgcctgggtcatcacgccagcagtcgggccaaggcgcagggggcgggtgggggacacgttaactttttatttgggtgggcggcatccaaacctaacagtatatattttatcattttcaagggagtcatgctccattgcgggcccttcggtttcgtggctcccatgtccccctctccacctcccgccaaaacggcgcagcgtgacaagccatatgttccactccggtgggggcgagagagaagcaacaataagttaaaagtgccgcctccctccacctctttaccttcattcttaccaaagtaaccttttttcattgttctagagtcttgaggtgtgtgtggggaggatggaggaggagggagggttgtggcgccgcccagaattcggagcgcgcgtggaaagtagtgagttgctcggtgggctttttctgggaggaaggggcattcaggaaggattagggttttcttgactaaaaagtttaaagattggatgcgtgaaaagaaacggcacgcctaggcctggtaaaacaaacaatcgtcccgggttgtggtctttttttgcggcgccccccacccgcccacacccggagagcgccggctgcaaagcgagcgcgagtgtcgacgcgtgcgacgcactaaattgtgccgcgctcgcgcccgccagaccatgtcctcctggggaaaaagtttccctagtccccccagcaccgcgccccaccctacgccccgctggaaaaaaaacagcaacataaaatcctaggcttgaacattctgtgcgtcccaaatttctaatgtcctcggcctgcccggtttgccgaagggagccgagtgtcgaagagaagtcgggaaaaggtaagttgtgcagacacttggggaagtttcaaggagaccgccagctcaagatggaaaccgcggcccgggcgctaaggacgggcttcagctcccgctggcaaaaagagaaagtcgagcccgccttcctgcccaacaaaaaacaacaacatgacaacaagaaccccggagggagtggaatgagtgacgtcacagccgcgctctgaggctgacaaaggagggggcgcgcccctcccgctctgcgcccgcgcggccccggagagggggcgcctgaagcgccgggtagggaagtcagccgacttgaaacttttcctcttaaagaaaaaaaaaaaaaagttgtgcgcggctcacagtggggtttttttttttccgccttcttttctcgtctcccctcccccttcttccttttgaaagtttcttctcctccccctgccccccctccccgcctgaccgcatggctgattcaactccagtgtcaatcaacttctttttcctcctcttcctcatttaaataagtttaaagctcctcctccccccggcccaccaaatctgaactttataaattgggctttgcgcgccccagcccggagtcagaaaggcgaggggcgccgggaactggcgtgtgggactccagacaggagaggctgcgccttccccgcaccgggaccttcgcgacacaccagatcctcgcccctggctcgcgcgaacgcacaggatgaccaccaccctcgtgtctgccaccatcttcgacttgagcgaagttttatgcaagggtaacaagatgctcaactatagtgctcccagtgcagggggttgcctgctggacagaaaggcagtgggcacccctgctggtgggggcttccctcggaggcactcagtcaccctgcccagctccaagttccaccagaaccagctcctcagcagcctcaagggtgagccagcccccgctctgagctcgcgagacagccgcttccgagaccgctccttctcggaagggggcgagcggctgctgcccacccagaagcagcccgggggcggccaggtcaactccagccgctacaagacggagctgtgccgcccctttgaggaaaacggtgcctgtaagtacggggacaagtgccagttcgcacacggcatccacgagctccgcagcctgacccgccaccccaagtacaagacggagctgtgccgcaccttccacaccatcggcttttgcccctacgggccccgctgccacttcatccacaacgctgaagagcgccgtgccctggccggggcccgggacctctccgctgaccgtccccgcctccagcatagctttagctttgctgggtttcccagtgccgctgccaccgccgctgccaccgggctgctggacagccccacgtccatcaccccaccccctattctgagcgccgatgacctcctgggctcacctaccctgcccgatggcaccaataacccttttgccttctccagccaggagctggcaagcctctttgcccctagcatggggctgcccgggggtggctccccgaccaccttcctcttccggcccatgtccgagtcccctcacatgtttgactctccccccagccctcaggattctctctcggaccaggagggctacctgagcagctccagcagcagccacagtggctcagactccccgaccttggacaactcaagacgcctgcccatcttcagcagactttccatctcagatgactaagccagggtagggagggacctcctgcctactccagcccctaccctgcacccacatcccataccctcttctccctacccatcccattccccacaggccctacattaacaaggttaagctcaacccctttcccccagcacctcagaatgtgccctccctctccccctcataaccccacctaacataaggacaagtcaatttgtcagtagcttcttctggcttgaaaccccctccctggattttatagcccacttaccatgcataacagacaagtcccatattttgtcagtagatgcctttttttttccggcttaagccttaagtgccaaatcacaagagaaaaagcagtaacagtttacagaagcaacttagtgccttgtaatctaactttgtcactgtgactacattacctcttcagcgccagagggcacccgtgggcctcccggagcctctgcccatggcggggtggagacccggaaccagcagccccctccactggcgacacaactgcaccttccctcatttcagtctcccgcacacttattcctcctcccctcttcccggtggcacctctccacctgtacccgcccccgccccaccaccccggccccttggaagagttgttgccagaccagggttttgggggaaacctgtcttgacattcaaaacctttttcttcccgatctgaacccctgttgactaatcttgcctgggtttgtgtaggtctgcaggaaggaaggctgaaaaagcggacgaagattttgacttaagtgggactttgtgatttaattttttcttttttttaagtggggaggaaggggaagctagatggactaggagagacttgattttggtgctaaagttccccagttcatatgtgacatctttttaaaaaaaataacaacaaaaaaaaaatgagagaaaagctaaaaaaaaaaaagtaaggggtgagcagttaatggtattcattccacatacaatatctgtgtaaaacgatttcctgtagaagtagctttaatggtttttgctctagaataccgtaggtctatccttagagcactcacgccatgctttcttccctgggttttaaacttcatataactttcagaaattggagagcaaaaattttgcttgtcactgcacatcaatataaaaaagcttatttaacttatcaaaacgtatttattgccaaactatgcttttttttgttaattttgttcatatttatcgggatgacaaatccatagaatatattcttttatgttaaattatgatcttcatattaatcttaaaattttgtgacgtgtctttttcctttttttccacagttttaatatattattcttcaacgacattttttgtaactttacacttttttggttattttattttaaaaaaatgaaaaattaatttaaaaaaatgcaaaaaactgttggattatttattttagaaattcccccctttgtgttggactgcaaattgagtttctttctctttaggcctttcacaactatatgtatagcttctaaaaggggaaaaaaaaaaaaaagagaaaccctttgacttccacgtgcccatctcaagacattccactcacagatttgaggttctggattccaggtctggagttttccaatgttaatgtaaacagaactggcacacacacattaagatgaatgtaattattattcctcttgctggtcactaccgtcgctttctatttctctttctttgtgtgaatttatttaaaagaaaaaaaaactttttgtaacgactatttgcagtttaaaaatcaataaaccccgttttttcaagaa

SEQ ID NO: 445645 - DNA, 1881 bp, Homo sapiens
  misc_feature (17)..(17): n is a, c, g, or t
aggccaaagaattcggncacaggggagggacctcctgcctactccagcccctaccctgcacccacatcccataccctcttctccctacccatcccattccccacaggccctacattaacaaggttaagctcaacccctttcccccagcacctcagaatgtgccctccctctccccctcataaccccacctaacataaggacaagtcaatttgtcagtagcttcttctggcttgaaaccccctccctggattttatagcccacttaccatgcataacagacaagtcccatattttgtcagtagatgcctttttttttccggcttaagccttaagtgccaaatcacaagagaaaaagcagtaacagtttacagaagcaacttagtgccttgtaatctaactttgtcactgtgactacattacctcttcagcgccagagggcacccgtgggcctcccggagcctctgcccatggcggggtggagacccggaaccagcagccccctccactggcgacacaactgcaccttccctcatttcagtctcccgcacacttattcctcctcccctcttcccggtggcacctctccacctgtacccgcccccgccccaccaccccggccccttggaagagttgttgccagaccagggttttgggggaaacctgtcttgacattcaaaacctttttcttcccgatctgaacccctgttgactaatcttgcctgggtttgtgtaggtctgcaggaaggaaggctgaaaaagcggacgaagattttgacttaagtgggactttgtgatttaattttttcttttttttaagtggggaggaaggggaagctagatggactaggagagacttgattttggtgctaaagttccccagttcatatgtgacatctttttaaaaaaaataacaacaaaaaaaaaatgagagaaaagctaaaaaaaaaaaagtaaggggtgagcagttaatggtattcattccacatacaatatctgtgtaaaacgatttcctgtagaagtagctttaatggtttttgctctagaataccgtaggtctatccttagagcactcacgccatgctttcttccctgggttttaaacttcatataactttcagaaattggagagcaaaaattttgcttgtcactgcacatcaatataaaaaagcttatttaacttatcaaaacgtatttattgccaaactatgcttttttttgttaattttgttcatatttatcgggatgacaaatccatagaatatattcttttatgttaaattatgatcttcatattaatcttaaaattttgtgacgtgtctttttcctttttttccacagttttaatatattattcttcaacgacattttttgtaactttacacttttttggttattttattttaaaaaaatgaaaaattaatttaaaaaaatgcaaaaaactgttggattatttattttagaaattcccccctttgtgttggactgcaaattgagtttctttctctttaggcctttcacaactaggactgagaatgtatgtaaaagttctgtgacagtacagaaggaaaacaactttttatgtatagcttctaaaaggggaaaaaaaaaaaaaagagaaaccctttgacttccacgtgcccatctcaagacattccactcacagatttgaggttctggattccaggtctggagttttccaatgttaatgtaaacagaactggcacacacacattaagatgaatgtaattattattcctcttgctggtcactaccgtcgctttctatttctctttctttgtgtgaatttatttaaaagaaaaaaaaactttttgtaacgactatttgcagtttaaaaatcaataaaccccgttttttcaagaa

SEQ ID NO: 445646 - DNA, 2099 bp, Homo sapiens
cccttacctgcccttaacccacccccacccttgttttcaaccccgtcccccgtttttttggaaaaccacccttcgcaccactttctgtaacccccttccacgttcatacacatgggcccccccccacacaatggtttaaaaattcttccggctcccggccgccacaaattttttttctttttttttttttcccattttttttttaatgggaactcatgtaacaacctacatttattggaaaatgaaatcagtaactaagactctgccaggcccccacccccaacccagcaccaggcctctacttggtctgtcccagttctttaagccccagaatggacaaccatgtgaacagctcaggtcaactgcaggcccacattcccacactgcaaacccctcataaccccacctaacataaggacaagtcaatttgtcagtagcttcttctggcttgaaaccccctccctggattttatagcccacttaccatgcataacagacaagtcccatattttgtcagtagatgcctttttttttccggcttaagccttaagtgccaaatcacaagagaaaaagcagtaacagtttacagaagcaacttagtgccttgtaatctaactttgtcactgtgactacattacctcttcagcgccagagggcacccgtgggcctcccggagcctctgcccatggcggggtggagacccggaaccagcagccccctccactggcgacacaactgcaccttccctcatttcagtctcccgcacacttattcctcctcccctcttcccggtggcacctctccacctgtacccgcccccgccccaccaccccggccccttggaagagttgttgccagaccagggttttgggggaaacctgtcttgacattcaaaacctttttcttcccgatctgaacccctgttgactaatcttgcctgggtttgtgtaggtctgcaggaaggaaggctgaaaaagcggacgaagattttgacttaagtgggactttgtgatttaattttttcttttttttaagtggggaggaaggggaagctagatggactaggagagacttgattttggtgctaaagttccccagttcatatgtgacatctttttaaaaaaaataacaacaaaaaaaaaatgagagaaaagctaaaaaaaaaaaagtaaggggtgagcagttaatggtattcattccacatacaatatctgtgtaaaacgatttcctgtagaagtagctttaatggtttttgctctagaataccgtaggtctatccttagagcactcacgccatgctttcttccctgggttttaaacttcatataactttcagaaattggagagcaaaaattttgcttgtcactgcacatcaatataaaaaagcttatttaacttatcaaaacgtatttattgccaaactatgcttttttttgttaattttgttcatatttatcgggatgacaaatccatagaatatattcttttatgttaaattatgatcttcatattaatcttaaaattttgtgacgtgtctttttcctttttttccacagttttaatatattattcttcaacgacattttttgtaactttacacttttttggttattttattttaaaaaaatgaaaaattaatttaaaaaaatgcaaaaaactgttggattatttattttagaaattcccccctttgtgttggactgcaaattgagtttctttctctttaggcctttcacaactaggactgagaatgtatgtaaaagttctgtgacagtacagaaggaaaacaactttttatgtatagcttctaaaaggggaaaaaaaaaaaaaagagaaaccctttgacttccacgtgcccatctcaagacattccactcacagatttgaggttctggattccaggtctggagttttccaatgttaatgtaaacagaactggcacacacacattaagatgaatgtaattattattcctcttgctggtcactaccgtcgctttctatttctctttctttgtgtgaatttatttaaaagaaaaaaaaactttttgtaacgactatttgcagtttaaaaatcaataaaccccgttttttcaagaa

SEQ ID NO: 445647 - DNA, 3774 bp, Homo sapiens
gtgtgttgggggtggtgagaatgcgctctcttcggcccgccccgtcctttccaaagaaacgtgctcataatggggtgacctaattacatcgcaatggaactcaatcttagccactccgcagcaccgggtttcataacagactcggcggcctcgagtgctgggaagaaacgtgcgagggccgaggggggcggcggagcccgcgtggaaatcggaaagaagcgcagccctgcgacttccgcctgggtcatcacgccagcagtcgggccaaggcgcagggggcgggtgggggacacgttaactttttatttgggtgggcggcatccaaacctaacagtatatattttatcattttcaagggagtcatgctccattgcgggcccttcggtttcgtggctcccatgtccccctctccacctcccgccaaaacggcgcagcgtgacaagccatatgttccactccggtgggggcgagagagaagcaacaataagttaaaagtgccgcctccctccacctctttaccttcattcttaccaaagtaaccttttttcattgttctagagtcttgaggtgtgtgtggggaggatggaggaggagggagggttgtggcgccgcccagaattcggagcgcgcgtggaaagtagtgagttgctcggtgggctttttctgggaggaaggggcattcaggaaggattagggttttcttgactaaaaagtttaaagattggatgcgtgaaaagaaacggcacgcctaggcctggtaaaacaaacaatcgtcccgggttgtggtctttttttgcggcgccccccacccgcccacacccggagagcgccggctgcaaagcgagcgcgagtgtcgacgcgtgcgacgcactaaattgtgccgcgctcgcgcccgccagaccatgtcctcctggggaaaaagtttccctagtccccccagcaccgcgccccaccctacgccccgctggaaaaaaaacagcaacataaaatcctaggcttgaacattctgtgcgtcccaaatttctaatgtcctcggcctgcccggtttgccgaagggagccgagtgtcgaagagaagtcgggaaaaggtaagttgtgcagacacttggggaagtttcaaggagaccgccagctcaagatggaaaccgcggcccgggcgctaaggacgggcttcagctcccgctggcaaaaagagaaagtcgagcccgccttcctgcccaacaaaaaacaacaacatgacaacaagaaccccggagggagtggaatgagtgacgtcacagccgcgctctgaggctgacaaaggagggggcgcgcccctcccgctctgcgcccgcgcggccccggagagggggcgcctgaagcgccgggtagggaagtcagccgacttgaaacttttcctcttaaagaaaaaaaaaaaaaagttgtgcgcggctcacagtggggtttttttttttccgccttcttttctcgtctcccctcccccttcttccttttgaaagtttcttctcctccccctgccccccctccccgcctgaccgcatggctgattcaactccagtgtcaatcaacttctttttcctcctcttcctcatttaaataagtttaaagctcctcctccccccggcccaccaaatctgaactttataaattgggctttgcgcgccccagcccggagtcagaaaggcgaggggcgccgggaactggcgtgtgggactccagacaggagaggctgcgccttccccgcaccgggaccttcgcgacacaccagatcctcgcccctggctcgcgcgaacgcacaggatgaccaccaccctcgtgtctgccaccatcttcgacttgagcgaagttttatgcaagggtaacaagatgctcaactatagtgctcccagtgcagggggttgcctgctggacagaaaggcagtgggcacccctgctggtgggggcttccctcggaggcactcagtcaccctgcccagctccaagttccaccagaaccagctcctcagcagcctcaagggtgagccagcccccgctctgagctcgcgagacagccgcttccgagaccgctccttctcggaagggggcgagcggctgctgcccacccagaagcagcccgggggcggccaggtcaactccagccgctacaagacggagctgtgccgcccctttgaggaaaacggtgcctgtaagtacggggacaagtgccagttcgcacacggcatccacgagctccgcagcctgacccgccaccccaagtacaagacggagctgtgccgcaccttccacaccatcggcttttgcccctacgggccccgctgccacttcatccacaacgctgaagagcgccgtgccctggccggggcccgggacctctccgctgaccgtccccgcctccagcatagctttagctttgctgggtttcccagtgccgctgccaccgccgctgccaccgggctgctggacagccccacgtccatcaccccaccccctattctgagcgccgatgacctcctgggctcacctaccctgcccgatggcaccaataacccttttgccttctccagccaggagctggcaagcctctttgcccctagcatggggctgcccgggggtggctccccgaccaccttcctcttccggcccatgtccgagtcccctcacatgtttgactctccccccagccctcaggattctctctcggaccaggagggctacctgagcagctccagcagcagccacagtggctcagactccccgaccttggacaactcaagacgcctgcccatcttcagcagactttccatctcagatgactaagccagggtagggagggacctcctgcctactccagcccctaccctgcacccacatcccataccctcttctccctacccatcccattccccacaggccctacattaacaaggttaagctcaacccctttcccccagcacctcagaatgtgccctccctctccccctcataaccccacctaacataaggacaagtcaatttgtcagtagcttcttctggcttgaaaccccctccctggattttatagcccacttaccatgcataacagacaagtcccatattttgtcagtagatgcctttttttttccggcttaagccttaagtgccaaatcacaagagaaaaagcagtaacagtttacagaagcaacttagtgccttgtaatctaactttgtcactgtgactacattacctcttcagcgccagagggcacccgtgggcctcccggagcctctgcccatggcggggtggagacccggaaccagcagccccctccactggcgacacaactgcaccttccctcatttcagtctcccgcacacttattcctcctcccctcttcccggtggcacctctccacctgtacccgcccccgccccaccaccccggccccttggaagagttgttgccagaccagggttttgggggaaacctgtcttgacattcaaaacctttttcttcccgatctgaacccctgttgactaatcttgcctgggtttgtgtaggtctgcaggaaggaaggctgaaaaagcggacgaagattttgacttaagtgggactttgtgatttaattttttcttttttttaagtggggaggaaggggaagctagatggactaggagagacttgattttggtgctaaagttccccagttcatatgtgacatcttgagccgttaatggcatttattccatatctactatttgtgaacctattatctgtcccatttgctttctggtttct

SEQ ID NO: 445648 - DNA, 2512 bp, Homo sapiens
gtgtgttgggggtggtgagaatgcgctctcttcggcccgccccgtcctttccaaagaaacgtgctcataatggggtgacctaattacatcgcaatggaactcaatcttagccactccgcagcaccgggtttcataacagactcggcggcctcgagtgctgggaagaaacgtgcgagggccgaggggggcggcggagcccgcgtggaaatcggaaagaagcgcagccctgcgacttccgcctgggtcatcacgccagcagtcgggccaaggcgcagggggcgggtgggggacacgttaactttttatttgggtgggcggcatccaaacctaacagtatatattttatcattttcaagggagtcatgctccattgcgggcccttcggtttcgtggctcccatgtccccctctccacctcccgccaaaacggcgcagcgtgacaagccatatgttccactccggtgggggcgagagagaagcaacaataagttaaaagtgccgcctccctccacctctttaccttcattcttaccaaagtaaccttttttcattgttctagagtcttgaggtgtgtgtggggaggatggaggaggagggagggttgtggcgccgcccagaattcggagcgcgcgtggaaagtagtgagttgctcggtgggctttttctgggaggaaggggcattcaggaaggattagggttttcttgactaaaaagtttaaagattggatgcgtgaaaagaaacggcacgcctaggcctggtaaaacaaacaatcgtcccgggttgtggtctttttttgcggcgccccccacccgcccacacccggagagcgccggctgcaaagcgagcgcgagtgtcgacgcgtgcgacgcactaaattgtgccgcgctcgcgcccgccagaccatgtcctcctggggaaaaagtttccctagtccccccagcaccgcgccccaccctacgccccgctggaaaaaaaacagcaacataaaatcctaggcttgaacattctgtgcgtcccaaatttctaatgtcctcggcctgcccggtttgccgaagggagccgagtgtcgaagagaagtcgggaaaaggtaagttgtgcagacacttggggaagtttcaaggagaccgccagctcaagatggaaaccgcggcccgggcgctaaggacgggcttcagctcccgctggcaaaaagagaaagtcgagcccgccttcctgcccaacaaaaaacaacaacatgacaacaagaaccccggagggagtggaatgagtgacgtcacagccgcgctctgaggctgacaaaggagggggcgcgcccctcccgctctgcgcccgcgcggccccggagagggggcgcctgaagcgccgggtagggaagtcagccgacttgaaacttttcctcttaaagaaaaaaaaaaaaaagttgtgcgcggctcacagtggggtttttttttttccgccttcttttctcgtctcccctcccccttcttccttttgaaagtttcttctcctccccctgccccccctccccgcctgaccgcatggctgattcaactccagtgtcaatcaacttctttttcctcctcttcctcatttaaataagtttaaagctcctcctccccccggcccaccaaatctgaactttataaattgggctttgcgcgccccagcccggagtcagaaaggcgaggggcgccgggaactggcgtgtgggactccagacaggagaggctgcgccttccccgcaccgggaccttcgcgacacaccagatcctcgcccctggctcgcgcgaacgcacaggatgaccaccaccctcgtgtctgccaccatcttcgacttgagcgaagttttatgcaagggtaacaagatgctcaactatagtgctcccagtgcagggggttgcctgctggacagaaaggcagtgggcacccctgctggtgggggcttccctcggaggcactcagtcaccctgcccagctccaagttccaccagaaccagctcctcagcagcctcaagggtgagccagcccccgctctgagctcgcgagacagccgcttccgagaccgctccttctcggaagggggcgagcggctgctgcccacccagaagcagcccgggggcggccaggtcaactccagccgctacaagacggagctgtgccgcccctttgaggaaaacggtgcctccctcaggattctctctcggaccaggagggctacctgagcagctccagcagcagccacagtggctcagactccccgaccttggacaactcaagacgcctgcccatcttcagcagactttccatctcagatgactaagccagggtagggagggacctcctgcctactcctaatcacataaactattccccccgagcaatctccaattaccatatatacaccaaaaagcatggtcaaccagtacttattactaatcaacgccataatcattcaaaggccccgcaccaataggatctcccgaatcaacctgaccctctcttctaaatattc

SEQ ID NO: 445649 - DNA, 4630 bp, Homo sapiens
gtgtgttgggggtggtgagaatgcgctctcttcggcccgccccgtcctttccaaagaaacgtgctcataatggggtgacctaattacatcgcaatggaactcaatcttagccactccgcagcaccgggtttcataacagactcggcggcctcgagtgctgggaagaaacgtgcgagggccgaggggggcggcggagcccgcgtggaaatcggaaagaagcgcagccctgcgacttccgcctgggtcatcacgccagcagtcgggccaaggcgcagggggcgggtgggggacacgttaactttttatttgggtgggcggcatccaaacctaacagtatatattttatcattttcaagggagtcatgctccattgcgggcccttcggtttcgtggctcccatgtccccctctccacctcccgccaaaacggcgcagcgtgacaagccatatgttccactccggtgggggcgagagagaagcaacaataagttaaaagtgccgcctccctccacctctttaccttcattcttaccaaagtaaccttttttcattgttctagagtcttgaggtgtgtgtggggaggatggaggaggagggagggttgtggcgccgcccagaattcggagcgcgcgtggaaagtagtgagttgctcggtgggctttttctgggaggaaggggcattcaggaaggattagggttttcttgactaaaaagtttaaagattggatgcgtgaaaagaaacggcacgcctaggcctggtaaaacaaacaatcgtcccgggttgtggtctttttttgcggcgccccccacccgcccacacccggagagcgccggctgcaaagcgagcgcgagtgtcgacgcgtgcgacgcactaaattgtgccgcgctcgcgcccgccagaccatgtcctcctggggaaaaagtttccctagtccccccagcaccgcgccccaccctacgccccgctggaaaaaaaacagcaacataaaatcctaggcttgaacattctgtgcgtcccaaatttctaatgtcctcggcctgcccggtttgccgaagggagccgagtgtcgaagagaagtcgggaaaaggtaagttgtgcagacacttggggaagtttcaaggagaccgccagctcaagatggaaaccgcggcccgggcgctaaggacgggcttcagctcccgctggcaaaaagagaaagtcgagcccgccttcctgcccaacaaaaaacaacaacatgacaacaagaaccccggagggagtggaatgagtgacgtcacagccgcgctctgaggctgacaaaggagggggcgcgcccctcccgctctgcgcccgcgcggccccggagagggggcgcctgaagcgccgggtagggaagtcagccgacttgaaacttttcctcttaaagaaaaaaaaaaaaaagttgtgcgcggctcacagtggggtttttttttttccgccttcttttctcgtctcccctcccccttcttccttttgaaagtttcttctcctccccctgccccccctccccgcctgaccgcatggctgattcaactccagtgtcaatcaacttctttttcctcctcttcctcatttaaataagtttaaagctcctcctccccccggcccaccaaatctgaactttataaattgggctttgcgcgccccagcccggagtcagaaaggcgaggggcgccgggaactggcgtgtgggactccagacaggagaggctgcgccttccccgcaccgggaccttcgcgacacaccagatcctcgcccctggctcgcgcgaacgcacaggatgaccaccaccctcgtgtctgccaccatcttcgacttgagcgaagttttatgcaagggtaacaagatgctcaactatagtgctcccagtgcagggggttgcctgctggacagaaaggcagtgggcacccctgctggtgggggcttccctcggaggcactcagtcaccctgcccagctccaagttccaccagaaccagctcctcagcagcctcaagggtgagccagcccccgctctgagctcgcgagacagccgcttccgagaccgctccttctcggaagggggcgagcggctgctgcccacccagaagcagcccgggggcggccaggtcaactccagccgctacaagacggagctgtgccgcccctttgaggaaaacggtgcctgtaagtacggggacaagtgccagttcgcacacggcatccacgagctccgcagcctgacccgccaccccaagtacaagacggagctgtgccgcaccttccacaccatcggcttttgcccctacgggccccgctgccacttcatccacaacgctgaagagcgccgtgccctggccggggcccgggacctctccgctgaccgtccccgcctccagcatagctttagctttgctgggtttcccagtgccgctgccaccgccgctgccaccgggctgctggacagccccacgtccatcaccccaccccctattctgagcgccgatgacctcctgggctcacctaccctgcccgatggcaccaataacccttttgccttctccagccaggagctggcaagcctctttgcccctagcatggggctgcccgggggtggctccccgaccaccttcctcttccggcccatgtccgagtcccctcacatgtttgactctccccccagccctcaggattctctctcggaccaggagggctacctgagcagctccagcagcagccacagtggctcagactccccgaccttggacaactcaagacgcctgcccatcttcagcagactttccatctcagatgactaagccagggtagggagggacctcctgcctactccagcccctaccctgcacccacatcccataccctcttctccctacccatcccattccccacaggccctacattaacaaggttaagctcaacccctttcccccagcacctcagaatgtgccctccctctccccctcataaccccacctaacataaggacaagtcaatttgtcagtagcttcttctggcttgaaaccccctccctggattttatagcccacttaccatgcataacagacaagtcccatattttgtcagtagatgcctttttttttccggcttaagccttaagtgccaaatcacaagagaaatgtgactacattacctcttcagcgccagagggcacccgtgggcctcccggagcctctgcccatggcggggtggagacccggaaccagcagccccctccactggcgacacaactgcaccttccctcatttcagtctcccgcacacttattcctcctcccctcttcccggtggcacctctccacctgtacccgcccccgccccaccaccccggccccttggaagagttgttgccagaccagggttttgggggaaacctgtcttgacattcaaaacctttttcttcccgatctgaacccctgttgactaatcttgcctgggtttgtgtaggtctgcaggaaggaaggctgaaaaagcggacgaagattttgacttaagtgggactttgtgatttaattttttcttttttttaagtggggaggaaggggaagctagatggactaggagagacttgattttggtgctaaagttccccagttcatatgtgacatctttttaaaaaaaataacaacaaaaaaaaaatgagagaaaagctaaaaaaaaaaaagtaaggggtgagcagttaatggtattcattccacatacaatatctgtgtaaaacgatttcctgtagaagtagctttaatggtttttgctctagaataccgtaggtctatccttagagcactcacgccatgctttcttccctgggttttaaacttcatataactttcagaaattggagagcaaaaattttgcttgtcactgcacatcaatataaaaaagcttatttaacttatcaaaacgtatttattgccaaactatgcttttttttgttaattttgttcatatttatcgggatgacaaatccatagaatatattcttttatgttaaattatgatcttcatattaatcttaaaattttgtgacgtgtctttttcctttttttccacagttttaatatattattcttcaacgacattttttgtaactttacacttttttggttattttattttaaaaaaatgaaaaattaatttaaaaaaatgcaaaaaactgttggattatttattttagaaattcccccctttgtgttggactgcaaattgagtttctttctctttaggcctttcacaactaggactgagaatgtatgtaaaagttctgtgacagtacagaaggaaaacaactttttatgtatagcttctaaaaggggaaaaaaaaaaaaaagagaaaccctttgacttccacgtgcccatctcaagacattccactcacagatttgaggttctggattccaggtctggagttttccaatgttaatgtaaacagaactggcacacacacattaagatgaatgtaattattattcctcttgctggtcactaccgtcgctttctatttctctttctttgtgtgaatttatttaaaagaaaaaaaaactttttgtaacgactatttgcagtttaaaaatcaataaaccccgttttttcaagaa

SEQ ID NO: 445650 - DNA, 5008 bp, Homo sapiens
  misc_feature (4770)..(4770): n is a, c, g, or t
  misc_feature (4873)..(4873): n is a, c, g, or t
gtgtgttgggggtggtgagaatgcgctctcttcggcccgccccgtcctttccaaagaaacgtgctcataatggggtgacctaattacatcgcaatggaactcaatcttagccactccgcagcaccgggtttcataacagactcggcggcctcgagtgctgggaagaaacgtgcgagggccgaggggggcggcggagcccgcgtggaaatcggaaagaagcgcagccctgcgacttccgcctgggtcatcacgccagcagtcgggccaaggcgcagggggcgggtgggggacacgttaactttttatttgggtgggcggcatccaaacctaacagtatatattttatcattttcaagggagtcatgctccattgcgggcccttcggtttcgtggctcccatgtccccctctccacctcccgccaaaacggcgcagcgtgacaagccatatgttccactccggtgggggcgagagagaagcaacaataagttaaaagtgccgcctccctccacctctttaccttcattcttaccaaagtaaccttttttcattgttctagagtcttgaggtgtgtgtggggaggatggaggaggagggagggttgtggcgccgcccagaattcggagcgcgcgtggaaagtagtgagttgctcggtgggctttttctgggaggaaggggcattcaggaaggattagggttttcttgactaaaaagtttaaagattggatgcgtgaaaagaaacggcacgcctaggcctggtaaaacaaacaatcgtcccgggttgtggtctttttttgcggcgccccccacccgcccacacccggagagcgccggctgcaaagcgagcgcgagtgtcgacgcgtgcgacgcactaaattgtgccgcgctcgcgcccgccagaccatgtcctcctggggaaaaagtttccctagtccccccagcaccgcgccccaccctacgccccgctggaaaaaaaacagcaacataaaatcctaggcttgaacattctgtgcgtcccaaatttctaatgtcctcggcctgcccggtttgccgaagggagccgagtgtcgaagagaagtcgggaaaaggtaagttgtgcagacacttggggaagtttcaaggagaccgccagctcaagatggaaaccgcggcccgggcgctaaggacgggcttcagctcccgctggcaaaaagagaaagtcgagcccgccttcctgcccaacaaaaaacaacaacatgacaacaagaaccccggagggagtggaatgagtgacgtcacagccgcgctctgaggctgacaaaggagggggcgcgcccctcccgctctgcgcccgcgcggccccggagagggggcgcctgaagcgccgggtagggaagtcagccgacttgaaacttttcctcttaaagaaaaaaaaaaaaaagttgtgcgcggctcacagtggggtttttttttttccgccttcttttctcgtctcccctcccccttcttccttttgaaagtttcttctcctccccctgccccccctccccgcctgaccgcatggctgattcaactccagtgtcaatcaacttctttttcctcctcttcctcatttaaataagtttaaagctcctcctccccccggcccaccaaatctgaactttataaattgggctttgcgcgccccagcccggagtcagaaaggcgaggggcgccgggaactggcgtgtgggactccagacaggagaggctgcgccttccccgcaccgggaccttcgcgacacaccagatcctcgcccctggctcgcgcgaacgcacaggatgaccaccaccctcgtgtctgccaccatcttcgacttgagcgaagttttatgcaagggtaacaagatgctcaactatagtgctcccagtgcagggggttgcctgctggacagaaaggcagtgggcacccctgctggtgggggcttccctcggaggcactcagtcaccctgcccagctccaagttccaccagaaccagctcctcagcagcctcaagggtgagccagcccccgctctgagctcgcgagacagccgcttccgagaccgctccttctcggaagggggcgagcggctgctgcccacccagaagcagcccgggggcggccaggtcaactccagccgctacaagacggagctgtgccgcccctttgaggaaaacggtgcctgtaagtacggggacaagtgccagttcgcacacggcatccacgagctccgcagcctgacccgccaccccaagtacaagacggagctgtgccgcaccttccacaccatcggcttttgcccctacgggccccgctgccacttcatccacaacgctgaagagcgccgtgccctggccggggcccgggacctctccgctgaccgtccccgcctccagcatagctttagctttgctgggtttcccagtgccgctgccaccgccgctgccaccgggctgctggacagccccacgtccatcaccccaccccctattctgagcgccgatgacctcctgggctcacctaccctgcccgatggcaccaataacccttttgccttctccagccaggagctggcaagcctctttgcccctagcatggggctgcccgggggtggctccccgaccaccttcctcttccggcccatgtccgagtcccctcacatgtttgactctccccccagccctcaggattctctctcggaccaggagggctacctgagcagctccagcagcagccacagtggctcagactccccgaccttggacaactcaagacgcctgcccatcttcagcagactttccatctcagatgactaagccagggtagggagggacctcctgcctactccagcccctaccctgcacccacatcccataccctcttctccctacccatcccattccccacaggccctacattaacaaggttaagctcaacccctttcccccagcacctcagaatgtgccctccctctccccctcataaccccacctaacataaggacaagtcaatttgtcagtagcttcttctggcttgaaaccccctccctggattttatagcccacttaccatgcataacagacaagtcccatattttgtcagtagatgcctttttttttccggcttaagccttaagtgccaaatcacaagagaaaaagcagtaacagtttacagaagcaacttagtgccttgtaatctaactttgtcactgtgactacattacctcttcagcgccagagggcacccgtgggcctcccggagcctctgcccatggcggggtggagacccggaaccagcagccccctccactggcgacacaactgcaccttccctcatttcagtctcccgcacacttattcctcctcccctcttcccggtggcacctctccacctgtacccgcccccgccccaccaccccggccccttggaagagttgttgccagaccagggttttgggggaaacctgtcttgacattcaaaacctttttcttcccgatctgaacccctgttgactaatcttgcctgggtttgtgtaggtctgcaggaaggaaggctgaaaaagcggacgaagattttgacttaagtgggactttgtgatttaattttttcttttttttaagtggggaggaaggggaagctagatggactaggagagacttgattttggtgctaaagttccccagttcatatgtgacatctttttaaaaaaaataacaacaaaaaaaaaatgagagaaaagctaaaaaaaaaaaagtaaggggtgagcagttaatggtattcattccacatacaatatctgtgtaaaacgatttcctgtagaagtagctttaatggtttttgctctagaataccgtaggtctatccttagagcactcacgccatgctttcttccctgggttttaaacttcatataactttcagaaattggagagcaaaaattttgcttgtcactgcacatcaatataaaaaagcttatttaacttatcaaaacgtatttattgccaaactatgcttttttttgttaattttgttcatatttatcgggatgacaaatccatagaatatattcttttatgttaaattatgatcttcatattaatcttaaaattttgtgacgtgtctttttcctttttttccacagttttaatatattattcttcaacgacattttttgtaactttacacttttttggttattttattttaaaaaaatgaaaaattaatttaaaaaaatgcaaaaaactgttggattatttattttagaaattcccccctttgtgttggactgcaaattgagtttctttctctttaggcctttcacaactaggactgagaatgtatgtaaaagttctgtgacagtacagaaggaaaacaactttttatgtatagcttctaaaaggggaaaaaaaaaaaaaagagaaaccctttgacttccacgtgcccatctcaagacattccactcacagatttgaggttctggattccaggtctggagttttccaatgttaatgtaaacagaactggcacacacacattaagatgaatgtaattattattcctcttgctggtcactaccgtcgctttctatttctctttctttgtgtgaatttatttaaaagaaaaaaaaactttttgtaacgactatttgcagtttaaaaatcaataaaccccgttttttcaagaaacattgatggtggagctggttttacttggttttggtttgactttgccagtaaggttctccccttgtataccttgcaagtcctgggnagggggaggcggagagagagggctgtggctgtgggtggcggcatctctcatccctataagctaagcctatagctcccttccttgatgctggcagtttgctgcncttagaggggacggggtggaggttttctgcaaaggagcctgtacttcctgctgtattacttctgaaaagactgtgcagtgtgttagttgttggctgaatagcagcgggcccagccttgccgacacttgtgtggcc

SEQ ID NO: 445651 - DNA, 5031 bp, Homo sapiens
  misc_feature (4849)..(4849): n is a, c, g, or t
gtgtgttgggggtggtgagaatgcgctctcttcggcccgccccgtcctttccaaagaaacgtgctcataatggggtgacctaattacatcgcaatggaactcaatcttagccactccgcagcaccgggtttcataacagactcggcggcctcgagtgctgggaagaaacgtgcgagggccgaggggggcggcggagcccgcgtggaaatcggaaagaagcgcagccctgcgacttccgcctgggtcatcacgccagcagtcgggccaaggcgcagggggcgggtgggggacacgttaactttttatttgggtgggcggcatccaaacctaacagtatatattttatcattttcaagggagtcatgctccattgcgggcccttcggtttcgtggctcccatgtccccctctccacctcccgccaaaacggcgcagcgtgacaagccatatgttccactccggtgggggcgagagagaagcaacaataagttaaaagtgccgcctccctccacctctttaccttcattcttaccaaagtaaccttttttcattgttctagagtcttgaggtgtgtgtggggaggatggaggaggagggagggttgtggcgccgcccagaattcggagcgcgcgtggaaagtagtgagttgctcggtgggctttttctgggaggaaggggcattcaggaaggattagggttttcttgactaaaaagtttaaagattggatgcgtgaaaagaaacggcacgcctaggcctggtaaaacaaacaatcgtcccgggttgtggtctttttttgcggcgccccccacccgcccacacccggagagcgccggctgcaaagcgagcgcgagtgtcgacgcgtgcgacgcactaaattgtgccgcgctcgcgcccgccagaccatgtcctcctggggaaaaagtttccctagtccccccagcaccgcgccccaccctacgccccgctggaaaaaaaacagcaacataaaatcctaggcttgaacattctgtgcgtcccaaatttctaatgtcctcggcctgcccggtttgccgaagggagccgagtgtcgaagagaagtcgggaaaaggtaagttgtgcagacacttggggaagtttcaaggagaccgccagctcaagatggaaaccgcggcccgggcgctaaggacgggcttcagctcccgctggcaaaaagagaaagtcgagcccgccttcctgcccaacaaaaaacaacaacatgacaacaagaaccccggagggagtggaatgagtgacgtcacagccgcgctctgaggctgacaaaggagggggcgcgcccctcccgctctgcgcccgcgcggccccggagagggggcgcctgaagcgccgggtagggaagtcagccgacttgaaacttttcctcttaaagaaaaaaaaaaaaaagttgtgcgcggctcacagtggggtttttttttttccgccttcttttctcgtctcccctcccccttcttccttttgaaagtttcttctcctccccctgccccccctccccgcctgaccgcatggctgattcaactccagtgtcaatcaacttctttttcctcctcttcctcatttaaataagtttaaagctcctcctccccccggcccaccaaatctgaactttataaattgggctttgcgcgccccagcccggagtcagaaaggcgaggggcgccgggaactggcgtgtgggactccagacaggagaggctgcgccttccccgcaccgggaccttcgcgacacaccagatcctcgcccctggctcgcgcgaacgcacaggatgaccaccaccctcgtgtctgccaccatcttcgacttgagcgaagttttatgcaagggtaacaagatgctcaactatagtgctcccagtgcagggggttgcctgctggacagaaaggcagtgggcacccctgctggtgggggcttccctcggaggcactcagtcaccctgcccagctccaagttccaccagaaccagctcctcagcagcctcaagggtgagccagcccccgctctgagctcgcgagacagccgcttccgagaccgctccttctcggaagggggcgagcggctgctgcccacccagaagcagcccgggggcggccaggtcaactccagccgctacaagacggagctgtgccgcccctttgaggaaaacggtgcctgtaagtacggggacaagtgccagttcgcacacggcatccacgagctccgcagcctgacccgccaccccaagtacaagacggagctgtgccgcaccttccacaccatcggcttttgcccctacgggccccgctgccacttcatccacaacgctgaagagcgccgtgccctggccggggcccgggacctctccgctgaccgtccccgcctccagcatagctttagctttgctgggtttcccagtgccgctgccaccgccgctgccaccgggctgctggacagccccacgtccatcaccccaccccctattctgagcgccgatgacctcctgggctcacctaccctgcccgatggcaccaataacccttttgccttctccagccaggagctggcaagcctctttgcccctagcatggggctgcccgggggtggctccccgaccaccttcctcttccggcccatgtccgagtcccctcacatgtttgactctccccccagccctcaggattctctctcggaccaggagggctacctgagcagctccagcagcagccacagtggctcagactccccgaccttggacaactcaagacgcctgcccatcttcagcagactttccatctcagatgactaagccagggtagggagggacctcctgcctactccagcccctaccctgcacccacatcccataccctcttctccctacccatcccattccccacaggccctacattaacaaggttaagctcaacccctttcccccagcacctcagaatgtgccctccctctccccctcataaccccacctaacataaggacaagtcaatttgtcagtagcttcttctggcttgaaaccccctccctggattttatagcccacttaccatgcataacagacaagtcccatattttgtcagtagatgcctttttttttccggcttaagccttaagtgccaaatcacaagagaaaaagcagtaacagtttacagaagcaacttagtgccttgtaatctaactttgtcactgtgactacattacctcttcagcgccagagggcacccgtgggcctcccggagcctctgcccatggcggggtggagacccggaaccagcagccccctccactggcgacacaactgcaccttccctcatttcagtctcccgcacacttattcctcctcccctcttcccggtggcacctctccacctgtacccgcccccgccccaccaccccggccccttggaagagttgttgccagaccagggttttgggggaaacctgtcttgacattcaaaacctttttcttcccgatctgaacccctgttgactaatcttgcctgggtttgtgtaggtctgcaggaaggaaggctgaaaaagcggacgaagattttgacttaagtgggactttgtgatttaattttttcttttttttaagtggggaggaaggggaagctagatggactaggagagacttgattttggtgctaaagttccccagttcatatgtgacatctttttaaaaaaaataacaacaaaaaaaaaatgagagaaaagctaaaaaaaaaaaagtaaggggtgagcagttaatggtattcattccacatacaatatctgtgtaaaacgatttcctgtagaagtagctttaatggtttttgctctagaataccgtaggtctatccttagagcactcacgccatgctttcttccctgggttttaaacttcatataactttcagaaattggagagcaaaaattttgcttgtcactgcacatcaatataaaaaagcttatttaacttatcaaaacgtatttattgccaaactatgcttttttttgttaattttgttcatatttatcgggatgacaaatccatagaatatattcttttatgttaaattatgatcttcatattaatcttaaaattttgtgacgtgtctttttcctttttttccacagttttaatatattattcttcaacgacattttttgtaactttacacttttttggttattttattttaaaaaaatgaaaaattaatttaaaaaaatgcaaaaaactgttggattatttattttagaaattcccccctttgtgttggactgcaaattgagtttctttctctttaggcctttcacaactaggactgagaatgtatgtaaaagttctgtgacagtacagaaggaaaacaactttttatgtatagcttctaaaaggggaaaaaaaaaaaaaagagaaaccctttgacttccacgtgcccatctcaagacattccactcacagatttgaggttctggattccaggtctggagttttccaatgttaatgtaaacagaactggcacacacacattaagatgaatgtaattattattcctcttgctggtcactaccgtcgctttctatttctctttctttgtgtgaatttatttaaaagaaaaaaaaactttttgtaacgactatttgcagtttaaaaatcaataaaccccgttttttcaagaaaaaaaacaaaaaaaacaaaaaaaaaaaaaaaaaaaaaaaagagggggggccgccgccccaaaagaattctcccccgcgggggcgcccccagtttatagcgcgaccgaccaccacgtctctgtgtgatgaccaaagggggcgccccattatgatgaggagccgcantctatattaactaacgccagacggcgcccgacccgccggcggtgtataaaaacagcgcgctagagaactggggcagaacaaccaatgctgaccaaccaggcggcaccctggtgggacagaagacgaccccctctacccccggggggggggacgcacaatattggggcaacactcccaccaca

SEQ ID NO: 445652 - DNA, 4589 bp, Homo sapiens
gtgtgttgggggtggtgagaatgcgctctcttcggcccgccccgtcctttccaaagaaacgtgctcataatggggtgacctaattacatcgcaatggaactcaatcttagccactccgcagcaccgggtttcataacagactcggcggcctcgagtgctgggaagaaacgtgcgagggccgaggggggcggcggagcccgcgtggaaatcggaaagaagcgcagccctgcgacttccgcctgggtcatcacgccagcagtcgggccaaggcgcagggggcgggtgggggacacgttaactttttatttgggtgggcggcatccaaacctaacagtatatattttatcattttcaagggagtcatgctccattgcgggcccttcggtttcgtggctcccatgtccccctctccacctcccgccaaaacggcgcagcgtgacaagccatatgttccactccggtgggggcgagagagaagcaacaataagttaaaagtgccgcctccctccacctctttaccttcattcttaccaaagtaaccttttttcattgttctagagtcttgaggtgtgtgtggggaggatggaggaggagggagggttgtggcgccgcccagaattcggagcgcgcgtggaaagtagtgagttgctcggtgggctttttctgggaggaaggggcattcaggaaggattagggttttcttgactaaaaagtttaaagattggatgcgtgaaaagaaacggcacgcctaggcctggtaaaacaaacaatcgtcccgggttgtggtctttttttgcggcgccccccacccgcccacacccggagagcgccggctgcaaagcgagcgcgagtgtcgacgcgtgcgacgcactaaattgtgccgcgctcgcgcccgccagaccatgtcctcctggggaaaaagtttccctagtccccccagcaccgcgccccaccctacgccccgctggaaaaaaaacagcaacataaaatcctaggcttgaacattctgtgcgtcccaaatttctaatgtcctcggcctgcccggtttgccgaagggagccgagtgtcgaagagaagtcgggaaaaggtaagttgtgcagacacttggggaagtttcaaggagaccgccagctcaagatggaaaccgcggcccgggcgctaaggacgggcttcagctcccgctggcaaaaagagaaagtcgagcccgccttcctgcccaacaaaaaacaacaacatgacaacaagaaccccggagggagtggaatgagtgacgtcacagccgcgctctgaggctgacaaaggagggggcgcgcccctcccgctctgcgcccgcgcggccccggagagggggcgcctgaagcgccgggtagggaagtcagccgacttgaaacttttcctcttaaagaaaaaaaaaaaaaagttgtgcgcggctcacagtggggtttttttttttccgccttcttttctcgtctcccctcccccttcttccttttgaaagtttcttctcctccccctgccccccctccccgcctgaccgcatggctgattcaactccagtgtcaatcaacttctttttcctcctcttcctcatttaaataagtttaaagctcctcctccccccggcccaccaaatctgaactttataaattgggctttgcgcgccccagcccggagtcagaaaggcgaggggcgccgggaactggcgtgtgggactccagacaggagaggctgcgccttccccgcaccgggaccttcgcgacacaccagatcctcgcccctggctcgcgcgaacgcacaggatgaccaccaccctcgtgtctgccaccatcttcgacttgagcgaagttttatgcaagggtaacaagatgctcaactatagtctccaagttccaccagaaccagctcctcagcagcctcaagggtgagccagcccccgctctgagctcgcgagacagccgcttccgagaccgctccttctcggaagggggcgagcggctgctgcccacccagaagcagcccgggggcggccaggtcaactccagccgctacaagacggagctgtgccgcccctttgaggaaaacggtgcctgtaagtacggggacaagtgccagttcgcacacggcatccacgagctccgcagcctgacccgccaccccaagtacaagacggagctgtgccgcaccttccacaccatcggcttttgcccctacgggccccgctgccacttcatccacaacgctgaagagcgccgtgccctggccggggcccgggacctctccgctgaccgtccccgcctccagcatagctttagctttgctgggtttcccagtgccgctgccaccgccgctgccaccgggctgctggacagccccacgtccatcaccccaccccctattctgagcgccgatgacctcctgggctcacctaccctgcccgatggcaccaataacccttttgccttctccagccaggagctggcaagcctctttgcccctagcatggggctgcccgggggtggctccccgaccaccttcctcttccggcccatgtccgagtcccctcacatgtttgactctccccccagccctcaggattctctctcggaccaggagggctacctgagcagctccagcagcagccacagtggctcagactccccgaccttggacaactcaagacgcctgcccatcttcagcagactttccatctcagatgactaagccagggtagggagggacctcctgcctactccagcccctaccctgcacccacatcccataccctcttctccctacccatcccattccccacaggccctacattaacaaggttaagctcaacccctttcccccagcacctcagaatgtgccctccctctccccctcataaccccacctaacataaggacaagtcaatttgtcagtagcttcttctggcttgaaaccccctccctggattttatagcccacttaccatgcataacagacaagtcccatattttgtcagtagatgcctttttttttccggcttaagccttaagtgccaaatcacaagagaaaaagcagtaacagtttacagaagcaacttagtgccttgtaatctaactttgtcactgtgactacattacctcttcagcgccagagggcacccgtgggcctcccggagcctctgcccatggcggggtggagacccggaaccagcagccccctccactggcgacacaactgcaccttccctcatttcagtctcccgcacacttattcctcctcccctcttcccggtggcacctctccacctgtacccgcccccgccccaccaccccggccccttggaagagttgttgccagaccagggttttgggggaaacctgtcttgacattcaaaacctttttcttcccgatctgaacccctgttgactaatcttgcctgggtttgtgtaggtctgcaggaaggaaggctgaaaaagcggacgaagattttgacttaagtgggactttgtgatttaattttttcttttttttaagtggggaggaaggggaagctagatggactaggagagacttgattttggtgctaaagttccccagttcatatgtgacatctttttaaaaaaaataacaacaaaaaaaaaatgagagaaaagctaaaaaaaaaaaagtaaggggtgagcagttaatggtattcattccacatacaatatctgtgtaaaacgatttcctgtagaagtagctttaatggtttttgctctagaataccgtaggtctatccttagagcactcacgccatgctttcttccctgggttttaaacttcatataactttcagaaattggagagcaaaaattttgcttgtcactgcacatcaatataaaaaagcttatttaacttatcaaaacgtatttattgccaaactatgcttttttttgttaattttgttcatatttatcgggatgacaaatccatagaatatattcttttatgttaaattatgatcttcatattaatcttaaaattttgtgacgtgtctttttcctttttttccacagttttaatatattattcttcaacgacattttttgtaactttacacttttttggttattttattttaaaaaaatgaaaaattaatttaaaaaaatgcaaaaaactgttggattatttattttagaaattcccccctttgtgttggactgcaaattgagtttctttctctttaggcctttcacaactaggactgagaatgtatgtaaaagttctgtgacagtacagaaggaaaacaactttttatgtatagcttctaaaaggggaaaaaaaaaaaaaagagaaaccctttgacttccacgtgcccatctcaagacattccactcacagatttgaggttctggattccaggtctggagttttccaatgttaatgtaaacagaactggcacacacacattaagatgaatgtaattattattcctcttgctggtcactaccgtcgctttctatttctctttctttgtgtgaatttatttaaaagaaaaaaaaactttttgtaacgactatttgcagtttaaaaatcaataaaccccgttttttcaagaa

SEQ ID NO: 445653 - DNA, 4496 bp, Homo sapiens
gtgtgttgggggtggtgagaatgcgctctcttcggcccgccccgtcctttccaaagaaacgtgctcataatggggtgacctaattacatcgcaatggaactcaatcttagccactccgcagcaccgggtttcataacagactcggcggcctcgagtgctgggaagaaacgtgcgagggccgaggggggcggcggagcccgcgtggaaatcggaaagaagcgcagccctgcgacttccgcctgggtcatcacgccagcagtcgggccaaggcgcagggggcgggtgggggacacgttaactttttatttgggtgggcggcatccaaacctaacagtatatattttatcattttcaagggagtcatgctccattgcgggcccttcggtttcgtggctcccatgtccccctctccacctcccgccaaaacggcgcagcgtgacaagccatatgttccactccggtgggggcgagagagaagcaacaataagttaaaagtgccgcctccctccacctctttaccttcattcttaccaaagtaaccttttttcattgttctagagtcttgaggtgtgtgtggggaggatggaggaggagggagggttgtggcgccgcccagaattcggagcgcgcgtggaaagtagtgagttgctcggtgggctttttctgggaggaaggggcattcaggaaggattagggttttcttgactaaaaagtttaaagattggatgcgtgaaaagaaacggcacgcctaggcctggtaaaacaaacaatcgtcccgggttgtggtctttttttgcggcgccccccacccgcccacacccggagagcgccggctgcaaagcgagcgcgagtgtcgacgcgtgcgacgcactaaattgtgccgcgctcgcgcccgccagaccatgtcctcctggggaaaaagtttccctagtccccccagcaccgcgccccaccctacgccccgctggaaaaaaaacagcaacataaaatcctaggcttgaacattctgtgcgtcccaaatttctaatgtcctcggcctgcccggtttgccgaagggagccgagtgtcgaagagaagtcgggaaaaggtaagttgtgcagacacttggggaagtttcaaggagaccgccagctcaagatggaaaccgcggcccgggcgctaaggacgggcttcagctcccgctggcaaaaagagaaagtcgagcccgccttcctgcccaacaaaaaacaacaacatgacaacaagaaccccggagggagtggaatgagtgacgtcacagccgcgctctgaggctgacaaaggagggggcgcgcccctcccgctctgcgcccgcgcggccccggagagggggcgcctgaagcgccgggtagggaagtcagccgacttgaaacttttcctcttaaagaaaaaaaaaaaaaagttgtgcgcggctcacagtggggtttttttttttccgccttcttttctcgtctcccctcccccttcttccttttgaaagtttcttctcctccccctgccccccctccccgcctgaccgcatggctgattcaactccagtgtcaatcaacttctttttcctcctcttcctcatttaaataagtttaaagctcctcctccccccggcccaccaaatctgaactttataaattgggctttgcgcgccccagcccggagtcagaaaggcgaggggcgccgggaactggcgtgtgggactccagacaggagaggctgcgccttccccgcaccgggaccttcgcgacacaccagatcctcgcccctggctcgcgcgaacgcacaggatgaccaccaccctcgtgtctgccaccatcttcgacttgagcgaagttttatgcaagggtaacaagatgctcaactatagtgctcccagtgcagggggttgcctgctggacagaaaggcagtgggcacccctgctggtgggggcttccctcggaggcactcagtcaccctgcccagctccaagttccaccagaaccagctcctcagcagcctcaagggtgagccagcccccgctctgagctcgcgagacagccgcttccgagaccgctccttctcggaagggggcgagcggctgctgcccacccagaagcagcccgggggcggccaggtcaactccagccgctacaagacggagctgtgccgcccctttgaggaaaacggtgcctgtaagtacggggacaagtgccagttcgcacacggcatccacgagctccgcagcctgacccgccaccccaagtacaagacggagctgtgccgcaccttccacaccatcggcttttgcccctacgggccccgctgccacttcatccacaacgctgaagagcgccgtgccctggccggggcccgggacctctccgctgaccgtccccgcctccagcatagctttagctttgctgggtttcccagtgccgctgccaccgccgctgccaccgggctgctggacagccccacgtccatcaccccaccccctattctgagcgccgatgacctcctgggctcacctaccctgcccgatggcaccaataacccttttgccttctccagccaggagctggcaagcctctttgcccctagcatggggctgcccgggggtggctccccgaccaccttcctcttccggcccatgtccgagtcccctcacatgtttgactctccccccagccctcaggattctctctcggaccaggagggctacctgagcagctccagcagcagccacagtggctcagactccccgaccttggacaactcaagacgcctgcccatcttcagcagactttccatctcagatgactaagccagggtagggagggacctcctgcctactccagcccctaccctgcacccacatcccataccctcttctccctacccatcccattccccacaggccctacattaacaaggttaagctcaacccctttcccccagcacctcagaatgtgccctccctctccccctcataaccccacctaacataaggacaagtcaatttgtcagtagcttcttctggcttgaaaccccctccctggattttatagcccacttaccatgcataacagacaagtcccatattttgtcagtagatgcctttttttttccggcttaagccttaagtgccaaatcacaagagaaaaagcagtaacagtttacagaagcaacttagtgccttgtaatctaactttgtcactgtgactacattacctcttcagcgccagagggcacccgtgggcctcccggagcctctgcccatggcggggtggagacccggaaccagcagccccctccactggcgacacaactgcaccttccctcatttcagtctcccgcacacttattcctcctcccctcttcccggtggcacctctccacctgtacccgcccccgccccaccaccccggccccttggaagagttgttgccagaccagggttttgggggaaacctgtcttgacattcaaaacctttttcttcccgatctgaacccctgttgactaatcttgcctgggtttgtgtaggtctgcaggaaggaaggctgaaaaagcggacgaagattttgacttaagtgggactttgtgatttaattttttcttttttttaagtggggaggaaggggaagctagatggactaggagagacttgattttggtgctaaagttccccagttcatatgtgacatctttttaaaaaaaataacaacaaaaaaaaaatgagagaaaagctaaaaaaaaaaaagtaaggggtgagcagttaatggtattcattccacatacaatatctgtgtaaaacgatttcctgtagaagtagctttaatggtttttgctctagaataccgtaggtctatccttagagcactcacgccatgctttcttccctgggttttaaacttcatataactttcagaaattggagagcaaaaattttgcttgtcactgcacatcaatataaaaaagcttatttaacttatcaaaacgtatttattgccaaactatgcttttttttgttaattttgttcatatttatcgggatgacaaatccatagaatatattcttttatgttaaattatgatcttcatattaatcttaaaattttgtgacgtgtctttttcctttttttccacagttttaatatattattcttcaacgacattttttgtaactttacacttttttggttattttattttaaaaaaatgaaaaattaatttaaaaaaatgcaaaaaactgttggattatttattttagacattccactcacagatttgaggttctggattccaggtctggagttttccaatgttaatgtaaacagaactggcacacacacattaagatgaatgtaattattattcctcttgctggtcactaccgtcgctttctatttctctttctttgtgtgaatttatttaaaagaaaaaaaaactttttgtaacgactatttgcagtttaaaaatcaataaaccccgttttttcaagaa

SEQ ID NO: 445654 - DNA, 2490 bp, Homo sapiens
cggtacgagccctggtattccccccgccacctcacacacccccatccgggagacccacgtgcagctgggcccgggctggcgccgcacctcggggtctgcgcgtctccccggcgcgttccgggcgcagccccacgacacggacccctggcggggcggcatccgagaagtcgcaggcggagagggggcgtcctggaggccgggcgcggggacgctgcggcccgcggccacacaaaggaggcggcgggaaggcggggcaaggcgggccgggggcgggggcggcaggaaggggcgggggcccgcgcggcgccgccgataaagcccccgccgccgcggcagccagcttgcgctgtggggctgcccgggctgcgcggcgtctgcaggcgccaccgctgcctctttccggctgtgaccctcctcgccgccgccgcttcgctgcgtcctccgactccccgcgccgccgagaccaggctcccgctccggttgcggccgcaccgccctccgcggccgccccctggggatccagcgagcgcggtcgtccttggtggaaggaaccatgaactggcatctccccctcttcctcttggcctctgtgacgctgccttccatctgctcccacttcaatcctctgtctctcgaggaactaggctccaacacggggatccaggttttcaatcagattgtgaagtcgaggcctcatgacaacatcgtgatctctccccatgggattgcgtcggtcctggggatgcttcagctgggggcggacggcaggaccaagaagcagctcgccatggtgatgagatacggcgtaaatggagttggtaaaatattaaagaagatcaacaaggccatcgtctccaagaagaataaagacattgtgacagtggctaacgccgtgtttgttaagaatgcctctgaaattgaagtgccttttgttacaaggaacaaagatgtgttccagtgtgaggtccggaatgtgaactttgaggatccagcctctgcctgtgattccatcaatgcatgggttaaaaatgaaaccagggatatgattgacaatctgctgtccccagatcttattgatggtgtgctcaccagactggtcctcgtcaacgcagtgtatttcaagggtctgtggaaatcacggttccaacccgagaacacaaagaaacgcactttcgtggcagccgacgggaaatcctatcaagtgccaatgctggcccagctctccgtgttccggtgtgggtcgacaagtgcccccaatgatttatggtacaacttcattgaactgccctaccacggggaaagcatcagcatgctgattgcactgccgactgagagctccactccgctgtctgccatcatcccacacatcagcaccaagaccatagacagctggatgagcatcatggtgcccaagagggtgcaggtgatcctgcccaagttcacagctgtagcacaaacagatttgaaggagccgctgaaagttcttggcattactgacatgtttgattcatcaaaggcaaattttgcaaaaataacaaggtcagaaaacctccatgtttctcatatcttgcaaaaagcaaaaattgaagtcagtgaagatggaaccaaagcttcagcagcaacaactgcaattctcattgcaagatcatcgcctccctggtttatagtagacagaccttttctgtttttcatccgacataatcctacaggtgctgtgttattcatggggcagataaacaaaccctgaagagtatacaaaagaaaccatgcaaagcaacgactactttgctacgaagaaagactcctttcctgcatctttcatagttctgttaaatatttttgtacatcgcttctttttcaaaactagttcttaggaacagactcgatgcaagtgtttctgttctgggaggtattggagggaaaaaacaagcaggatggctggaacactgtactgaggaatgaatagaaaggcttccagatgtctaaaagattctttaaactactgaactgttacctaggttaacaaccctgttgagtatttgctgtttgtccagttcaggaatttttgttttgttttgtctatatgtgcggcttttcagaagaaatttaatcagtgtgacagaaaaaaaaatgttttatggtagcttttactttttatgaaaaaaaaattatttgccttttaaattcttttcccccatccccctccaaagtcttgatagcaagcgttattttgggggtagaaacggtgaaatctctagcctctttgtgtttttgttgttgttgttgttgttgttttatataatgcatgtattcactaaaataaaatttaaaaaactcctgtcttgctagacaaggttgctgttgtgcagtgtgcctgtcactactggtctgtactccttggatttgcatttttgtattttgtacaaagtaaaaataaactgttatgagtagtaaaaataaagctatttctctgctatttgaaaataaata

SEQ ID NO: 445655 - DNA, 432 bp, Homo sapiens
gtcattaaaaacagaaagcaaaaacaaagaaaatgttcgccttgaattctttgtaatcatttcatgattaaagaattaaaataatggttctataattagtttctatgcctgaatgataaaacctttctaatatgaagaagaacatgataatcattttattgtgtcatcaaaacccatcaggttttgtaatttaatttccattgctttgtgtttttgttgttgttgttgttgttgttttatataatgcatgtattcactaaaataaaatttaaaaaactcctgtcttgctagacaaggttgctgttgtgcagtgtgcctgtcactactggtctgtactccttggatttgcatttttgtattttgtacaaagtaaaaataaactgttatgagtagtaaaaataaagctatttctctgctatttgaaaataaata

SEQ ID NO: 445656 - DNA, 2169 bp, Homo sapiens
cagtgctcggttgaattctgcgtggctgcgtgtcgtcgtatgcatgtgcccttctgcaggcgccaccgctgcctctttccggctgtgaccctcctcgccgccgccgcttcgctgcgtcctccgactccccgcgccgccgagaccaggctcccgctccggttgcggccgcaccgccctccgcggccgccccctggggatccagcgagcgcggtcgtccttggtggaaggaaccatgaactggcatctccccctcttcctcttggcctctgtgacgctgccttccatctgctcccacttcaatcctctgtctctcgaggaactaggctccaacacggggatccaggttttcaatcagattgtgaagtcgaggcctcatgacaacatcgtgatctctccccatgggattgcgtcggtcctggggatgcttcagctgggggcggacggcaggaccaagaagcagctcgccatggtgatgagatacggcgtaaatggagttggtaaaatattaaagaagatcaacaaggccatcgtctccaagaagaataaagacattgtgacagtggctaacgccgtgtttgttaagaatgcctctgaaattgaagtgccttttgttacaaggaacaaagatgtgttccagtgtgaggtccggaatgtgaactttgaggatccagcctctgcctgtgattccatcaatgcatgggttaaaaatgaaaccagggatatgattgacaatctgctgtccccagatcttattgatggtgtgctcaccagactggtcctcgtcaacgcagtgtatttcaagggtctgtggaaatcacggttccaacccgagaacacaaagaaacgcactttcgtggcagccgacgggaaatcctatcaagtgccaatgctggcccagctctccgtgttccggtgtgggtcgacaagtgcccccaatgatttatggtacaacttcattgaactgccctaccacggggaaagcatcagcatgctgattgcactgccgactgagagctccactccgctgtctgccatcatcccacacatcagcaccaagaccatagacagctggatgagcatcatggtgcccaagagggtgcaggtgatcctgcccaagttcacagctgtagcacaaacagatttgaaggagccgctgaaagttcttggcattactgacatgtttgattcatcaaaggcaaattttgcaaaaataacaaggtcagaaaacctccatgtttctcatatcttgcaaaaagcaaaaattgaagtcagtgaagatggaaccaaagcttcagcagcaacaactgcaattctcattgcaagatcatcgcctccctggtttatagtagacagaccttttctgtttttcatccgacataatcctacaggtgctgtgttattcatggggcagataaacaaaccctgaagagtatacaaaagaaaccatgcaaagcaacgactactttgctacgaagaaagactcctttcctgcatctttcatagttctgttaaatatttttgtacatcgcttctttttcaaaactagttcttaggaacagactcgatgcaagtgtttctgttctgggaggtattggagggaaaaaacaagcaggatggctggaacactgtactgaggaatgaatagaaaggcttccagatgtctaaaagattctttaaactactgaactgttacctaggttaacaaccctgttgagtatttgctgtttgtccagttcaggaatttttgttttgttttgtctatatgtgcggcttttcagaagaaatttaatcagtgtgacagaaaaaaaaatgttttatggtagcttttactttttatgaaaaaaaaattatttgccttttaaattcttttcccccatccccctccaaagtcttgatagcaagcgttattttgggggtagaaacggtgaaatctctagcctctttgtgtttttgttgttgttgttgttgttgttttatataatgcatgtattcactaaaataaaatttaaaaaactcctgtcttgctagacaaggttgctgttgtgcagtgtgcctgtcactactggtctgtactccttggatttgcatttttgtattttgtacaaagtaaaaataaactgttatgagtagtaaaaataaagctatttctctgctatttgaaaataaata

SEQ ID NO: 445657 - DNA, 2436 bp, Homo sapiens
cggtacgagccctggtattccccccgccacctcacacacccccatccgggagacccacgtgcagctgggcccgggctggcgccgcacctcggggtctgcgcgtctccccggcgcgttccgggcgcagccccacgacacggacccctggcggggcggcatccgagaagtcgcaggcggagagggggcgtcctggaggccgggcgcggggacgctgcggcccgcggccacacaaaggaggcggcgggaaggcggggcaaggcgggccgggggcgggggcggcaggaaggggcgggggcccgcgcggcgccgccgataaagcccccgccgccgcggcagccagcttgcgctgtggggctgcccgggctgcgcggcgtctgcaggcgccaccgctgcctctttccggctgtgaccctcctcgccgccgccgcttcgctgcgtcctccgactccccgcgccgccgagaccaggctcccgctccggttgcggccgcaccgccctccgcggccgccccctggggatccagcgagcgcggtcgtccttggtggaaggaaccatgaactggcatctccccctcttcctcttggcctctgtgacgctgccttccatctgctcccacttcaatcctctgtctctcgaggaactaggctccaacacggggatccaggttttcaatcagattgtgaagtcgaggcctcatgacaacatcgtgatctctccccatgggattgcgtcggtcctggggatgcttcagctgggggcggacggcaggaccaagaagcagctcgccatggtgatgagatacggcgtaaatggagttggtaaaatattaaagaagatcaacaaggccatcgtctccaagaagaataaagacattgtgacagtggctaacgccgtgtttgttaagaatgcctctgaaattgaagtgccttttgttacaaggaacaaagatgtgttccagtgtgaggtccggaatgtgaactttgaggatccagcctctgcctgtgattccatcaatgcatgggttaaaaatgaaaccagggatatgattgacaatctgctgtccccagatcttattgatggtgtgctcaccagactggtcctcgtcaacgcagtgtatttcaagggtctgtggaaatcacggttccaacccgagaacacaaagaaacgcactttcgtggcagccgacgggaaatcctatcaagtgccaatgctggcccagctctccgtgttccggtgtgggtcgacaagtgcccccaatgatttatggtacaacttcattgaactgccctaccacggggaaagcatcagcatgctgattgcactgccgactgagagctccactccgctgtctgccatcatcccacacatcagcaccaagaccatagacagctggatgagcatcatggtgcccaagagggtgcaggtgatcctgcccaagttcacagctgtagcacaaacagatttgaaggagccgctgaaagttcttggcattactgacatgtttgattcatcaaaggcaaattttgcaaaaataacaaggtcagaaaacctccatgtttctcatatcttgcaaaaagcaaaaattgaagtcagtgaagatggaaccaaagcttcagcagcaacaactgcaattctcattgcaagatcatcgcctccctggtttatagtagacagaccttttctgtttttcatccgacataatcctacaggtgctgtgttattcatggggcagataaacaaaccctgaagagtatactgcatctttcatagttctgttaaatatttttgtacatcgcttctttttcaaaactagttcttaggaacagactcgatgcaagtgtttctgttctgggaggtattggagggaaaaaacaagcaggatggctggaacactgtactgaggaatgaatagaaaggcttccagatgtctaaaagattctttaaactactgaactgttacctaggttaacaaccctgttgagtatttgctgtttgtccagttcaggaatttttgttttgttttgtctatatgtgcggcttttcagaagaaatttaatcagtgtgacagaaaaaaaaatgttttatggtagcttttactttttatgaaaaaaaaattatttgccttttaaattcttttcccccatccccctccaaagtcttgatagcaagcgttattttgggggtagaaacggtgaaatctctagcctctttgtgtttttgttgttgttgttgttgttgttttatataatgcatgtattcactaaaataaaatttaaaaaactcctgtcttgctagacaaggttgctgttgtgcagtgtgcctgtcactactggtctgtactccttggatttgcatttttgtattttgtacaaagtaaaaataaactgttatgagtagtaaaaataaagctatttctctgctatttgaaaataaata

SEQ ID NO: 445658 - DNA, 2727 bp, Homo sapiens
cggtacgagccctggtattccccccgccacctcacacacccccatccgggagacccacgtgcagctgggcccgggctggcgccgcacctcggggtctgcgcgtctccccggcgcgttccgggcgcagccccacgacacggacccctggcggggcggcatccgagaagtcgcaggcggagagggggcgtcctggaggccgggcgcggggacgctgcggcccgcggccacacaaaggaggcggcgggaaggcggggcaaggcgggccgggggcgggggcggcaggaaggggcgggggcccgcgcggcgccgccgataaagcccccgccgccgcggcagccagcttgcgctgtggggctgcccgggctgcgcggcgtctgcaggcgccaccgctgcctctttccggctgtgaccctcctcgccgccgccgcttcgctgcgtcctccgactccccgcgccgccgagaccaggctcccgctccggttgcggccgcaccgccctccgcggccgccccctggggatccagcgagcgcggtcgtccttggtggaaggaaccatgaactggcatctccccctcttcctcttggcctctgtgacgctgccttccatctgctcccacttcaatcctctgtctctcgaggaactaggctccaacacggggatccaggttttcaatcagattgtgaagtcgaggcctcatgacaacatcgtgatctctccccatgggattgcgtcggtcctggggatgcttcagctgggggcggacggcaggaccaagaagcagctcgccatggtgatgagatacggcgtaaatggagttggtaaaatattaaagaagatcaacaaggccatcgtctccaagaagaataaagacattgtgacagtggctaacgccgtgtttgttaagaatgcctctgaaattgaagtgccttttgttacaaggaacaaagatgtgttccagtgtgaggtccggaatgtgaactttgaggatccagcctctgcctgtgattccatcaatgcatgggttaaaaatgaaaccagggatatgattgacaatctgctgtccccagatcttattgatggtgtgctcaccagactggtcctcgtcaacgcagtgtatttcaagggtctgtggaaatcacggttccaacccgagaacacaaagaaacgcactttcgtggcagccgacgggaaatcctatcaagtgccaatgctggcccagctctccgtgttccggtgtgggtcgacaagtgcccccaatgatttatggtacaacttcattgaactgccctaccacggggaaagcatcagcatgctgattgcactgccgactgagagctccactccgctgtctgccatcatcccacacatcagcaccaagaccatagacagctggatgagcatcatggtgcccaagagggtgcaggtgatcctgcccaagttcacagctgtagcacaaacagatttgaaggagccgctgaaagttcttggcattactgacatgtttgattcatcaaaggcaaattttgcaaaaataacaaggtcagaaaacctccatgtttctcatatcttgcaaaaagcaaaaattgaagtcagtgaagatggaaccaaagcttcagcagcaacaactgcaattctcattgcaagatcatcgcctccctggtttatagtagacagaccttttctgtttttcatccgacataatcctacaggtgctgtgttattcatggggcagataaacaaaccctgaagagtatacaaaagaaaccatgcaaagcaacgactactttgctacgaagaaagactcctttcctgcatctttcatagttctgttaaatatttttgtacatcgcttctttttcaaaactagttcttaggaacagactcgatgcaagtgtttctgttctgggaggtattggagggaaaaaacaagcaggatggctggaacactgtactgaggaatgaatagaaaggcttccagatgtctaaaagattctttaaactactgaactgttacctaggttaacaaccctgttgagtatttgctgtttgtccagttcaggaatttttgttttgttttgtctatatgtgcggcttttcagaagaaatttaatcagtgtgacagaaaaaaaaatgttttatggtagcttttactttttatgaaaaaaaaattatttgccttttaaattcttttcccccatccccctccaaagtcttgatagcaagcgttattttgggggtagaaacggtgaaatctctagcctctttgtgtttttgttgttgttgttgttgttgttttatataatgcatgtattcactaaaataaaatttaaaaaactcctgtcttgctagacaaggttgctgttgtgcagtgtgcctgtcactactggtctgtactccttggatttgcatttttgtcggtcaagcttaaacataaccggtcatggagttgcttacacaaacaacaaccaacacagcaactaacatacttcatatcacaacacagcccagaacgagacgaagcaagagccaaactatgagctcatcactagaccgacgaaacaaacccaaaacggagaggcgcgtatacaatcatgatacaaaccaacaccgctccatatgagacacacacggactaacaggacgcaggcagagaggaagacacatgagtatcaactgggcgaacacccacacaccgacatatagtttcttctctttattctcacaatg

SEQ ID NO: 445659 - DNA, 2209 bp, Homo sapiens
cggtacgagccctggtattccccccgccacctcacacacccccatccgggagacccacgtgcagctgggcccgggctggcgccgcacctcggggtctgcgcgtctccccggcgcgttccgggcgcagccccacgacacggacccctggcggggcggcatccgagaagtcgcaggcggagagggggcgtcctggaggccgggcgcggggacgctgcggcccgcggccacacaaaggaggcggcgggaaggcggggcaaggcgggccgggggcgggggcggcaggaaggggcgggggcccgcgcggcgccgccgataaagcccccgccgccgcggcagccagcttgcgctgtggggctgcccgggctgcgcggcgtctgcaggcgccaccgctgcctctttccggctgtgaccctcctcgccgccgccgcttcgctgcgtcctccgactccccgcgccgccgagaccaggctcccgctccggttgcggccgcaccgccctccgcggccgccccctggggatccagcgagcgcggagttggtaaaatattaaagaagatcaacaaggccatcgtctccaagaagaataaagacattgtgacagtggctaacgccgtgtttgttaagaatgcctctgaaattgaagtgccttttgttacaaggaacaaagatgtgttccagtgtgaggtccggaatgtgaactttgaggatccagcctctgcctgtgattccatcaatgcatgggttaaaaatgaaaccagggatatgattgacaatctgctgtccccagatcttattgatggtgtgctcaccagactggtcctcgtcaacgcagtgtatttcaagggtctgtggaaatcacggttccaacccgagaacacaaagaaacgcactttcgtggcagccgacgggaaatcctatcaagtgccaatgctggcccagctctccgtgttccggtgtgggtcgacaagtgcccccaatgatttatggtacaacttcattgaactgccctaccacggggaaagcatcagcatgctgattgcactgccgactgagagctccactccgctgtctgccatcatcccacacatcagcaccaagaccatagacagctggatgagcatcatggtgcccaagagggtgcaggtgatcctgcccaagttcacagctgtagcacaaacagatttgaaggagccgctgaaagttcttggcattactgacatgtttgattcatcaaaggcaaattttgcaaaaataacaaggtcagaaaacctccatgtttctcatatcttgcaaaaagcaaaaattgaagtcagtgaagatggaaccaaagcttcagcagcaacaactgcaattctcattgcaagatcatcgcctccctggtttatagtagacagaccttttctgtttttcatccgacataatcctacaggtgctgtgttattcatggggcagataaacaaaccctgaagagtatacaaaagaaaccatgcaaagcaacgactactttgctacgaagaaagactcctttcctgcatctttcatagttctgttaaatatttttgtacatcgcttctttttcaaaactagttcttaggaacagactcgatgcaagtgtttctgttctgggaggtattggagggaaaaaacaagcaggatggctggaacactgtactgaggaatgaatagaaaggcttccagatgtctaaaagattctttaaactactgaactgttacctaggttaacaaccctgttgagtatttgctgtttgtccagttcaggaatttttgttttgttttgtctatatgtgcggcttttcagaagaaatttaatcagtgtgacagaaaaaaaaatgttttatggtagcttttactttttatgaaaaaaaaattatttgccttttaaattcttttcccccatccccctccaaagtcttgatagcaagcgttattttgggggtagaaacggtgaaatctctagcctctttgtgtttttgttgttgttgttgttgttgttttatataatgcatgtattcactaaaataaaatttaaaaaactcctgtcttgctagacaaggttgctgttgtgcagtgtgcctgtcactactggtctgtactccttggatttgcatttttgtattttgtacaaagtaaaaataaactgttatgagtagtaaaaataaagctatttctctgctatttgaaaataaata

SEQ ID NO: 445660 - DNA, 1087 bp, Homo sapiens
gtgtagaagacatgagagagtaatgtaaagggcctggcccaaggtaggcttagtaaatggtgaccattgagcctgttgtaacatggccagcctatggaacaagcatgaagtgtgtcttcagacaccagcctctgagggtccatgaagctagctaacttgctggccttatgcttacatggtctcatgtaatgtgcacaacacattttccttttcttcccgtagctgcaattctcattgcaagatcatcgcctccctggtttatagtagacagaccttttctgtttttcatccgacataatcctacaggtgctgtgttattcatggggcagataaacaaaccctgaagagtatacaaaagaaaccatgcaaagcaacgactactttgctacgaagaaagactcctttcctgcatctttcatagttctgttaaatatttttgtacatcgcttctttttcaaaactagttcttaggaacagactcgatgcaagtgtttctgttctgggaggtattggagggaaaaaacaagcaggatggctggaacactgtactgaggaatgaatagaaaggcttccagatgtctaaaagattctttaaactactgaactgttacctaggttaacaaccctgttgagtatttgctgtttgtccagttcaggaatttttgttttgttttgtctatatgtgcggcttttcagaagaaatttaatcagtgtgacagaaaaaaaaatgttttatggtagcttttactttttatgaaaaaaaaattatttgccttttaaattcttttcccccatccccctccaaagtcttgatagcaagcgttattttgggggtagaaacggtgaaatctctagcctctttgtgtttttgttgttgttgttgttgttgttttatataatgcatgtattcactaaaataaaatttaaaaaactcctgtcttgctagacaaggttgctgttgtgcagtgtgcctgtcactactggtctgtactccttggatttgcatttttgtattttgtacaaagtaaaaataaactgttatgagtagtaaaaataaagctatttctctgctatttgaaaataaata

SEQ ID NO: 445661 - DNA, 1100 bp, Homo sapiens
  misc_feature (937)..(937): n is a, c, g, or t
  misc_feature (966)..(966): n is a, c, g, or t
  misc_feature (1018)..(1018): n is a, c, g, or t
  misc_feature (1028)..(1028): n is a, c, g, or t
  misc_feature (1071)..(1071): n is a, c, g, or t
cggtacgagccctggtattccccccgccacctcacacacccccatccgggagacccacgtgcagctgggcccgggctggcgccgcacctcggggtctgcgcgtctccccggcgcgttccgggcgcagccccacgacacggacccctggcggggcggcatccgagaagtcgcaggcggagagggggcgtcctggaggccgggcgcggggacgctgcggcccgcggccacacaaaggaggcggcgggaaggcggggcaaggcgggccgggggcgggggcggcaggaaggggcgggggcccgcgcggcgccgccgataaagcccccgccgccgcggcagccagcttgcgctgtggggctgcccgggctgcgcggcgtctgcaggcgccaccgctgcctctttccggctgtgaccctcctcgccgccgccgcttcgctgcgtcctccgactccccgcgccgccgagaccaggctcccgctccggttgcggccgcaccgccctccgcggccgccccctggggatccagcgagcgcggtcgtccttggtggaaggaaccatgaactggcatctccccctcttcctcttggcctctgtgacgctgccttccatctgctcccacttcaatcctctgtctctcgaggaactaggctccaacacggggatccaggttttcaatcagattgtgaagtcgaggcctcatgacaacatcgtgatctctccccatgggattgcgtcggtcctggggatgcttcagctgggggcggacggcaggaccaagaagcagctcgccatggtgatgagatacggcgtaaatggagttggtaaaatattaaagaagatcaacaaggccatcgtctccaagaagaataaagacattgtgacagtggctaacgccgtgtttgttaagaatgcctctgaaattgaagtgccttttgttacntatggtaatacatattttaaatctaaaanatcacaatgtgtactgaatggttgtgaaaatatattgatatatatctagttntatgaaatancatggatataggatttaggtgatcttattcttagtccaaagtngtgtgatgaatactttaataaaggttgct

SEQ ID NO: 445662 - DNA, 408 bp, Homo sapiens
cgttgattttcaagcttagagaatggctagacttttcattagttttagaagtttcaatagcacttttactttttatgaaaaaaaaattatttgccttttaaattcttttcccccatccccctccaaagtcttgatagcaagcgttattttgggggtagaaacggtgaaatctctagcctctttgtgtttttgttgttgttgttgttgttgttttatataatgcatgtattcactaaaataaaatttaaaaaactcctgtcttgctagacaaggttgctgttgtgcagtgtgcctgtcactactggtctgtactccttggatttgcatttttgtattttgtacaaagtaaaaataaactgttatgagtagtaaaaataaagctatttctctgctatttgaaaataaata

SEQ ID NO: 445663 - DNA, 519 bp, Homo sapiens
gtcggtctagaggatcccatgcgcgacgcttccatcaatgcatgggttaaaaatgaaaccaggatatgattgacaatctgctgtccccagatcttattgatggtgtgctcaccagactggtcctcgtcaacgcagtgtatttcaagggtctgtggaaatcacggttccaacccgagaacacaaagaaacgcactttcgtggcagccgacgggaaatcctatcaagtgccaatgctggcccagctctccgtgttccggtgtgggtcgacaagtgcccccaatgatttatggtacaacttcattgaactgccctaccacggggaaagcatcagcatgctgattgcactgccgactgagagctccactccgctgtctgccatcatcccacacatcagcaccaagaccatagacagctggatgagcatcatggtgcccaagagggtgcaggtgatcctgcccaagttcacagctgtagcacaaacagatttgatggaagcgtcgcgcatgggtaccgagctcg

SEQ ID NO: 445664 - DNA, 2604 bp, Homo sapiens
atggtcaatccttggttaggaggaaagggagtggagaggaccgtgctgcctggcgttccccagctgcctttctttctgttttccccccaacggaatctctatgtggtctcctagagcctcgtgcctgcctctcagctagatgctgatatcattcccactcatgtagttgggaaggaagggtgtggcagagataaagggtccacggtcacgcagtatgtggggggtcacacagcctgtatgccaaagtggcacaccctgtgaatatgtagggtcgcacagcctttatgtgtcagtgccagagcctggacccgggtctgtagatgtgtgaaccgtgagctgataccatggatattcaaagatttacatcccatcaatgtttataccttcttgagaagaaatttgtgtcaaagcacactcctcctttcaagactacctcctcgccgtgctgcgtgatagccctagtatcacaaccaaaacacatgatacagaaagaggccagtatctgtgtggcttcaggctcttgtgcgttggccatgaagcaaaggaaggctgttgcatgaaataacctccttctgactccacccttgcatttgtgagatgtaaacagcagtgttaccaagaggtcttccagggaacacgttgcaggtcgtccttggtggaaggaaccatgaactggcatctccccctcttcctcttggcctctgtgacgctgccttccatctgctcccacttcaatcctctgtctctcgaggaactaggctccaacacggggatccaggttttcaatcagattgtgaagtcgaggcctcatgacaacatcgtgatctctccccatgggattgcgtcggtcctggggatgcttcagctgggggcggacggcaggaccaagaagcagctcgccatggtgatgagatacggcgtaaatggagttggtaaaatattaaagaagatcaacaaggccatcgtctccaagaagaataaagacattgtgacagtggctaacgccgtgtttgttaagaatgcctctgaaattgaagtgccttttgttacaaggaacaaagatgtgttccagtgtgaggtccggaatgtgaactttgaggatccagcctctgcctgtgattccatcaatgcatgggttaaaaatgaaaccagggatatgattgacaatctgctgtccccagatcttattgatggtgtgctcaccagactggtcctcgtcaacgcagtgtatttcaagggtctgtggaaatcacggttccaacccgagaacacaaagaaacgcactttcgtggcagccgacgggaaatcctatcaagtgccaatgctggcccagctctccgtgttccggtgtgggtcgacaagtgcccccaatgatttatggtacaacttcattgaactgccctaccacggggaaagcatcagcatgctgattgcactgccgactgagagctccactccgctgtctgccatcatcccacacatcagcaccaagaccatagacagctggatgagcatcatggtgcccaagagggtgcaggtgatcctgcccaagttcacagctgtagcacaaacagatttgaaggagccgctgaaagttcttggcattactgacatgtttgattcatcaaaggcaaattttgcaaaaataacaaggtcagaaaacctccatgtttctcatatcttgcaaaaagcaaaaattgaagtcagtgaagatggaaccaaagcttcagcagcaacaactgcaattctcattgcaagatcatcgcctccctggtttatagtagacagaccttttctgtttttcatccgacataatcctacaggtgctgtgttattcatggggcagataaacaaaccctgaagagtatacaaaagaaaccatgcaaagcaacgactactttgctacgaagaaagactcctttcctgcatctttcatagttctgttaaatatttttgtacatcgcttctttttcaaaactagttcttaggaacagactcgatgcaagtgtttctgttctgggaggtattggagggaaaaaacaagcaggatggctggaacactgtactgaggaatgaatagaaaggcttccagatgtctaaaagattctttaaactactgaactgttacctaggttaacaaccctgttgagtatttgctgtttgtccagttcaggaatttttgttttgttttgtctatatgtgcggcttttcagaagaaatttaatcagtgtgacagaaaaaaaaatgttttatggtagcttttactttttatgaaaaaaaaattatttgccttttaaattcttttcccccatccccctccaaagtcttgatagcaagcgttattttgggggtagaaacggtgaaatctctagcctctttgtgtttttgttgttgttgttgttgttgttttatataatgcatgtattcactaaaataaaatttaaaaaactcctgtcttgctagacaaggttgctgttgtgcagtgtgcctgtcactactggtctgtactccttggatttgcatttttgtattttgtacaaagtaaaaataaactgttatgagtagtaaaaataaagctatttctctgctatttgaaaataaata

SEQ ID NO: 445665 - DNA, 1782 bp, Homo sapiens
  misc_feature (46)..(46): n is a, c, g, or t
ggcacgagcggaaagaggcagcggtggccctgcagacgccgcgcanccgggcgacggcaggaccaagaagcagctcgccatggtgatgagatacggcgtaaatggagttggtaaaatattaaagaagatcaacaaggccatcgtctccaagaagaataaagacattgtgacagtggctaacgccgtgtttgttaagaatgcctctgaaattgaagtgccttttgttacaaggaacaaagatgtgttccagtgtgaggtccggaatgtgaactttgaggatccagcctctgcctgtgattccatcaatgcatgggttaaaaatgaaaccagggatatgattgacaatctgctgtccccagatcttattgatggtgtgctcaccagactggtcctcgtcaacgcagtgtatttcaagggtctgtggaaatcacggttccaacccgagaacacaaagaaacgcactttcgtggcagccgacgggaaatcctatcaagtgccaatgctggcccagctctccgtgttccggtgtgggtcgacaagtgcccccaatgatttatggtacaacttcattgaactgccctaccacggggaaagcatcagcatgctgattgcactgccgactgagagctccactccgctgtctgccatcatcccacacatcagcaccaagaccatagacagctggatgagcatcatggtgcccaagagggtgcaggtgatcctgcccaagttcacagctgtagcacaaacagatttgaaggagccgctgaaagttcttggcattactgacatgtttgattcatcaaaggcaaattttgcaaaaataacaaggtcagaaaacctccatgtttctcatatcttgcaaaaagcaaaaattgaagtcagtgaagatggaaccaaagcttcagcagcaacaactgcaattctcattgcaagatcatcgcctccctggtttatagtagacagaccttttctgtttttcatccgacataatcctacaggtgctgtgttattcatggggcagataaacaaaccctgaagagtatacaaaagaaaccatgcaaagcaacgactactttgctacgaagaaagactcctttcctgcatctttcatagttctgttaaatatttttgtacatcgcttctttttcaaaactagttcttaggaacagactcgatgcaagtgtttctgttctgggaggtattggagggaaaaaacaagcaggatggctggaacactgtactgaggaatgaatagaaaggcttccagatgtctaaaagattctttaaactactgaactgttacctaggttaacaaccctgttgagtatttgctgtttgtccagttcaggaatttttgttttgttttgtctatatgtgcggcttttcagaagaaatttaatcagtgtgacagaaaaaaaaatgttttatggtagcttttactttttatgaaaaaaaaattatttgccttttaaattcttttcccccatccccctccaaagtcttgatagcaagcgttattttgggggtagaaacggtgaaatctctagcctctttgtgtttttgttgttgttgttgttgttgttttatataatgcatgtattcactaaaataaaatttaaaaaactcctgtcttgctagacaaggttgctgttgtgcagtgtgcctgtcactactggtctgtactccttggatttgcatttttgtattttgtacaaagtaaaaataaactgttatgagtagtaaaaataaagctatttctctgctatttgaaaataaata

SEQ ID NO: 445666 - DNA, 1080 bp, Homo sapiens
ttttctccatttctgctttcatgctaggttcacagctgtagcacaaacagatttgaaggagccgctgaaagttcttggcattactgacatgtttgattcatcaaaggcaaattttgcaaaaataacaaggtcagaaaacctccatgtttctcatatcttgcaaaaagcaaaaattgaagtcagtgaagatggaaccaaagcttcagcagcaacaactgcaattctcattgcaagatcatcgcctccctggtttatagtagacagaccttttctgtttttcatccgacataatcctacaggtgctgtgttattcatggggcagataaacaaaccctgaagagtatacaaaagaaaccatgcaaagcaacgactactttgctacgaagaaagactcctttcctgcatctttcatagttctgttaaatatttttgtacatcgcttctttttcaaaactagttcttaggaacagactcgatgcaagtgtttctgttctgggaggtattggagggaaaaaacaagcaggatggctggaacactgtactgaggaatgaatagaaaggcttccagatgtctaaaagattctttaaactactgaactgttacctaggttaacaaccctgttgagtatttgctgtttgtccagttcaggaatttttgttttgttttgtctatatgtgcggcttttcagaagaaatttaatcagtgtgacagaaaaaaaaatgttttatggtagcttttactttttatgaaaaaaaaattatttgccttttaaattcttttcccccatccccctccaaagtcttgatagcaagcgttattttgggggtagaaacggtgaaatctctagcctctttgtgtttttgttgttgttgttgttgttgttttatataatgcatgtattcactaaaataaaatttaaaaaactcctgtcttgctagacaaggttgctgttgtgcagtgtgcctgtcactactggtctgtactccttggatttgcatttttgtattttgtacaaagtaaaaataaactgttatgagtagtaaaaataaagctatttctctgctatttgaaaataaata

SEQ ID NO: 445667 - DNA, 1071 bp, Homo sapiens
cggtacgagccctggtattccccccgccacctcacacacccccatccgggagacccacgtgcagctgggcccgggctggcgccgcacctcggggtctgcgcgtctccccggcgcgttccgggcgcagccccacgacacggacccctggcggggcggcatccgagaagtcgcaggcggagagggggcgtcctggaggccgggcgcggggacgctgcggcccgcggccacacaaaggaggcggcgggaaggcggggcaaggcgggccgggggcgggggcggcaggaaggggcgggggcccgcgcggcgccgccgataaagcccccgccgccgcggcagccagcttgcgctgtggggctgcccgggctgcgcggcgtctgcaggcgccaccgctgcctctttccggctgtgaccctcctcgccgccgccgcttcgctgcgtcctccgactccccgcgccgccgagaccaggctcccgctccggttgcggccgcaccgccctccgcggccgccccctggggatccagcgagcgcggtcgtccttggtggaaggaaccatgaactggcatctccccctcttcctcttggcctctgtgacgctgccttccatctgctcccacttcaatcctctgtctctcgaggaactaggctccaacacggggatccaggttttcaatcagattgtgaagtcgaggcctcatgacaacatcgtgatctctccccatgggattgcgtcggtcctggggatgcttcagctgggggcggacggcaggaccaagaagcagctcgccatggtgatgagatacggcgtaaatggtgcgtgtgcacaattgctcactggcggagcctttgcctgagagtcttgtgacaggagggtttatggcttggtttttgctgacaaccccaagaagcagagcagccagaaggggatttgctggtgccacttggggcttggggtcagtctcttctaaagaacaaacactgtggtgctggcagttaggagaactagactctggtcccttttttgtacttttggagcttggggtctgccactaggtctcctttcccagggctc

SEQ ID NO: 445668 - DNA, 1064 bp, Homo sapiens
cccagaggatgcagatgtaccttctctcaggccgatgacctcaggcctccccggtccctggagctctaggaaaggtgagcgcgatctcgcgcccacacccagtgctctgggtcataagcctggatctggaaaaacaaacgccctttgagaagacggggactcgccaggatacccctctctcccctcatccagcctccagcccacccaattcctccccacctcctccacctccccaggccccactcacctcctccaactcctctggggaaacccaagccctgcagctcatggaacagaagaagtggaaccgtcgtttctggaacaggactatctgagagcggttcttcctggccctcgagttcatggaacggtataactggaaccgacgcttacggagcaagggtatgcgagagcggttcttcctggccctcgggttcgtggaacggtataactggaaccgacgcttacggagcaagggtatgcgagagcggttcttcctggccctcgggttcatggaatggcctaactggaaccaacgcttacggagcaagggtatgcgagagcggttcttcctatacaggaagtggaagatgtttggtttggagtcctcgtcgtcctcctccatgtcattggccaggtagctgaggacagaaatcaggttgctgctcaggggcaccaccaggagaggcctccggctgaggtcagcttcccagagaggaaggtaagggaccgtccctagctcaggactggcacccaccctgcagagagccatgccttcctcaggagggctctgctggacagagacctgatcaagggcgtctcccactccttcaggatggagacaaaaacccaactggtggccgagagtggtggcttacgcctggaatcccagcacactgggaggccaaagcaggaggatcacttgaggccaggagtttgagacgggcctgggcaacatagcaagaccctcgtctctattaaaaatgtaagaaatatgccagacgcggtggctcatgcctgtaatcccagcactttagaaggctgaagcaggtggatcgcttgag

SEQ ID NO: 445669 - DNA, 519 bp, Homo sapiens
cccagaggatgcagatgtaccttctctcaggccgatgacctcaggcctccccggtccctggagctctaggaaaggtgagcgcgatctcgcgcccacacccagtgctctgggtcataagcctggatctggaaaaacaaacgccctttgagaagacggggactcgccaggatacccctctctcccctcatccagcctccagcccacccaattcctccccacctcctccacctccccaggccccactcacctcctccaactcctctggggaaacccaagccctgcagctcatggaacagaagaagtggaaccgtcgtttctggaacaggactatctgagagcggttcttcctggccctcgagttcatggaacggtataactggaaccgacgcttacggagcaagggtatgcgagagcggttcttcctggccctcgggttcgtggaacggtataactggaaccgacggttccacttcttctgttccatgagctgcagggcttgggttcccccagaggagttgg

SEQ ID NO: 445670 - DNA, 659 bp, Homo sapiens
cccagaggatgcagatgtaccttctctcaggccgatgacctcaggcctccccggtccctggagctctaggaaaggtgagcgcgatctcgcgcccacacccagtgctctgggtcataagcctggatctggaaaaacaaacgccctttgagaagacggggactcgccaggatacccctctctcccctcatccagcctccagcccacccaattcctccccacctcctccacctccccaggccccactcacctcctccaactcctctggggaaacccaagccctgcagctcatggaacagaagaagtggaaccgtcgtttctggaacaggactatctgagagcggttcttcctggccctcgagttcatggaacggtataactggaaccgacgcttacggagcaagggtatgcgagagcggttcttcctggccctcgggttcgtggaacggtataactggaaccgacgcttacggagcaagggtatgcgagagcggttcttcctggccctcgggttcatggaatggcctaactggaaccaacgcttacggagcaatttgaaaggcaaggtaagaggatcgcttgagcttgagtctgaggccgcagtgagctatgaccacaccactgcaccccagtctgggtgacagcgcaagaccccaacgcca

SEQ ID NO: 445671 - DNA, 464 bp, Homo sapiens
ggtgggaaggtgggtatgggggatggagactccagctgtgcagcctccattctgagagctgcttagataaggtgcgcaaagccaggcattcctaggctagcactgtcaggatatgatttgtatcacttttgttttcacattatctgtctcttgaggaagtcactgcctgtctgcttttcactctgtaccctgggtttccctgataagataggcaaacttccagcattacagagattgttaatcccctagcttgtgcttccctaatacaaattgtttttttaagaaaccctcaaatttgtgttctaacaattggcatgttttatacatcttgacctcatatccaggtttaaaggaggtgaacacactggttcttaaagcttccctctatcacagacgctcctaaataagctatctgtggtaatctagccctgttcatcttgcaaactgagttgctgtataattgt

SEQ ID NO: 445672 - DNA, 1205 bp, Homo sapiens
acgtgaggccgggcagggggcggggccggcgaatgcccgtcccgacccgtcgcgcctcccctgttagctccctgccagccgaggcggggcgaacctctgccctgttgcgtgggagtgactcacagctcccgccccttttggctccgctttctcgcggccagtccctcgcaccacgtgccctcctggccgcgcccccagctgccctttccaactgcctgttggaagccgctgtaaaacgtcgtgaggagcgccgctgctttacggctgcctctcccagactagagccccggagcgcccaccgccgtcagccgcgtcttcaagctagtcggccccgcggagagcgagagaccctgcgcaccgcagccctctccgctgcgcccattcctgccgccggcgatgtaactcggggaggcagcggtgcccgctggcccggggttgagacaggcggcaggtgcctgtgaggcgggcgggtgccgggggccagcaggatggaggaaagcatggaagaggaggaggggggcagctacgaggcgatgatggacgaccagaaccacaacaactgggaggctgcggtggacggcttccggcagcccctgccacctccgccgcccccctcgtcgatcccggcccctgcccgagagcctccgggggggcagctgctggcggtgcccgcggtctccgtggacaggaaaggccccaaggaggggctcccgatggggccgcagccaccgccggaggctaatggggtgatcatgatgttgaagagctgcgacgcggccgccgccgtggccaaggcggcccccgcccccaccgccagctccaccatcaacatcaacacctccacctccaagttcttaatgaatgttataactattgaagattataagagcacatactggccaaaattggatggtgccatagatcaacttttaactcagagtcctggtgactatatccccatatcctatgaacagatatacagttgtgtgtataaatgtgtatgccagcagcactcggaacagatgtatagtgatctgattaaaaagataactaatcacttagagagagtctcaaaggagctgcaggtaaagaactgattgtattgatttttgcttccttgggttttcctgactggttgcagttagcttttctaatacacatttggaagcttgttaatttgattatgatataaatttataaatgtt

SEQ ID NO: 445673 - DNA, 2781 bp, Homo sapiens
acgtgaggccgggcagggggcggggccggcgaatgcccgtcccgacccgtcgcgcctcccctgttagctccctgccagccgaggcggggcgaacctctgccctgttgcgtgggagtgactcacagctcccgccccttttggctccgctttctcgcggccagtccctcgcaccacgtgccctcctggccgcgcccccagctgccctttccaactgcctgttggaagccgctgtaaaacgtcgtgaggagcgccgctgctttacggctgcctctcccagactagagccccggagcgcccaccgccgtcagccgcgtcttcaagctagtcggccccgcggagagcgagagaccctgcgcaccgcagccctctccgctgcgcccattcctgccgccggcgatgtaactcggggaggcagcggtgcccgctggcccggggttgagacaggcggcaggtgcctgtgaggcgggcgggtgccgggggccagcaggatggaggaaagcatggaagaggaggaggggggcagctacgaggcgatgatggacgaccagaaccacaacaactgggaggctgcggtggacggcttccggcagcccctgccacctccgccgcccccctcgtcgatcccggcccctgcccgagagcctccgggggggcagctgctggcggtgcccgcggtctccgtggacaggaaaggccccaaggaggggctcccgatggggccgcagccaccgccggaggctaatggggtgatcatgatgttgaagagctgcgacgcggccgccgccgtggccaaggcggcccccgcccccaccgccagctccaccatcaacatcaacacctccacctccaagttcttaatgaatgttataactattgaagattataagagcacatactggccaaaattggatggtgccatagatcaacttttaactcagagtcctggtgactatatccccatatcctatgaacagatatacagatacaaaaccgtacatgcaggctggttgtctggttagtcaatggctgatttgcttcaactgtctagtatgtatgtgcagcctgaaactggctccttaaaaggaaagccgggtcagtcatcttgaaaaaatgacatgtaaaagtaaatcgataattgttttgagagacggtacatgttttaaaggttggccttaagcttcagtaacattgtcattttgtgaccttttgttgtcacacctgtaccctaacctgacaggaattaactactgtttttttgtggggcagaaagcaaaacctggtgttgtgacttttatcctaatggttcttaggcaaggttagtgagaagaaacacaaacccagatgcatgcattgtgcattattttgtagacaagctactttttcttctgtccctttaacaaatttgcagcaattaccctccctttggggtctagagtgaaagctaatttgtgggtagatgagattgcagaagaatggatgtccatggctgtgaacactgcacactgcacatccatctccagtgctcacactgtgcagctaccactccctggctgcgtgccatgctgtcgggttgcagatttgcacacataaattcctcaggaagagtttgcatgagcatcacctcgcaatattctgtactgaccaaacaagggatttgaacgtttttcagcacaaaaggataacttccgagtggtggtctgtacgcatactagcaaaggtaatggtgatctagcaaacaaaattggtttctgcagttagaagtgagcaggagcacttgtattatagtatttaaataatcctggttaatctctttttaagccgagtaacccctccagattttgcctttttattattgaggctggctttattttcttctactttttttcccgttttatagcagttaattatttttgtgattattatgcaagaagcattgcccttgagttaaactgttattgtttcataagcagctattaaaataactgagcattgttttatgaacatacactaatctgagatactgaaaagctttgcaactaaaaagcaaaacaacctacattagtcatctagccattgtttggatgttttgagttgattttttatggtgcctcttttagcttggaatattacgtttactttaatccaagtctaggccttttaaagggtccttaaaattaaagttcagaatgtgaatccctttgacatctattacaggtttataggacctttttggttgtgattactgttttcaatacgattgtataaatgaagttaactttgtcagaagttaaaatggaggtcataggagttcctggagaaatggctctcctgtttctttcattaccccactgaagttcaccccagtttctggccacaagaatatgagaaaggaaccctgttgttttccaagggaaatcattcctctctgtccccactgttgattaactaaagtcctggacaccttccttcctccactggccaagacccaccttgacccaccttgaacctcttttcagagccgagtggcatgaatatgtgtactgtttctgcttctgttgatggagtggctgtgggagaattaaaggaaatgctaatttgagcttcattcataggggaacctactatatattgcatccctgctggttggaaattatcttcatctctggactgcattgtttagaaaaatgttaatggcttacaattctgagaactttattgtgtggctctggggttaagaattctgtggtttgaaaaaaaataaatattttgtattgattctca

SEQ ID NO: 445674 - DNA, 2423 bp, Homo sapiens
tctcccagtctacatgtcctggctgttaatcatcttggccccttgaggcacatcacagtttgaaggacctgtttaagttgaaatagactttgcttatttattgggattctaaaaaattctgagtgagtttgcagtatgagaggaaataagatttcctcctccttcctctcattttatattgactgtttgccagaaactgttttcttctgttttcttatattttgtttttgagatggagtctcactctctcacccaggctggagtgcagtggtgcaatctcagctcactgcaacctctgcctcctgggttcaagtgattctcctgcctcggcctcctgagtagctggaattacaggcacgtgccactacgcccggctactttttgtattttgtttttagtagagacggggtttcaccatgttggtcaggctggtcttgaactcctgacctcaagtgatccacccacctcggcctcccaaagtgctgggattataggtgtgagccactgcacctggccttttttttttttctttctgggtattcttgccagtacagtatatggtttttctaccccaattacatactgggttttgtaccacatcactaaaggcccaaatcattgaagatacaaaaccgtacatgcaggctggttgtctggttagtcaatggctgatttgcttcaactgtctagtatgtatgtgcagcctgaaactggctccttaaaaggaaagccgggtcagtcatcttgaaaaaatgacatgtaaaagtaaatcgataattgttttgagagacggtacatgttttaaaggttggccttaagcttcagtaacattgtcattttgtgaccttttgttgtcacacctgtaccctaacctgacaggaattaactactgtttttttgtggggcagaaagcaaaacctggtgttgtgacttttatcctaatggttcttaggcaaggttagtgagaagaaacacaaacccagatgcatgcattgtgcattattttgtagacaagctactttttcttctgtccctttaacaaatttgcagcaattaccctccctttggggtctagagtgaaagctaatttgtgggtagatgagattgcagaagaatggatgtccatggctgtgaacactgcacactgcacatccatctccagtgctcacactgtgcagctaccactccctggctgcgtgccatgctgtcgggttgcagatttgcacacataaattcctcaggaagagtttgcatgagcatcacctcgcaatattctgtactgaccaaacaagggatttgaacgtttttcagcacaaaaggataacttccgagtggtggtctgtacgcatactagcaaaggtaatggtgatctagcaaacaaaattggtttctgcagttagaagtgagcaggagcacttgtattatagtatttaaataatcctggttaatctctttttaagccgagtaacccctccagattttgcctttttattattgaggctggctttattttcttctactttttttcccgttttatagcagttaattatttttgtgattattatgcaagaagcattgcccttgagttaaactgttattgtttcataagcagctattaaaataactgagcattgttttatgaacatacactaatctgagatactgaaaagctttgcaactaaaaagcaaaacaacctacattagtcatctagccattgtttggatgttttgagttgattttttatggtgcctcttttagcttggaatattacgtttactttaatccaagtctaggccttttaaagggtccttaaaattaaagttcagaatgtgaatccctttgacatctattacaggtttataggacctttttggttgtgattactgttttcaatacgattgtataaatgaagttaactttgtcagaagttaaaatggaggtcataggagttcctggagaaatggctctcctgtttctttcattaccccactgaagttcaccccagtttctggccacaagaatatgagaaaggaaccctgttgttttccaagggaaatcattcctctctgtccccactgttgattaactaaagtcctggacaccttccttcctccactggccaagacccaccttgacccaccttgaacctcttttcagagccgagtggcatgaatatgtgtactgtttctgcttctgttgatggagtggctgtgggagaattaaaggaaatgctaatttgagcttcattcataggggaacctactatatattgcatccctgctggttggaaattatcttcatctctggactgcattgtttagaaaaatgttaatggcttacaattctgagaactttattgtgtggctctggggttaagaattctgtggtttgaaaaaaaataaatattttgtattgattctca

SEQ ID NO: 445675 - DNA, 1594 bp, Homo sapiens
acgtgaggccgggcagggggcggggccggcgaatgcccgtcccgacccgtcgcgcctcccctgttagctccctgccagccgaggcggggcgaacctctgccctgttgcgtgggagtgactcacagctcccgccccttttggctccgctttctcgcggccagtccctcgcaccacgtgccctcctggccgcgcccccagctgccctttccaactgcctgttggaagccgctgtaaaacgtcgtgaggagcgccgctgctttacggctgcctctcccagactagagccccggagcgcccaccgccgtcagccgcgtcttcaagctagtcggccccgcggagagcgagagaccctgcgcaccgcagccctctccgctgcgcccattcctgccgccggcgatgtaactcggggaggcagcggtgcccgctggcccggggttgagacaggcggcaggtgcctgtgaggcgggcgggtgccgggggccagcaggatggaggaaagcatggaagaggaggaggggggcagctacgaggcgatgatggacgaccagaaccacaacaactgggaggctgcggtggacggcttccggcagcccctgccacctccgccgcccccctcgtcgatcccggcccctgcccgagagcctccgggggggcagctgctggcggtgcccgcggtctccgtggacaggaaaggccccaaggaggggctcccgatggggccgcagccaccgccggaggctaatggggtgatcatgatgttgaagagctgcgacgcggccgccgccgtggccaaggcggcccccgcccccaccgccagctccaccatcaacatcaacacctccacctccaagttcttaatgaatgttataactattgaagattataagagcacatactggccaaaattggatggtgccatagatcaacttttaactcagagtcctggtgactatatccccatatcctatgaacagatatacagttgtgtgtataaatgtgtatgccagcagcactcggaacagatgtatagtgatctgattaaaaagataactaatcacttagagagagtctcaaaggagctgcaggccagccctccagatctctatattgaaagatttaatatagctcttggacaatatatgggagcattgcagagcattgtgcctcttttcatatatatgaataagttttacatcgaaaccaagcttaacagagacttaaaagatgaccttataaagctgtttacggaacatgttgcagaaaagcacatttacagcctaatgcctttacttttagaagcccagtcaacaccatttcaggtcacaccttcaactatggcaaatattgtgaaaggcctgtataccctcagaccaggtaaacatttctcatttctgttgggattggaactgtttgttacagccttttccaagagggcagtggttctgtatgtgttttgtgaggcttaatggtacttggatttgctggagcaaaaaaattgagtagatactcatcattgtgaaatgtaaactcagagctcagttggaatgttctctgctagtggaaaccaactagtgtggtttttgcagaacctgtg

SEQ ID NO: 445676 - DNA, 1662 bp, Homo sapiens
ctgacaggaattaactactgtcaggttagggtacaggtgtgacaacaaaaggtcacataaatgacaatgttactgaagcttaaggccaacctttaaaacctgtaccctaacctgacaggaattaactactgtttttttgtggggcagaaagcaaaacctggtgttgtgacttttatcctaatggttcttaggcaaggttagtgagaagaaacacaaacccagatgcatgcattgtgcattattttgtagacaagctactttttcttctgtccctttaacaaatttgcagcaattaccctccctttggggtctagagtgaaagctaatttgtgggtagatgagattgcagaagaatggatgtccatggctgtgaacactgcacactgcacatccatctccagtgctcacactgtgcagctaccactccctggctgcgtgccatgctgtcgggttgcagatttgcacacataaattcctcaggaagagtttgcatgagcatcacctcgcaatattctgtactgaccaaacaagggatttgaacgtttttcagcacaaaaggataacttccgagtggtggtctgtacgcatactagcaaaggtaatggtgatctagcaaacaaaattggtttctgcagttagaagtgagcaggagcacttgtattatagtatttaaataatcctggttaatctctttttaagccgagtaacccctccagattttgcctttttattattgaggctggctttattttcttctactttttttcccgttttatagcagttaattatttttgtgattattatgcaagaagcattgcccttgagttaaactgttattgtttcataagcagctattaaaataactgagcattgttttatgaacatacactaatctgagatactgaaaagctttgcaactaaaaagcaaaacaacctacattagtcatctagccattgtttggatgttttgagttgattttttatggtgcctcttttagcttggaatattacgtttactttaatccaagtctaggccttttaaagggtccttaaaattaaagttcagaatgtgaatccctttgacatctattacaggtttataggacctttttggttgtgattactgttttcaatacgattgtataaatgaagttaactttgtcagaagttaaaatggaggtcataggagttcctggagaaatggctctcctgtttctttcattaccccactgaagttcaccccagtttctggccacaagaatatgagaaaggaaccctgttgttttccaagggaaatcattcctctctgtccccactgttgattaactaaagtcctggacaccttccttcctccactggccaagacccaccttgacccaccttgaacctcttttcagagccgagtggcatgaatatgtgtactgtttctgcttctgttgatggagtggctgtgggagaattaaaggaaatgctaatttgagcttcattcataggggaacctactatatattgcatccctgctggttggaaattatcttcatctctggactgcattgtttagaaaaatgttaatggcttacaattctgagaactttattgtgtggctctggggttaagaattctgtggtttgaaaaaaaataaatattttgtattgattctca

SEQ ID NO: 445677 - DNA, 3202 bp, Homo sapiens
ttttttttactggctgcttggagttaattttacgtttggcgccaggtgcacaggtccgggagtaatgaaagctatcaagtgctggggtccgggcggtagagagcggggctcttactggattttggtgtttgctgtgttgatgcacaatgtctgcttgttgcatccgcctattttacagggtggggggtggagagggtggggagcagcactcggaacagatgtatagtgatctgattaaaaagataactaatcacttagagagagtctcaaaggagctgcaggccagccctccagatctctatattgaaagatttaatatagctcttggacaatatatgggagcattgcagagcattgtgcctcttttcatatatatgaataagttttacatcgaaaccaagcttaacagagacttaaaagatgaccttataaagctgtttacggaacatgttgcagaaaagcacatttacagcctaatgcctttacttttagaagcccagtcaacaccatttcaggtcacaccttcaactatggcaaatattgtgaaaggcctgtataccctcagaccagagtgggttcagatggctccaactctattttctaaatttattccaaacattctccctccggcggtggaatctgaactttctgaatatgctgctcaagatcagaaatttcaaagagaacttatacagaatggttttacaaggggtgaccagtcccggaagagagctggggatgagttggcttataatagctcgtcagcatgtgcaagttccagggggtacagatagtgaatgtattgaatatgctttccttcctgaaaagaggacacactggagctgcagagactgtattcagagcacagtgggggctgcacacactcaggagctctgtcacaaagctgttcatggaagaggatgttggacttcttacttggtttgtaattttaaaacaaaaactaaaaaaaaaaaaaacgttgctgctagacttgggggtgattttgaaatgggacaatcttttaatgagtttatctacagattctgtgaggaaaaagcatctcagaaagtgaccatttctaagtgaaatctgacagccaaaatcagcagcttcctccaaaaatataagagcagaagaattttttttttaagcacttgttttgttcatttgtggacttggcattttggtgtattggtttcacatgtcaggatctcttttgctttaaaaccaagcagatcattacagtacagtatttttcacccacaaccaaaacaaccccttttaaaagagttggtctttgtttagcattagaaagtcttgttaaaggaaaatgctaactctgcttttgctagaactttcccccatcagttcacaactttcttctactctgtgccttgagctttgtgcactttgcaactgtgtgaccatgttgtcaaactcctcctggagaagtgtatggtatctaaactcacccaccaagatggcaggtgtggccctgtagcaggatgctaattaagtgggaaaatagaaaccttttgcacatgggtcggattttcccctggttcaccagagcatattcatattaatgttggggaccaactctcctagagcatttccattccctgtgccacttaacacgatgtctgtcaccagctgctatagtattggcagtactctagtttagggatgggcggtactttagcacggaagcttcccttagtattattgagagctacttcctgcgatgctctaggaagcagatacagttattaagtccaaatacacagtggtgtggggttcctgatcacttcattttaaatgaatgagataattacttaaaaaaagtctgtcatttgaacattatatttgagtgtgatagggaagaagtagcactgctgtcctaaggctcccttccagctgtggcaaagctatatttctgtttctccacatccacagtgctttttagtccatcataaaagtttctgaagcttattctagctgttgttgaaagcccaagaaaaatagatgtggcaagagaaaaatacttttcttctcaattttgcttgaatcttaattgagcataggcttctctactaggcaacatcagactaatagtatttacctcttcagagaacttgaggggaaaagaaacatcccagggatgctgtcgcatgtctgctctgcaggttcttcatacagctgcctctgccaattcagtttattttttggggggagtggtgtgggtgggagagttagaagtgggatattgggagcaagtaagtcacccaataattgaagtccttgatttgtaaaactgttatacagagaagtaaagataaaggttgtcagatttattttttaaagtacttaaccagagttcgtggattttgtggactttaattggactcaattcactctgtgagcatcctggattgcatcgatgaacactgaattactgtaagaacatagacaggctctcactatgacctggacagtttaagttgctacactggtaacattctagtatcaaggagaattccattcatcatgacattcacattttacttttctcaatggaatgcttgcttcaggcttaccaatcacacctagaactgaagtctgagtgagtggtattaataatttttctgaaaggaataaaattggaatgtttctaaatgtggagaaattcttcagtatcctaataatatacccaaatgctttttctgggagagagcattcttttacaaaagaactttccctataaaagcatcacagtataatgtgaattggcattaaaatctttggatgcttttgcattattaagttcatggagaaatatattctttttactatgtatgtattaataaaaagtgggcaaagtaaagtttgcaaaatttagtttctctaaatttttgcacagtgactgcagctggctatgggtcagctcttaatacaacaaaaccttgactggaagtcactatagaaaggctgcggtggacggcttccggcagcccctgccacctccgccgcccccctcgtcgatcccggcccctgcccgagagcctccgggggggcagctgctggcggtgcccgcggtctccgtggacaggaaaggccccaaggaggggctcccgatggggccgcagccaccgccggaggctaatggggtgatcatgatgttgaagagctgcgacgcggccgc

SEQ ID NO: 445678 - DNA, 2392 bp, Homo sapiens
  misc_feature (2346)..(2346): n is a, c, g, or t
  misc_feature (2349)..(2349): n is a, c, g, or t
  misc_feature (2351)..(2351): n is a, c, g, or t
  misc_feature (2353)..(2353): n is a, c, g, or t
  misc_feature (2358)..(2358): n is a, c, g, or t
  misc_feature (2363)..(2363): n is a, c, g, or t
acgtgaggccgggcagggggcggggccggcgaatgcccgtcccgacccgtcgcgcctcccctgttagctccctgccagccgaggcggggcgaacctctgccctgttgcgtgggagtgactcacagctcccgccccttttggctccgctttctcgcggccagtccctcgcaccacgtgccctcctggccgcgcccccagctgccctttccaactgcctgttggaagccgctgtaaaacgtcgtgaggagcgccgctgctttacggctgcctctcccagactagagccccggagcgcccaccgccgtcagccgcgtcttcaagctagtcggccccgcggagagcgagagaccctgcgcaccgcagccctctccgctgcgcccattcctgccgccggcgatgtaactcggggaggcagcggtgcccgctggcccggggttgagacaggcggcaggtgcctgtgaggcgggcgggtgccgggggccagcaggatggaggaaagcatggaagaggaggaggggggcagctacgaggcgatgatggacgaccagaaccacaacaactgggaggctgcggtggacggcttccggcagcccctgccacctccgccgcccccctcgtcgatcccggcccctgcccgagagcctccgggggggcagctgctggcggtgcccgcggtctccgtggacaggaaaggccccaaggaggggctcccgatggggccgcagccaccgccggaggctaatggggtgatcatgatgttgaagagctgcgacgcggccgccgccgtggccaaggcggcccccgcccccaccgccagctccaccatcaacatcaacacctccacctccaagttcttaatgaatgttataactattgaagattataagagcacatactggccaaaattggatggtgccatagatcaacttttaactcagagtcctggtgactatatccccatatcctatgaacagatatacagatacaaaaccgtacatgcaggctggttgtctggttagtcaatggctgatttgcttcaactgtctagtatgtatgtgcagcctgaaactggctccttaaaaggaaagccgggtcagtcatcttgaaaaaatgacatgtaaaagtaaatcgataattgttttgagagacggtacatgttttaaaggttggccttaagcttcagtaacattgtcattttgtgaccttttgttgtcacacctgtaccctaacctgacaggaattaactactgtttttttgtggggcagaaagcaaaacctggtgttgtgacttttatcctaatggttcttaggcaaggttagtgagaagaaacacaaacccagatgcatgcattgtgcattattttgtagacaagctactttttcttctgtccctttaacaaatttgcagcaattaccctccctttggggtctagagtgaaagctaatttgtgggtagatgagattgcagaagaatggatgtccatggctgtgaacactgcacactgcacatccatctccagtgctcacactgtgcagctaccactccctggctgcgtgccatgctgtcgggttgcagatttgcacacataaattcctcaggaagagtttgcatgagcatcacctcgcaatattctgtactgaccaaacaagggatttgaacgtttttcagcacaaaaggataacttccgagtggtggtctgtacgcatactagcaaaggtaatggtgatctagcaaacaaaattggtttctgcagttagaagtgagcaggagcacttgtattatagtatttaaataatcctggttaatctctttttaagccgagtaacccctccagattttgcctttttattattgaggctggctttattttcttctactttttttcccgttttatagcagttaattatttttgtgattattatgcaagaagcattgcccttgagttaaactgttattgtttcataagcagctattaaaataactgagcattgttttatgaacatacactaatctgagatactgaaaagctttgcaactaaaaagcaaaacaacctacattagtcatctagccattgtttggatgttttgagttgattttttatggtgcctcttttagcttggaatattacgtttactttaatccaagtctaggccttttaaagggtccttaaaattaaagttcagaatgtgaatccctttgacatctattacaggtttataggacctttttggttgtgattactgttttcaatacgattgtataaatgaagttaactttgtcagaagttaaaatggaggtcataggagttcctggagaaatggctctcctgtttctttcatttccngantnantgtcngtgtntttatcctctagagtcagctgtgaccatg

SEQ ID NO: 445679 - DNA, 2633 bp, Homo sapiens
ctaagatgtttaatatgtatttttaaataggtttggttagaactgaaatgtctgctatacttttattatcaaatatgttgatcctttcctcctgttttgatgtgaagtcagttttgttgactgcctcttcttatccccaggggtgaccagtcccggaagagagctggggatgagttggcttataatagctcgtcagcatgtgcaagttccagggggtacagatagtgaatgtattgaatatgctttccttcctgaaaagaggacacactggagctgcagagactgtattcagagcacagtgggggctgcacacactcaggagctctgtcacaaagctgttcatggaagaggatgttggacttcttacttggtttgtaattttaaaacaaaaactaaaaaaaaaaaaaacgttgctgctagacttgggggtgattttgaaatgggacaatcttttaatgagtttatctacagattctgtgaggaaaaagcatctcagaaagtgaccatttctaagtgaaatctgacagccaaaatcagcagcttcctccaaaaatataagagcagaagaattttttttttaagcacttgttttgttcatttgtggacttggcattttggtgtattggtttcacatgtcaggatctcttttgctttaaaaccaagcagatcattacagtacagtatttttcacccacaaccaaaacaaccccttttaaaagagttggtctttgtttagcattagaaagtcttgttaaaggaaaatgctaactctgcttttgctagaactttcccccatcagttcacaactttcttctactctgtgccttgagctttgtgcactttgcaactgtgtgaccatgttgtcaaactcctcctggagaagtgtatggtatctaaactcacccaccaagatggcaggtgtggccctgtagcaggatgctaattaagtgggaaaatagaaaccttttgcacatgggtcggattttcccctggttcaccagagcatattcatattaatgttggggaccaactctcctagagcatttccattccctgtgccacttaacacgatgtctgtcaccagctgctatagtattggcagtactctagtttagggatgggcggtactttagcacggaagcttcccttagtattattgagagctacttcctgcgatgctctaggaagcagatacagttattaagtccaaatacacagtggtgtggggttcctgatcacttcattttaaatgaatgagataattacttaaaaaaagtctgtcatttgaacattatatttgagtgtgatagggaagaagtagcactgctgtcctaaggctcccttccagctgtggcaaagctatatttctgtttctccacatccacagtgctttttagtccatcataaaagtttctgaagcttattctagctgttgttgaaagcccaagaaaaatagatgtggcaagagaaaaatacttttcttctcaattttgcttgaatcttaattgagcataggcttctctactaggcaacatcagactaatagtatttacctcttcagagaacttgaggggaaaagaaacatcccagggatgctgtcgcatgtctgctctgcaggttcttcatacagctgcctctgccaattcagtttattttttggggggagtggtgtgggtgggagagttagaagtgggatattgggagcaagtaagtcacccaataattgaagtccttgatttgtaaaactgttatacagagaagtaaagataaaggttgtcagatttattttttaaagtacttaaccagagttcgtggattttgtggactttaattggactcaattcactctgtgagcatcctggattgcatcgatgaacactgaattactgtaagaacatagacaggctctcactatgacctggacagtttaagttgctacactggtaacattctagtatcaaggagaattccattcatcatgacattcacattttacttttctcaatggaatgcttgcttcaggcttaccaatcacacctagaactgaagtctgagtgagtggtattaataatttttctgaaaggaataaaattggaatgtttctaaatgtggagaaattcttcagtatcctaataatatacccaaatgctttttctgggagagagcattcttttacaaaagaactttccctataaaagcatcacagtataatgtgaattggcattaaaatctttggatgcttttgcattattaagttcatggagaaatatattctttttactatgtatgtattaataaaaagtgggcaaagtaaagtttgcaaaatttagtttctctaaatttttgcacagtgactgcagctggctatgggtcagctcttaatacaacaaaaccttgactggaagtcactatagaaaggctgcggtggacggcttccggcagcccctgccacctccgccgcccccctcgtcgatcccggcccctgcccgagagcctccgggggggcagctgctggcggtgcccgcggtctccgtggacaggaaaggccccaaggaggggctcccgatggggccgcagccaccgccggaggctaatggggtgatcatgatgttgaagagctgcgacgcggccgc

SEQ ID NO: 445680 - DNA, 345 bp, Homo sapiens
gcggccgccgccgtggccaaggcggcccccgcccccaccgccagctccaccatcaacatcaacacctccacctccaagttctgtgagtccagcctttccctgcagccttggcttttctccacctcactcggacgccgaatccaccccctcttggagaaagctccgcttcctttgtttcaggcctcggtctttcctcttctccccgtccgccttcgcctccctgcctccttccccctcaccgtcccctccccctcatttggtgtctgcggccagcgcctgagcggccctggcttcttgtattacctggcctagagaggcagcctggtacacacggagccccaagtt

SEQ ID NO: 445681 - DNA, 295 bp, Homo sapiens
ttcctagtggtgcttgtatgtcagaagccatagtgagctcagcacagggcgttctgcacatcatctctttaatccaagaaaaacaaaatggcggatgaaactcctattgacctgggatacaaagccactgactttggctcttgatcttttggtgggttctgaatcactccttctgtattagggcatatactttcactctaaaacattgtggtaaatgaaataaatcttgtacagatgtcgttggccttgttatgttatgttataaatcctgtacagatgtccttggccttaatac

SEQ ID NO: 445682 - DNA, 4006 bp, Homo sapiens
acgtgaggccgggcagggggcggggccggcgaatgcccgtcccgacccgtcgcgcctcccctgttagctccctgccagccgaggcggggcgaacctctgccctgttgcgtgggagtgactcacagctcccgccccttttggctccgctttctcgcggccagtccctcgcaccacgtgccctcctggccgcgcccccagctgccctttccaactgcctgttggaagccgctgtaaaacgtcgtgaggagcgccgctgctttacggctgcctctcccagactagagccccggagcgcccaccgccgtcagccgcgtcttcaagctagtcggccccgcggagagcgagagaccctgcgcaccgcagccctctccgctgcgcccattcctgccgccggcgatgtaactcggggaggcagcggtgcccgctggcccggggttgagacaggcggcaggtgcctgtgaggcgggcgggtgccgggggccagcaggatggaggaaagcatggaagaggaggaggggggcagctacgaggcgatgatggacgaccagaaccacaacaactgggaggctgcggtggacggcttccggcagcccctgccacctccgccgcccccctcgtcgatcccggcccctgcccgagagcctccgggggggcagctgctggcggtgcccgcggtctccgtggacaggaaaggccccaaggaggggctcccgatggggccgcagccaccgccggaggctaatggggtgatcatgatgttgaagagctgcgacgcggccgccgccgtggccaaggcggcccccgcccccaccgccagctccaccatcaacatcaacacctccacctccaagttcttaatgaatgttataactattgaagattataagagcacatactggccaaaattggatggtgccatagatcaacttttaactcagagtcctggtgactatatccccatatcctatgaacagatatacagttgtgtgtataaatgtgtatgccagcagcactcggaacagatgtatagtgatctgattaaaaagataactaatcacttagagagagtctcaaaggagctgcaggccagccctccagatctctatattgaaagatttaatatagctcttggacaatatatgggagcattgcagagcattgtgcctcttttcatatatatgaataagttttacatcgaaaccaagcttaacagagacttaaaagatgaccttataaagctgtttacggaacatgttgcagaaaagcacatttacagcctaatgcctttacttttagaagcccagtcaacaccatttcaggtcacaccttcaactatggcaaatattgtgaaaggcctgtataccctcagaccagagtgggttcagatggctccaactctattttctaaatttattccaaacattctccctccggcggtggaatctgaactttctgaatatgctgctcaagatcagaaatttcaaagagaacttatacagaatggttttacaaggggtgaccagtcccggaagagagctggggatgagttggcttataatagctcgtcagcatgtgcaagttccagggggtacagatagtgaatgtattgaatatgctttccttcctgaaaagaggacacactggagctgcagagactgtattcagagcacagtgggggctgcacacactcaggagctctgtcacaaagctgttcatggaagaggatgttggacttcttacttggtttgtaattttaaaacaaaaactaaaaaaaaaaaaaacgttgctgctagacttgggggtgattttgaaatgggacaatcttttaatgagtttatctacagattctgtgaggaaaaagcatctcagaaagtgaccatttctaagtgaaatctgacagccaaaatcagcagcttcctccaaaaatataagagcagaagaattttttttttaagcacttgttttgttcatttgtggacttggcattttggtgtattggtttcacatgtcaggatctcttttgctttaaaaccaagcagatcattacagtacagtatttttcacccacaaccaaaacaaccccttttaaaagagttggtctttgtttagcattagaaagtcttgttaaaggaaaatgctaactctgcttttgctagaactttcccccatcagttcacaactttcttctactctgtgccttgagctttgtgcactttgcaactgtgtgaccatgttgtcaaactcctcctggagaagtgtatggtatctaaactcacccaccaagatggcaggtgtggccctgtagcaggatgctaattaagtgggaaaatagaaaccttttgcacatgggtcggattttcccctggttcaccagagcatattcatattaatgttggggaccaactctcctagagcatttccattccctgtgccacttaacacgatgtctgtcaccagctgctatagtattggcagtactctagtttagggatgggcggtactttagcacggaagcttcccttagtattattgagagctacttcctgcgatgctctaggaagcagatacagttattaagtccaaatacacagtggtgtggggttcctgatcacttcattttaaatgaatgagataattacttaaaaaaagtctgtcatttgaacattatatttgagtgtgatagggaagaagtagcactgctgtcctaaggctcccttccagctgtggcaaagctatatttctgtttctccacatccacagtgctttttagtccatcataaaagtttctgaagcttattctagctgttgttgaaagcccaagaaaaatagatgtggcaagagaaaaatacttttcttctcaattttgcttgaatcttaattgagcataggcttctctactaggcaacatcagactaatagtatttacctcttcagagaacttgaggggaaaagaaacatcccagggatgctgtcgcatgtctgctctgcaggttcttcatacagctgcctctgccaattcagtttattttttggggggagtggtgtgggtgggagagttagaagtgggatattgggagcaagtaagtcacccaataattgaagtccttgatttgtaaaactgttatacagagaagtaaagataaaggttgtcagatttattttttaaagtacttaaccagagttcgtggattttgtggactttaattggactcaattcactctgtgagcatcctggattgcatcgatgaacactgaattactgtaagaacatagacaggctctcactatgacctggacagtttaagttgctacactggtaacattctagtatcaaggagaattccattcatcatgacattcacattttacttttctcaatggaatgcttgcttcaggcttaccaatcacacctagaactgaagtctgagtgagtggtattaataatttttctgaaaggaataaaattggaatgtttctaaatgtggagaaattcttcagtatcctaataatatacccaaatgctttttctgggagagagcattcttttacaaaagaactttccctataaaagcatcacagtataatgtgaattggcattaaaatctttggatgcttttgcattattaagttcatggagaaatatattctttttactatgtatgtattaataaaaagtgggcaaagtaaagtttgcaaaatttagtttctctaaatttttgcacagtgactgcagctggctatgggtcagctcttaatacaacaaaaccttgactggaagtcactatagaaaggctgcggtggacggcttccggcagcccctgccacctccgccgcccccctcgtcgatcccggcccctgcccgagagcctccgggggggcagctgctggcggtgcccgcggtctccgtggacaggaaaggccccaaggaggggctcccgatggggccgcagccaccgccggaggctaatggggtgatcatgatgttgaagagctgcgacgcggccgc

SEQ ID NO: 445683 - DNA, 3292 bp, Homo sapiens
acgtgaggccgggcagggggcggggccggcgaatgcccgtcccgacccgtcgcgcctcccctgttagctccctgccagccgaggcggggcgaacctctgccctgttgcgtgggagtgactcacagctcccgccccttttggctccgctttctcgcggccagtccctcgcaccacgtgccctcctggccgcgcccccagctgccctttccaactgcctgttggaagccgctgtaaaacgtcgtgaggagcgccgctgctttacggctgcctctcccagactagagccccggagcgcccaccgccgtcagccgcgtcttcaagctagtcggccccgcggagagcgagagaccctgcgcaccgcagccctctccgctgcgcccattcctgccgccggcgatgtaactcggggaggcagcggtgcccgctggcccggggttgagacaggcggcaggtgcctgtgaggcgggcgggtgccgggggccagcaggatggaggaaagcatggaagaggaggaggggggcagctacgaggcgatgatggacgaccagaaccacaacaactgggaggctgcggtggacggcttccggcagcccctgccacctccgccgcccccctcgtcgatcccggcccctgcccgagagcctccgggggggcagctgctggcggtgcccgcggtctccgtggacaggaaaggccccaaggaggggctcccgatggggccgcagccaccgccggaggctaatggggtgatcatgatgttgaagagctgcgacgcggccgccgccgtggccaaggcggcccccgcccccaccgccagctccaccatcaacatcaacacctccacctccaagttcttaatgaatgttataactattgaagattataagagcacatactggccaaaattggatggtgccatagatcaacttttaactcagagtcctggtgactatatccccatatcctatgaacagatatacagatacaaaaccgtacatgcaggctggttgtctggttagtcaatggctgatttgcttcaactgtctagtatgtatgtgcagcctgaaactggctccttaaaaggaaagccgggtcagtcatcttgaaaaaatgacatgtaaaagtaaatcgataattgttttgagagacggtacatgttttaaaggttggccttaagcttcagtaacattgtcattttgtgaccttttgttgtcacacctgtaccctaacctgacaggaattaactactgtttttttgtggggcagaaagcaaaacctggtgttgtgacttttatcctaatggttcttaggcaaggttagtgagaagaaacacaaacccagatgcatgcattgtgcattattttgtagacaagctactttttcttctgtccctttaacaaatttgcagcaattaccctccctttggggtctagagtgaaagctaatttgtgggtagatgagattgcagaagaatggatgtccatggctgtgaacactgcacactgcacatccatctccagtgctcacactgtgcagctaccactccctggctgcgtgccatgctgtcgggttgcagatttgcacacataaattcctcaggaagagtttgcatgagcatcacctcgcaatattctgtactgaccaaacaagggatttgaacgtttttcagcacaaaaggataacttccgagtggtggtctgtacgcatactagcaaaggtaatggtgatctagcaaacaaaattggtttctgcagttagaagtgagcaggagcacttgtattatagtatttaaataatcctggttaatctctttttaagccgagtaacccctccagattttgcctttttattattgaggctggctttattttcttctactttttttcccgttttatagcagttaattatttttgtgattattatgcaagaagcattgcccttgagttaaactgttattgtttcataagcagctattaaaataactgagcattgttttatgaacatacactaatctgagatactgaaaagctttgcaactaaaaagcaaaacaacctacattagtcatctagccattgtttggatgttttgagttgattttttatggtgcctcttttagcttggaatattacgtttactttaatccaagtctaggccttttaaagggtccttaaaattaaagttcagaatgtgaatccctttgacatctattacaggtttataggacctttttggttgtgattactgttttcaatacgattgtataaatgaagttaactttgtcagaagttaaaatggaggtcataggagttcctggagaaatggctctcctgtttctttcattaccccactgaagttcaccccagtttctggccacaagaatatgagaaaggaaccctgttgttttccaagggaaatcattcctctctgtccccactgttgattaactaaagtcctggacaccttccttcctccactggccaagacccaccttgacccaccttgaacctcttttcagagccgagtggcatgaatatgtgtactgtttctgcttctgttgatggagtggctgtgggagaattaaaggaaatgctaatttgagcttcattcataggggaacctactatatattgcatccctgctggttggaaattatcttcatctctggactgcattgtttagaaaaatgttaatggcttacaattctgagaactttattgtgtggctctggggttaagaattctgtggtttgaaaaaaaataaatattttgtattgattctcacgtcatttcaatgttgtgactatgtactaaatgcactaagactgggtattctcttagaagagtgcgttttgttaaacagatggcagttcactctcattagttctatttgtcaatattacagccacacacttcaggataacttactcaaatgtgaagtcatgggaagctatggctagtaacaggaatgcttatgaaaaatttggagggcaagcacgagcaagaggcttttgccactcactagcacagccagagcaaggatgaagcaatgaagtcttgttcctagtggtgcttgtatgtcagaagccatagtgagctcagcacagggcgttctgcacatcatctctttaatccaagaaaaacaaaatggcggatgaaactcctattgacctgggatacaaagccactgactttggctcttgatcttttggtgggttctgaatcactccttctgtattagggcatatactttcactctaaaacattgtggtaaatgaaataaatcttgtacaga

SEQ ID NO: 445684 - DNA, 3776 bp, Homo sapiens
acgtgaggccgggcagggggcggggccggcgaatgcccgtcccgacccgtcgcgcctcccctgttagctccctgccagccgaggcggggcgaacctctgccctgttgcgtgggagtgactcacagctcccgccccttttggctccgctttctcgcggccagtccctcgcaccacgtgccctcctggccgcgcccccagctgccctttccaactgcctgttggaagccgctgtaaaacgtcgtgaggagcgccgctgctttacggctgcctctcccagactagagccccggagcgcccaccgccgtcagccgcgtcttcaagctagtcggccccgcggagagcgagagaccctgcgcaccgcagccctctccgctgcgcccattcctgccgccggcgatgtaactcggggaggcagcggtgcccgctggcccggggttgagacaggcggcaggtgcctgtgaggcgggcgggtgccgggggccagcaggatggaggaaagcatggaagaggaggaggggggcagctacgaggcgatgatggacgaccagaaccacaacaactgggaggctgcggtggacggcttccggcagcccctgccacctccgccgcccccctcgtcgatcccggcccctgcccgagagcctccgggggggcagctgctggcggtgcccgcggtctccgtggacaggaaaggccccaaggaggggctcccgatggggccgcagccaccgccggaggctaatggggtgatcatgatgttgaagagctgcgacgcggccgccgccgtggccaaggcggcccccgcccccaccgccagctccaccatcaacatcaacacctccacctccaagttctgccagccctccagatctctatattgaaagatttaatatagctcttggacaatatatgggagcattgcagagcattgtgcctcttttcatatatatgaataagttttacatcgaaaccaagcttaacagagacttaaaagatgaccttataaagctgtttacggaacatgttgcagaaaagcacatttacagcctaatgcctttacttttagaagcccagtcaacaccatttcaggtcacaccttcaactatggcaaatattgtgaaaggcctgtataccctcagaccagagtgggttcagatggctccaactctattttctaaatttattccaaacattctccctccggcggtggaatctgaactttctgaatatgctgctcaagatcagaaatttcaaagagaacttatacagaatggttttacaaggggtgaccagtcccggaagagagctggggatgagttggcttataatagctcgtcagcatgtgcaagttccagggggtacagatagtgaatgtattgaatatgctttccttcctgaaaagaggacacactggagctgcagagactgtattcagagcacagtgggggctgcacacactcaggagctctgtcacaaagctgttcatggaagaggatgttggacttcttacttggtttgtaattttaaaacaaaaactaaaaaaaaaaaaaacgttgctgctagacttgggggtgattttgaaatgggacaatcttttaatgagtttatctacagattctgtgaggaaaaagcatctcagaaagtgaccatttctaagtgaaatctgacagccaaaatcagcagcttcctccaaaaatataagagcagaagaattttttttttaagcacttgttttgttcatttgtggacttggcattttggtgtattggtttcacatgtcaggatctcttttgctttaaaaccaagcagatcattacagtacagtatttttcacccacaaccaaaacaaccccttttaaaagagttggtctttgtttagcattagaaagtcttgttaaaggaaaatgctaactctgcttttgctagaactttcccccatcagttcacaactttcttctactctgtgccttgagctttgtgcactttgcaactgtgtgaccatgttgtcaaactcctcctggagaagtgtatggtatctaaactcacccaccaagatggcaggtgtggccctgtagcaggatgctaattaagtgggaaaatagaaaccttttgcacatgggtcggattttcccctggttcaccagagcatattcatattaatgttggggaccaactctcctagagcatttccattccctgtgccacttaacacgatgtctgtcaccagctgctatagtattggcagtactctagtttagggatgggcggtactttagcacggaagcttcccttagtattattgagagctacttcctgcgatgctctaggaagcagatacagttattaagtccaaatacacagtggtgtggggttcctgatcacttcattttaaatgaatgagataattacttaaaaaaagtctgtcatttgaacattatatttgagtgtgatagggaagaagtagcactgctgtcctaaggctcccttccagctgtggcaaagctatatttctgtttctccacatccacagtgctttttagtccatcataaaagtttctgaagcttattctagctgttgttgaaagcccaagaaaaatagatgtggcaagagaaaaatacttttcttctcaattttgcttgaatcttaattgagcataggcttctctactaggcaacatcagactaatagtatttacctcttcagagaacttgaggggaaaagaaacatcccagggatgctgtcgcatgtctgctctgcaggttcttcatacagctgcctctgccaattcagtttattttttggggggagtggtgtgggtgggagagttagaagtgggatattgggagcaagtaagtcacccaataattgaagtccttgatttgtaaaactgttatacagagaagtaaagataaaggttgtcagatttattttttaaagtacttaaccagagttcgtggattttgtggactttaattggactcaattcactctgtgagcatcctggattgcatcgatgaacactgaattactgtaagaacatagacaggctctcactatgacctggacagtttaagttgctacactggtaacattctagtatcaaggagaattccattcatcatgacattcacattttacttttctcaatggaatgcttgcttcaggcttaccaatcacacctagaactgaagtctgagtgagtggtattaataatttttctgaaaggaataaaattggaatgtttctaaatgtggagaaattcttcagtatcctaataatatacccaaatgctttttctgggagagagcattcttttacaaaagaactttccctataaaagcatcacagtataatgtgaattggcattaaaatctttggatgcttttgcattattaagttcatggagaaatatattctttttactatgtatgtattaataaaaagtgggcaaagtaaagtttgcaaaatttagtttctctaaatttttgcacagtgactgcagctggctatgggtcagctcttaatacaacaaaaccttgactggaagtcactatagaaaggctgcggtggacggcttccggcagcccctgccacctccgccgcccccctcgtcgatcccggcccctgcccgagagcctccgggggggcagctgctggcggtgcccgcggtctccgtggacaggaaaggccccaaggaggggctcccgatggggccgcagccaccgccggaggctaatggggtgatcatgatgttgaagagctgcgacgcggccgc

SEQ ID NO: 445685 - DNA, 1332 bp, Homo sapiens
acgtgaggccgggcagggggcggggccggcgaatgcccgtcccgacccgtcgcgcctcccctgttagctccctgccagccgaggcggggcgaacctctgccctgttgcgtgggagtgactcacagctcccgccccttttggctccgctttctcgcggccagtccctcgcaccacgtgccctcctggccgcgcccccagctgccctttccaactgcctgttggaagccgctgtaaaacgtcgtgaggagcgccgctgctttacggctgcctctcccagactagagccccggagcgcccaccgccgtcagccgcgtcttcaagctagtcggccccgcggagagcgagagaccctgcgcaccgcagccctctccgctgcgcccattcctgccgccggcgatgtaactcggggaggcagcggtgcccgctggcccggggttgagacaggcggcaggtgcctgtgaggcgggcgggtgccgggggccagcaggatggaggaaagcatggaagaggaggaggggggcagctacgaggcgatgatggacgaccagaaccacaacaactgggaggctgcggtggacggcttccggcagcccctgccacctccgccgcccccctcgtcgatcccggcccctgcccgagagcctccgggggggcagctgctggcggtgcccgcggtctccgtggacaggaaaggccccaaggaggggctcccgatggggccgcagccaccgccggaggctaatggggtgatcatgatgttgaagagctgcgacgcggccgccgccgtggccaaggcggcccccgcccccaccgccagctccaccatcaacatcaacacctccacctccaagttcttaatgaatgttataactattgaagattataagagcacatactggccaaaattggatggtgccatagatcaacttttaactcagagtcctggtgactatatccccatatcctatgaacagatatacagttgtgtgtataaatgtgtatgccagcagcactcggaacagatgtatagtgatctgattaaaaagataactaatcacttagagagagtctcaaaggagctgcaggccagccctccagatctctatattgaaagatttaatatagctcttggacaatatatgggagcattgcagagcattgtgcctcttttcatatatatggtaagtaagagctccttcctccttcccaaatacctaggtgtattgttgagagcacaaatagatgcagagagttaagcatattctgtttttcttttactacatttgtgttagaaatggaaattaagttatttcagtaatgtgcgatagttgt

SEQ ID NO: 445686 - DNA, 551 bp, Homo sapiens
cgagggggcgggacatgccggcagtctcgcgataactgcgcaggcgcggaccaaagcgatctcttctgaggatccggcaagatggcagaagtagagcagaagaagaagcggaccttccgcaagttcacctaccgcggcgtggacctcgaccagctgctggacatgtcctacgagcagctgatgcagctgtacagtgcgcgccagcggcggcggctgaaccggggcctgcggcggaagcagcactccctgctgaagcgcctgcgcaaggccaagaaggaggcgccgcccatggagaagccggaagtggtgaagacgcacctgcgggacatgatcatcctacccgagatggtgggcagcatggtgggcgtctacaacggcaagaccttcaaccaggtggagatcaagcccgagatgatcggccactacctgggcgagttctccatcacctacaagcccgtaaagcatggccggcccggcatcggggccacccactcctcccgcttcatccctctcaagtaatggctcagctaataaaggcgcacatgactcca

SEQ ID NO: 445687 - DNA, 1948 bp, Homo sapiens
cgagggggcgggacatgccggcagtctcgcgataactgcgcaggcgcggaccaaagcgatctcttctgaggatccggcaagatggcagaagtagagcagaagaagaagcggaccttccgcaagttcacctaccgcggcgtggacctcgaccagctgctggacatgtcctacgagcagctgatgcagctgtacagtgcgcgccagcggcggcggctgaaccggggcctgcggcggaagcagcactccctgctgaagcgcctgcgcaaggccaagaaggaggcgccgcccatggagaagccggaagtggtgaagacgcacctgcgggacatgatcatcctacccgagatggtgggcagcatggtgggcgtctacaacggcaagaccttcaaccaggtggagatcaagcccgagatgatcggccactacctgggcgagttctccatcacctacaagcccgtaaagcatggccggcccggcatcggggccacccactcctcccgcttcatccctctcaagtaatggctcagctaataaaggcgcacatgactccaaaaaaaaacaaaaaaaacccgagactagttctctctgtcgagattgcgcggccgttggggcgtgcaggggcgccagtcggcggacgaggggcccccgggagtttgctggactggagacatgagcctccaactggtgtggtggggctcggtagcccattcgggggacttgggttgtgcgcccacagattggtttggccctgcgtgaccagagcagcccaagccgccaccttggtgaaattgctagtggccaaaatcctgtgcatggtgggcgtgttcttcttcatgctgctcggctccctgctccccgtgaagatcatcgagacagattttgagaaggcccatcgctcgaaaaagatcctctctctctgcaacacctttggaggaggggtgtttctggccacgtgcttcaacgctctgctgcccgctgtgagggaaaagctccagaaggtcctgagcctcggccacatcagcaccgactacccgctggccgaaaccatcctcctgctgggcttcttcatgaccgtcttcctggagcagctgatcctgaccttccgcaaggagaagccgtccttcatcgacctggagaccttcaacgccggatcggacgtgggcagcgactcggagtatgagagccccttcatggggggcgcgcggggccacgcgctgtacgtggagccccacggccacggccccagcctgagcgtgcagggcctctcgcgcgccagccccgtgcgcctgctcagcctggccttcgcgctgtcggcccactcggtctttgagggcctggccctgggcctgcaggaggagggggagaaagtggtgagcctgttcgtgggggtggccgtccacgagacactggtggccgtggccctgggcatcagcatggcccggagtgccatgcccctgcgggacgcggccaagctggcggtcaccgtaagcgccatgatccccctgggcatcggcctgggcctgggcattgagagcgcccagggcgtgccgggcagcgtggcgtccgtgctgctgcagggcctggcgggcggcaccttcctcttcatcaccttcctggagatcctggccaaggagctggaggagaagagtgaccgtctgctcaaggtcctcttcctggtgctgggctacaccgtcctggccgggatggtcttcctcaagtggtgagcggcctcgccattgtccctgccgccggagcccgccgggagccccgggccggacacaggccgcgtcccccggccgcgcgtcccccaagagcgagcactgtggccctgggccaccacctgtgcacaaggggcctcccgggaccaggctgtgcccccgatcctacaccctgagcctcagagcactgctactttttaaaatacttctttctcttaaaagtctttacc

SEQ ID NO: 445688 - DNA, 525 bp, Homo sapiens
ccacgcgtccgcccacgcgtcgcggacgcgtgggtcgacccacgcgtcgggcaagatggcagaagtagagcagaagaagaagcggaccttccgcaagttcacctaccgcggcgtggacctcgaccagctgctggacatgtcctacgagcagctgatgcagctgtacagtgcgcgccagcggcggcggctgaaccggggcctgcggcggaagcagcactccctgctgaagcgcctgcgcaaggccaagaaggaggcgccgcccatggagaagccggaagtggtgaagacgcacctgcgggacatgatcatcctacccgagatggtgggcagcatggtgggcgtctacaacggcaagaccttcaaccaggtggagatcaagcccgagatgatcggccactacctgggcgagttctccatcacctacaagcccgtaaagcatggccggcccggcatcggggccacccactcctcccgcttcatccctctcaagtaatggctcagctaataaaggcgcacatgactcca

SEQ ID NO: 445689 - DNA, 510 bp, Homo sapiens
  misc_feature (35)..(36): n is a, c, g, or t
aaatgtcaggctgtactggtctgagtctttggatnncaagatggcagaagtagagcagaagaagaagcggaccttccgcaagttcacctaccgcggcgtggacctcgaccagctgctggacatgtcctacgagcagctgatgcagctgtacagtgcgcgccagcggcggcggctgaaccggggcctgcggcggaagcagcactccctgctgaagcgcctgcgcaaggccaagaaggaggcgccgcccatggagaagccggaagtggtgaagacgcacctgcgggacatgatcatcctacccgagatggtgggcagcatggtgggcgtctacaacggcaagaccttcaaccaggtggagatcaagcccgagatgatcggccactacctgggcgagttctccatcacctacaagcccgtaaagcatggccggcccggcatcggggccacccactcctcccgcttcatccctctcaagtaatggctcagctaataaaggcgcacatgactcca

SEQ ID NO: 445690 - DNA, 510 bp, Homo sapiens
ttaggctagtagaggctggggtgaatcggacgagggcaagatggcagaagtagagcagaagaagaagcggaccttccgcaagttcacctaccgcggcgtggacctcgaccagctgctggacatgtcctacgagcagctgatgcagctgtacagtgcgcgccagcggcggcggctgaaccggggcctgcggcggaagcagcactccctgctgaagcgcctgcgcaaggccaagaaggaggcgccgcccatggagaagccggaagtggtgaagacgcacctgcgggacatgatcatcctacccgagatggtgggcagcatggtgggcgtctacaacggcaagaccttcaaccaggtggagatcaagcccgagatgatcggccactacctgggcgagttctccatcacctacaagcccgtaaagcatggccggcccggcatcggggccacccactcctcccgcttcatccctctcaagtaatggctcagctaataaaggcgcacatgactcca

SEQ ID NO: 445691 - DNA, 682 bp, Homo sapiens
  misc_feature (17)..(18): n is a, c, g, or t
agaagagcctacatggnnacgataccttgaagctgttctgttactctgggctctcatcctctcctattatacagtgaaagcctgtttcaacagaagtaaagagtaaaaaaaaaataggttatgaactcctgcagctatgtctcccaagataataatattgtaaactcaaaagctactaccccatggcctcgtccgaattcggcacgagcaagatggcagaagtagagcagaagaagaagcggaccttccgcaagttcacctaccgcggcgtggacctcgaccagctgctggacatgtcctacgagcagctgatgcagctgtacagtgcgcgccagcggcggcggctgaaccggggcctgcggcggaagcagcactccctgctgaagcgcctgcgcaaggccaagaaggaggcgccgcccatggagaagccggaagtggtgaagacgcacctgcgggacatgatcatcctacccgagatggtgggcagcatggtgggcgtctacaacggcaagaccttcaaccaggtggagatcaagcccgagatgatcggccactacctgggcgagttctccatcacctacaagcccgtaaagcatggccggcccggcatcggggccacccactcctcccgcttcatccctctcaagtaatggctcagctaataaaggcgcacatgactcca

SEQ ID NO: 445692 - DNA, 480 bp, Homo sapiens
acaaaatatggggagtagatcacacaaagcaatcggatctgagcagctaacgttcacctaccgcggcgtggacctcgaccagctgctggacatgtcctacgagcagctgatgcagctgtacagtgcgcgccagcggcggcggctgaaccggggcctgcggcggaagcagcactccctgctgaagcgcctgcgcaaggccaagaaggaggcgccgcccatggagaagccggaagtggtgaagacgcacctgcgggacatgatcatcctacccgagatggtgggcagcatggtgggcgtctacaacggcaagaccttcaaccaggtggagatcaagcccgagatgatcggccactacctgggcgagttctccatcacctacaagcccgtaaagcatggccggcccggcatcggggccacccactcctcccgcttcatccctctcaagtaatggctcagctaataaaggcgcacatgactcca

SEQ ID NO: 445693 - DNA, 856 bp, Homo sapiens
  misc_feature (17)..(18): n is a, c, g, or t
agaagagcctacatggnnacgataccttgaagctgttctgttactctgggctctcatcctctcctattatacagtgaaagcctgtttcaacagaagtaaagagtaaaaaaaaaataggttatgaactcctgcagctatgtctcccaagataataatattgtaaactcaaaagctactaccccatggcctcgtccgaattcggcacgagcaagatggcagaagtagagcagaagaagaagcggaccttccgcaagttcacctaccgcggcgtggacctcgaccagctgctggacatgtcctacgagcagctgatgcagctgtacagtgcgcgccagcggcggcggctgaaccggggcctgcggcggaagcagcactccctgctgaagcgcctgcgcaaggccaagaaggaggcgccgcccatggagaagccggaagtggtgaagacgcacctgcgggacatgatcatcctacccgagatggtgggcagcatggtgggcgtctacaacggcaagaccttcaaccaggtggagatcaagcccgagatgatcggccactacctgggcgagttctccatcacctacaagcccgtaaagcatggccggcccggcatcggggccacccactcctcccgcttcatccctctcaagtaatggctcagctaataaaggcgcacatgactccaaaaaaaaaaaaaaaaaaaaaaaaaaaaacagtcgtattacgattcatgtggcggtggttttacaacgttcgtgaattggccctggtgttaccaagtttattcgccttgcgcacatccccttttgcagatggggtaataccaagaggcccgacggttggctttccgagttgtccc

SEQ ID NO: 445694 - DNA, 1907 bp, Homo sapiens
ttaggctagtagaggctggggtgaatcggacgagggcaagatggcagaagtagagcagaagaagaagcggaccttccgcaagttcacctaccgcggcgtggacctcgaccagctgctggacatgtcctacgagcagctgatgcagctgtacagtgcgcgccagcggcggcggctgaaccggggcctgcggcggaagcagcactccctgctgaagcgcctgcgcaaggccaagaaggaggcgccgcccatggagaagccggaagtggtgaagacgcacctgcgggacatgatcatcctacccgagatggtgggcagcatggtgggcgtctacaacggcaagaccttcaaccaggtggagatcaagcccgagatgatcggccactacctgggcgagttctccatcacctacaagcccgtaaagcatggccggcccggcatcggggccacccactcctcccgcttcatccctctcaagtaatggctcagctaataaaggcgcacatgactccaaaaaaaaacaaaaaaaacccgagactagttctctctgtcgagattgcgcggccgttggggcgtgcaggggcgccagtcggcggacgaggggcccccgggagtttgctggactggagacatgagcctccaactggtgtggtggggctcggtagcccattcgggggacttgggttgtgcgcccacagattggtttggccctgcgtgaccagagcagcccaagccgccaccttggtgaaattgctagtggccaaaatcctgtgcatggtgggcgtgttcttcttcatgctgctcggctccctgctccccgtgaagatcatcgagacagattttgagaaggcccatcgctcgaaaaagatcctctctctctgcaacacctttggaggaggggtgtttctggccacgtgcttcaacgctctgctgcccgctgtgagggaaaagctccagaaggtcctgagcctcggccacatcagcaccgactacccgctggccgaaaccatcctcctgctgggcttcttcatgaccgtcttcctggagcagctgatcctgaccttccgcaaggagaagccgtccttcatcgacctggagaccttcaacgccggatcggacgtgggcagcgactcggagtatgagagccccttcatggggggcgcgcggggccacgcgctgtacgtggagccccacggccacggccccagcctgagcgtgcagggcctctcgcgcgccagccccgtgcgcctgctcagcctggccttcgcgctgtcggcccactcggtctttgagggcctggccctgggcctgcaggaggagggggagaaagtggtgagcctgttcgtgggggtggccgtccacgagacactggtggccgtggccctgggcatcagcatggcccggagtgccatgcccctgcgggacgcggccaagctggcggtcaccgtaagcgccatgatccccctgggcatcggcctgggcctgggcattgagagcgcccagggcgtgccgggcagcgtggcgtccgtgctgctgcagggcctggcgggcggcaccttcctcttcatcaccttcctggagatcctggccaaggagctggaggagaagagtgaccgtctgctcaaggtcctcttcctggtgctgggctacaccgtcctggccgggatggtcttcctcaagtggtgagcggcctcgccattgtccctgccgccggagcccgccgggagccccgggccggacacaggccgcgtcccccggccgcgcgtcccccaagagcgagcactgtggccctgggccaccacctgtgcacaaggggcctcccgggaccaggctgtgcccccgatcctacaccctgagcctcagagcactgctactttttaaaatacttctttctcttaaaagtctttacc

SEQ ID NO: 445695 - DNA, 1092 bp, Homo sapiens
gggtctgtcagggttggaaagtccaagccgtaggacccagtttcctttcttagctgatgtctttggccagaacaccgtgggctgttacttgctttgagttggaagcggtttgcatttacgcctgtaaatgtattcattcttaatgttatgtaaggttttttttgtacgcaattctcgattctttgaagagatgacaacaaattttggttttctactgttatgtgagaacattaggccccagcaacacgtcattgtgtaaggaaaaataaaagtgcgcaagatggcagaagtagagcagaagaagaagcggaccttccgcaagttcacctaccgcggcgtggacctcgaccagctgctggacatgtcctacgagcagctgatgcagctgtacagtgcgcgccagcggcggcggctgaaccggggcctgcggcggaagcagcactccctgctgaagcgcctgcgcaaggccaagaaggaggcgccgcccatggagaagccggaagtggtgaagacgcacctgcgggacatgatcatcctacccgagatggtgggcagcatggtgggcgtctacaacggcaagaccttcaaccaggtggagatcaagcccgagatgatcggccactacctgggcgagttctccatcacctacaagcccgtaaagcatggccggcccggcatcggggccacccactcctcccgcttcatccctctcaagtaatggctcagctaataaaggcgcacatgactccaaaaaaaaaaaaaaaaaaaaagaaaaaaaaaaaaaaaaaaaaaaaaagagggggggcgcgcaccaagaacacacccaggagcgccacaaaacagggcaccaccgatatgggccaaaggggcccaaagaggcggccctaaaacacgaagacacggcgcgcgtaacaacacgccagacgacgggaaaccggcaacgcggacaatgggaaacgcacccaccaccggggcgggccaacactggcgcaccaccctccacgaatataccctcggggcctctcaattccagtgtatcgttgctaaccccggtatattcgctgagaactgcccacgcactgttgaaattcg

SEQ ID NO: 445696 - DNA, 1006 bp, Homo sapiens
ccacgcgtccgcccacgcgtcgcggacgcgtgggtcgacccacgcgtcgggcaagatggcagaagtagagcagaagaagaagcggaccttccgcaagttcacctaccgcggcgtggacctcgaccagctgctggacatgtcctacgagcagctgatgcagctgtacagtgcgcgccagcggcggcggctgaaccggggcctgcggcggaagcagcactccctgctgaagcgcctgcgcaaggccaagaaggaggcgccgcccatggagaagccggaagtggtgaagacgcacctgcgggacatgatcatcctacccgagatggtgggcagcatggtgggcgtctacaacggcaagaccttcaaccaggtggagatcaagcccgagatgatcggccactacctgggcgagttctccatcacctacaagcccgtaaagcatggccggcccggcatcggggccacccactcctcccgcttcatccctctcaagtaatggctcagctaataaaggcgcacatgactccaaaaaaaaaaaaaacaaacaaaaggggcttctaatgtgccgggtgtgcgcgggaaaacggggtgtactggaatggggccctggggccaaagctgttccttggccccagtttctttgtgccaagggggaaaatcggcgcggaccccctaagaggggagcccgcaataacttccgaaaagcccggttaaccggatagaaccgcgcgcgacaaggcccgcccacgccaccacgcagagcgcgcgggggacgaccgccgaagagacaagacacgcggcgccccgaaaacagagcaaaaaccacagccccaggagaaaacaacaggaggcacgcgaacagagagaacgtgcggagagcaaacgcgggcagaccgggggagcgggccggggggcgaggaagagcgcagaagcacgcggacaggggcgcccgcagggggagaggacaggacggagcggcgggacgggaggcggggcgggtgcggaaccc

SEQ ID NO: 445697 - DNA, 850 bp, Homo sapiens
ccacgcgtccgcccacgcgtcgcggacgcgtgggtcgacccacgcgtcgggcaagatggcagaagtagagcagaagaagaagcggaccttccgcaagttcacctaccgcggcgtggacctcgaccagctgctggacatgtcctacgagcagctgatgcagctgtacagtgcgcgccagcggcggcggctgaaccggggcctgcggcggaagcagcactccctgctgaagcgcctgcgcaaggccaagaaggaggcgccgcccatggagaagccggaagtggtgaagacgcacctgcgggacatgatcatcctacccgagatggtgggcagcatggtgggcgtctacaacggcaagaccttcaaccaggtggagatcaagcccgagatgatcggccactacctgggcgagttctccatcacctacaagcccgtaaagcatggccggcccggcatcggggccacccactcctcccgcttcatccctctcaagtaatggctcagctaataaaggcgcacatgactccaaaaaaaaaaaaaaaaaaaaagaaaaaaaaaaaaaaaaaaaagggggggggggcctaaaagttcccccgggggggccacgaaattagacgcactaacccgcgcaattgtggaccaagaggggccccacaaaggagcgcgaataaaacgccaaagcacaggggcgagcgaaaacagtcacccagaggaacaacgccacgagtgcaattggggaggaccccactcggggatgacaaagggcccaacccccccgggataagcgccagcgccacaaacagacggtaaagggcaaacagccgatagtgcgcggacagggagcgaagcgaat

SEQ ID NO: 445698 - DNA, 320 bp, Homo sapiens
gcgtcgacaccacttccggcttctccatgggcggcgctccttcttggccttgcgcaggcgcttcagccggaagtggtgaagacgcacctgcgggacatgatcatcctacccgagatggtgggcagcatggtgggcgtctacaacggcaagaccttcaaccaggtggagatcaagcccgagatgatcggccactacctgggcgagttctccatcacctacaagcccgtaaagcatggccggcccggcatcggggccacccactcctcccgcttcatccctctcaagtaatggctcagctaataaaggcgcacatgactcca

SEQ ID NO: 445699 - DNA, 211 bp, Homo sapiens
aattcgcggccgcgtcgacaagacgacagaagggcggcaagaccttcaaccaggtggagatcaagcccgagatgatcggccactacctgggcgagttctccatcacctacaagcccgtaaagcatggccggcccggcatcggggccacccactcctcccgcttcatccctctcaagtaatggctcagctaataaaggcgcacatgactcca

SEQ ID NO: 445700 - DNA, 929 bp, Homo sapiens
cgagggggcgggacatgccggcagtctcgcgataactgcgcaggcgcggaccaaagcgatctcttctgaggatccggcaagatggtgagtgttgcgatttggcgcgtctctgccgggcctatccggctccatccaacctctgaccgtctcgcgggggccgcagttcgtccccgcggctacggcggcttgctcccgaccctgcaggcggctggatgttggggcgaggggcggacttggtgggtgtcgggacgacgcggggctgggaaggcctgtccgggccttcatgtccgggtcctcgtaacccggagccgcgagtgatccccggggacgggtcgaagcggtgtgtccctgtcgggcttctgtccccggcggcgccgcgcgtcttccgcggtgtcctcgggcccggtggccccgggagatgggtgtcgggatcccgctgacgcccgatccgcgcccgcacaggcagaagtagagcagaagaagaagcggaccttccgcaagttcacctaccgcggcgtggacctcgaccagctgctggacatgtcctacgagcagctgatgcagctgtacagtgcgcgccagcggcggcggctgaaccggggcctgcggcggaagcagcactccctgctgaagcgcctgcgcaaggccaagaaggaggcgccgcccatggagaagccggaagtggtgaagacgcacctgcgggacatgatcatcctacccgagatggtgggcagcatggtgggcgtctacaacggcaagaccttcaaccaggtggagatcaagcccgagatgatcggccactacctgggcgagttctccatcacctacaagcccgtaaagcatggccggcccggcatcggggccacccactcctcccgcttcatccctctcaagtaatggctcagctaataaaggcgcacatgactcca

SEQ ID NO: 445701 - DNA, 703 bp, Homo sapiens
cgagggggcgggacatgccggcagtctcgcgataactgcgcaggcgcggaccaaagcgatctcttctgaggatccggcaagatggtgagtgttgcgatttggcgcgtctctgccgggcctatccggctccatccaacctctgaccgtctcgcgggggccgcagttcgtccccgcggctacggcggcttgctcccgaccctgcaggcggctggatgttggggcgaggggcggacttggcagaagtagagcagaagaagaagcggaccttccgcaagttcacctaccgcggcgtggacctcgaccagctgctggacatgtcctacgagcagctgatgcagctgtacagtgcgcgccagcggcggcggctgaaccggggcctgcggcggaagcagcactccctgctgaagcgcctgcgcaaggccaagaaggaggcgccgcccatggagaagccggaagtggtgaagacgcacctgcgggacatgatcatcctacccgagatggtgggcagcatggtgggcgtctacaacggcaagaccttcaaccaggtggagatcaagcccgagatgatcggccactacctgggcgagttctccatcacctacaagcccgtaaagcatggccggcccggcatcggggccacccactcctcccgcttcatccctctcaagtaatggctcagctaataaaggcgcacatgactcca

SEQ ID NO: 445702 - DNA, 559 bp, Homo sapiens
  misc_feature (13)..(13): n is a, c, g, or t
  misc_feature (43)..(43): n is a, c, g, or t
  misc_feature (50)..(50): n is a, c, g, or t
ttttaaaaccccnttttactactactactactactactactangctgctnagaagacgactgaaggggctcttctgaggatccggcaagatggcagaagtagagcagaagaagaagcggaccttccgcaagttcacctaccgcggcgtggacctcgaccagctgctggacatgtcctacgagcagctgatgcagctgtacagtgcgcgccagcggcggcggctgaaccggggcctgcggcggaagcagcactccctgctgaagcgcctgcgcaaggccaagaaggaggcgccgcccatggagaagccggaagtggtgaagacgcacctgcgggacatgatcatcctacccgagatggtgggcagcatggtgggcgtctacaacggcaagaccttcaaccaggtggagatcaagcccgagatgatcggccactacctgggcgagttctccatcacctacaagcccgtaaagcatggccggcccggcatcggggccacccactcctcccgcttcatccctctcaagtaatggctcagctaataaaggcgcacatgactcca

SEQ ID NO: 445703 - DNA, 492 bp, Homo sapiens
gagtgtggtggaattcggcaagatggcagaagtagagcagaagaagaagcggaccttccgcaagttcacctaccgcggcgtggacctcgaccagctgctggacatgtcctacgagcagctgatgcagctgtacagtgcgcgccagcggcggcggctgaaccggggcctgcggcggaagcagcactccctgctgaagcgcctgcgcaaggccaagaaggaggcgccgcccatggagaagccggaagtggtgaagacgcacctgcgggacatgatcatcctacccgagatggtgggcagcatggtgggcgtctacaacggcaagaccttcaaccaggtggagatcaagcccgagatgatcggccactacctgggcgagttctccatcacctacaagcccgtaaagcatggccggcccggcatcggggccacccactcctcccgcttcatccctctcaagtaatggctcagctaataaaggcgcacatgactcca

SEQ ID NO: 445704 - DNA, 750 bp, Homo sapiens
gggtctgtcagggttggaaagtccaagccgtaggacccagtttcctttcttagctgatgtctttggccagaacaccgtgggctgttacttgctttgagttggaagcggtttgcatttacgcctgtaaatgtattcattcttaatgttatgtaaggttttttttgtacgcaattctcgattctttgaagagatgacaacaaattttggttttctactgttatgtgagaacattaggccccagcaacacgtcattgtgtaaggaaaaataaaagtgcgcaagatggcagaagtagagcagaagaagaagcggaccttccgcaagttcacctaccgcggcgtggacctcgaccagctgctggacatgtcctacgagcagctgatgcagctgtacagtgcgcgccagcggcggcggctgaaccggggcctgcggcggaagcagcactccctgctgaagcgcctgcgcaaggccaagaaggaggcgccgcccatggagaagccggaagtggtgaagacgcacctgcgggacatgatcatcctacccgagatggtgggcagcatggtgggcgtctacaacggcaagaccttcaaccaggtggagatcaagcccgagatgatcggccactacctgggcgagttctccatcacctacaagcccgtaaagcatggccggcccggcatcggggccacccactcctcccgcttcatccctctcaagtaatggctcagctaataaaggcgcacatgactcca

SEQ ID NO: 445705 - DNA, 1120 bp, Homo sapiens
cgagggggcgggacatgccggcagtctcgcgataactgcgcaggcgcggaccaaagcgatctcttctgaggatccggcaagatggtgagtgttgcgatttggcgcgtctctgccgggcctatccggctccatccaacctctgaccgtctcgcgggggccgcagttcgtccccgcggctacggcggcttgctcccgaccctgcaggcggctggatgttggggcgaggggcggacttggtgggtgtcgggacgacgcggggctgggaaggcctgtccgggccttcatgtccgggtcctcgtaacccggagccgcgagtgatccccggggacgggtcgaagcggtgtgtccctgtcgggcttctgtccccggcggcgccgcgcgtcttccgcggtgtcctcgggcccggtggccccgggagatgggtgtcgggatcccgctgacgcccgatccgcgcccgcacaggcagaagtagagcagaagaagaagcggaccttccgcaagttcacctaccgcggcgtggacctcgaccagctgctggacatgtcctacgagcagctgatgcagctgtacagtgcgcgccagcggcggcggctgaaccggggcctgcggcggaagcagcactccctgctgaagcgcctgcgcaaggccaagaaggaggcgccgcccatggagaagccggaagtggtgaagacgcacctgcgggacatgatcatcctacccgagatggtgggcagcatggtgggcgtctacaacggcaagaccttcaaccaggtggagatcaagcccgagatgatcggccactacctgggcgagttctccatcacctacaagcccgtaaagcatggccggcccggcatcggggccacccactcctcccgcttcatccctctcaagtaatggctcagctaataaaggcgcacatgactccaaaaaaaaaaaaaaaaaaaaaaaaaaaaacaaaaaaaaaaaaaaaaaaaaaaaaaaaaccggggggtcttttttggggggggggaaaaaaggggttttggaaaggggccctttgggccatgtgttgtttcttggccccattttttttttcccaaggggggaaaatctcggggggtccccctattaggggggg

SEQ ID NO: 445706 - DNA, 1322 bp, Homo sapiens
cgagggggcgggacatgccggcagtctcgcgataactgcgcaggcgcggaccaaagcgatctcttctgaggatccggcaagatggtgagtgttgcgatttggcgcgtctctgccgggcctatccggctccatccaacctctgaccgtctcgcgggggccgcagttcgtccccgcggctacggcggcttgctcccgaccctgcaggcggctggatgttggggcgaggggcggacttggtgggtgtcgggacgacgcggggctgggaaggcctgtccgggccttcatgtccgggtcctcgtaacccggagccgcgagtgatccccggggacgggtcgaagcggtgtgtccctgtcgggcttctgtccccggcggcgccgcgcgtcttccgcggtgtcctcgggcccggtggccccgggagatgggtgtcgggatcccgctgacgcccgatccgcgcccgcacaggcagaagtagagcagaagaagaagcggaccttccgcaagttcacctaccgcggcgtggacctcgaccagctgctggacatgtcctacgagcagctgatgcagctgtacagtgcgcgccagcggcggcggctgaaccggggcctgcggcggaagcagcactccctgctgaagcgcctgcgcaaggccaagaaggaggcgccgcccatggagaagccggaagtggtgaagacgcacctgcgggacatgatcatcctacccgagatggtgggcagcatggtgggcgtctacaacggcaagaccttcaaccaggtggagatcaagcccgagatgatcggccactacctgggcgagttctccatcacctacaagcccgtaaagcatggccggcccggcatcggggccacccactcctcccgcttcatccctctcaagtaatggctcagctaataaaggcgcacatgactccaaaaaaaaaaaaaaaaaaaaaaaaaaaaacaaaaaaaaaaaaacaaacaaaaaaaaaaaaaaaaaaaaaaaagaaaaaaaaaaaaaaaaaaaaaaaaagagggggggcgcgcaccaagaacacacccaggagcgccacaaaacagggcaccaccgatatgggccaaaggggcccaaagaggcggccctaaaacacgaagacacggcgcgcgtaacaacacgccagacgacgggaaaccggcaacgcggacaatgggaaacgcacccaccaccggggcgggccaacactggcgcaccaccctccacgaatataccctcggggcctctcaattccagtgtatcgttgctaaccccggtatattcgctgagaactgcccacgcactgttgaaattcg

SEQ ID NO: 445707 - DNA, 894 bp, Homo sapiens
cgagggggcgggacatgccggcagtctcgcgataactgcgcaggcgcggaccaaagcgatctcttctgaggatccggcaagatggtgagtgttgcgatttggcgcgtctctgccgggcctatccggctccatccaacctctgaccgtctcgcgggggccgcagttcgtccccgcggctacggcggcttgctcccgaccctgcaggcggctggatgttggggcgaggggcggacttggcagaagtagagcagaagaagaagcggaccttccgcaagttcacctaccgcggcgtggacctcgaccagctgctggacatgtcctacgagcagctgatgcagctgtacagtgcgcgccagcggcggcggctgaaccggggcctgcggcggaagcagcactccctgctgaagcgcctgcgcaaggccaagaaggaggcgccgcccatggagaagccggaagtggtgaagacgcacctgcgggacatgatcatcctacccgagatggtgggcagcatggtgggcgtctacaacggcaagaccttcaaccaggtggagatcaagcccgagatgatcggccactacctgggcgagttctccatcacctacaagcccgtaaagcatggccggcccggcatcggggccacccactcctcccgcttcatccctctcaagtaatggctcagctaataaaggcgcacatgactccaaaaaaaaaaaaaaaaaaaaaaaaaaaaacaaaaaaaaaaaaaaaaaaaaaaaaaaaaccggggggtcttttttggggggggggaaaaaaggggttttggaaaggggccctttgggccatgtgttgtttcttggccccattttttttttcccaaggggggaaaatctcggggggtccccctattaggggggg

SEQ ID NO: 445708 - DNA, 722 bp, Homo sapiens
aagcatggtatcaacgcagagttgccattacggccgggggctcttctgaggatccggcaagatggcagaagtagagcagaagaagaagcggaccttccgcaagttcacctaccgcggcgtggacctcgaccagctgctggacatgtcctacgagcagctgatgcagctgtacagtgcgcgccagcggcggcggctgaaccggggcctgcggcggaagcagcactccctgctgaagcgcctgcgcaaggccaagaaggaggcgccgcccatggagaagccggaagtggtgaagacgcacctgcgggacatgatcatcctacccgagatggtgggcagcatggtgggcgtctacaacggcaagaccttcaaccaggtggagatcaagcccgagatgatcggccactacctgggcgagttctccatcacctacaagcccgtaaagcatggccggcccggcatcggggccacccactcctcccgcttcatccctctcaagtaatggctcagctaataaaggcgcacatgactccaaaaaaaaaaaaaaaaaaaaaaaaaaaaacaaaaaaaaaaaaaaaaaaaaaaaaaaaaccggggggtcttttttggggggggggaaaaaaggggttttggaaaggggccctttgggccatgtgttgtttcttggccccattttttttttcccaaggggggaaaatctcggggggtccccctattaggggggg

SEQ ID NO: 445709 - DNA, 845 bp, Homo sapiens
  misc_feature (745)..(745): n is a, c, g, or t
aagcatggtatcaacgcagagttgccattacggccgggggctcttctgaggatccggcaagatggcagaagtagagcagaagaagaagcggaccttccgcaagttcacctaccgcggcgtggacctcgaccagctgctggacatgtcctacgagcagctgatgcagctgtacagtgcgcgccagcggcggcggctgaaccggggcctgcggcggaagcagcactccctgctgaagcgcctgcgcaaggccaagaaggaggcgccgcccatggagaagccggaagtggtgaagacgcacctgcgggacatgatcatcctacccgagatggtgggcagcatggtgggcgtctacaacggcaagaccttcaaccaggtggagatcaagcccgagatgatcggccactacctgggcgagttctccatcacctacaagcccgtaaagcatggccggcccggcatcggggccacccactcctcccgcttcatccctctcaagtaatggctcagctaataaaggcgcacatgactccaaaaaaaaaaaaaaaaaaaaaaaaaaaaaccgcggggccataataggggggggggggaaaaagagggtatgcaaagtgcgacagtgtggccaaaggcgtgcttctcctggccccatttttttgtccccaggcggaaaactggggggaccccataggggaggggattaaaatgtgcgaaaagcggcggtgactcgttatattgttgtgaaaagacngggagagaagaaaggaaggagagggaggggataacaagtggcgacagtaaaaaggaggtgagagaagcagatctagaacagtgagaggaaataaaaaagt

SEQ ID NO: 445710 - DNA, 704 bp, Homo sapiens
gaggaaaaggggaaactaggctaggaacgaggctgggtgttagatggcagaagtagagcagaagaagaagcggaccttccgcaagttcacctaccgcggcgtggacctcgaccagctgctggacatgtcctacgagcagctgatgcagctgtacagtgcgcgccagcggcggcggctgaaccggggcctgcggcggaagcagcactccctgctgaagcgcctgcgcaaggccaagaaggaggcgccgcccatggagaagccggaagtggtgaagacgcacctgcgggacatgatcatcctacccgagatggtgggcagcatggtgggcgtctacaacggcaagaccttcaaccaggtggagatcaagcccgagatgatcggccactacctgggcgagttctccatcacctacaagcccgtaaagcatggccggcccggcatcggggccacccactcctcccgcttcatccctctcaagtaatggctcagctaataaaggcgcacatgactccaaaaaaaaaaaaaaaaaaaaaaaaaaaaacaaaaaaaaaaaaaaaaaaaaaaaaaaaaccggggggtcttttttggggggggggaaaaaaggggttttggaaaggggccctttgggccatgtgttgtttcttggccccattttttttttcccaaggggggaaaatctcggggggtccccctattaggggggg

SEQ ID NO: 445711 - DNA, 1415 bp, Homo sapiens
cgagggggcgggacatgccggcagtctcgcgataactgcgcaggcgcggaccaaagcgatctcttctgaggatccggcaagatggtgagtgttgcgatttggcgcgtctctgccgggcctatccggctccatccaacctctgaccgtctcgcgggggccgcagttcgtccccgcggctacggcggcttgctcccgaccctgcaggcggctggatgttggggcgaggggcggacttggtgggtgtcgggacgacgcggggctgggaaggcctgtccgggccttcatgtccgggtcctcgtaacccggagccgcgagtgatccccggggacgggtcgaagcggtgtgtccctgtcgggcttctgtccccggcggcgccgcgcgtcttccgcggtgtcctcgggcccggtggccccgggagatgggtgtcgggatcccgctgacgcccgatccgcgcccgcacaggcagaagtagagcagaagaagaagcggaccttccgcaagttcacctaccgcggcgtggacctcgaccagctgctggacatgtcctacgagcagctgatgcagctgtacagtgcgcgccagcggcggcggctgaaccggggcctgcggcggaagcagcactccctgctgaagcgcctgcgcaaggccaagaaggaggcgccgcccatggagaagccggaagtggtgaagacgcacctgcgggacatgatcatcctacccgagatggtgggcagcatggtgggcgtctacaacggcaagaccttcaaccaggtggagatcaagcccgagatgatcggccactacctgggcgagttctccatcacctacaagcccgtaaagcatggccggcccggcatcggggccacccactcctcccgcttcatccctctcaagtaatggctcagctaataaaggcgcacatgactccaaaaaaaaaaaaaaaaaaaaaaaaaaaaacttcgagacttagttctcctctctcggggctcacggccttgtaattcccagcactttggggaggcagaaggcgggcggactcatgaggctcgggagaattcgagacccttccttggttaacgacaggtgaaaccccggttttattagaattacaaaaaatattagcgggggcgtcggggcgggcgcttgtagtccccagtacctggggagggtgagggcagggaaaattggcgtttaaaccccgggaggggggaacttggcagttgagcccgaaaaatccgggacgaaagagggggagaactccggtcttaaaagaaaacatatgacagtcgtatattacagtccaagaggaaaacacccggggggcttatttggaggcgggaaaaacaaataataaagaggcagacgcactatgtttttcgcgcccttttttgtaaaaggggaacttgggggccaca

SEQ ID NO: 445712 - DNA, 1271 bp, Homo sapiens
cgagggggcgggacatgccggcagtctcgcgataactgcgcaggcgcggaccaaagcgatctcttctgaggatccggcaagatggtgagtgttgcgatttggcgcgtctctgccgggcctatccggctccatccaacctctgaccgtctcgcgggggccgcagttcgtccccgcggctacggcggcttgctcccgaccctgcaggcggctggatgttggggcgaggggcggacttggtgggtgtcgggacgacgcggggctgggaaggcctgtccgggccttcatgtccgggtcctcgtaacccggagccgcgagtgatccccggggacgggtcgaagcggtgtgtccctgtcgggcttctgtccccggcggcgccgcgcgtcttccgcggtgtcctcgggcccggtggccccgggagatgggtgtcgggatcccgctgacgcccgatccgcgcccgcacaggcagaagtagagcagaagaagaagcggaccttccgcaagttcacctaccgcggcgtggacctcgaccagctgctggacatgtcctacgagcagctgatgcagctgtacagtgcgcgccagcggcggcggctgaaccggggcctgcggcggaagcagcactccctgctgaagcgcctgcgcaaggccaagaaggaggcgccgcccatggagaagccggaagtggtgaagacgcacctgcgggacatgatcatcctacccgagatggtgggcagcatggtgggcgtctacaacggcaagaccttcaaccaggtggagatcaagcccgagatgatcggccactacctgggcgagttctccatcacctacaagcccgtaaagcatggccggcccggcatcggggccacccactcctcccgcttcatccctctcaagtaatggctcagctaataaaggcgcacatgactccaaaaaaaaaaaaaaaaaaaaagaaaaaaaaaaaaaaaaaaaaaaaaagagggggggcgcgcaccaagaacacacccaggagcgccacaaaacagggcaccaccgatatgggccaaaggggcccaaagaggcggccctaaaacacgaagacacggcgcgcgtaacaacacgccagacgacgggaaaccggcaacgcggacaatgggaaacgcacccaccaccggggcgggccaacactggcgcaccaccctccacgaatataccctcggggcctctcaattccagtgtatcgttgctaaccccggtatattcgctgagaactgcccacgcactgttgaaattcg

SEQ ID NO: 445713 - DNA, 1199 bp, Homo sapiens
cgagggggcgggacatgccggcagtctcgcgataactgcgcaggcgcggaccaaagcgatctcttctgaggatccggcaagatggtgagtgttgcgatttggcgcgtctctgccgggcctatccggctccatccaacctctgaccgtctcgcgggggccgcagttcgtccccgcggctacggcggcttgctcccgaccctgcaggcggctggatgttggggcgaggggcggacttggtgggtgtcgggacgacgcggggctgggaaggcctgtccgggccttcatgtccgggtcctcgtaacccggagccgcgagtgatccccggggacgggtcgaagcggtgtgtccctgtcgggcttctgtccccggcggcgccgcgcgtcttccgcggtgtcctcgggcccggtggccccgggagatgggtgtcgggatcccgctgacgcccgatccgcgcccgcacaggcagaagtagagcagaagaagaagcggaccttccgcaagttcacctaccgcggcgtggacctcgaccagctgctggacatgtcctacgagcagctgatgcagctgtacagtgcgcgccagcggcggcggctgaaccggggcctgcggcggaagcagcactccctgctgaagcgcctgcgcaaggccaagaaggaggcgccgcccatggagaagccggaagtggtgaagacgcacctgcgggacatgatcatcctacccgagatggtgggcagcatggtgggcgtctacaacggcaagaccttcaaccaggtggagatcaagcccgagatgatcggccactacctgggcgagttctccatcacctacaagcccgtaaagcatggccggcccggcatcggggccacccactcctcccgcttcatccctctcaagtaatggctcagctaataaaggcgcacatgactccatcacctacaagcccgtaaagcatggccggccggcatcggggcacccactcctcccgcttcatccctctcaagtaatggctcagctaataaaggcgcacatgactccaaaaaaaaaaaaaaaaaaaaaaaaaaaaaaccggggggtcttttttggggggggggaaaaaaggggttttggaaaggggccctttgggccatgtgttgtttcttggccccattttttttttcccaaggggggaaaatctcggggggtccccctattaggggggg

SEQ ID NO: 445714 - DNA, 1091 bp, Homo sapiens
cgagggggcgggacatgccggcagtctcgcgataactgcgcaggcgcggaccaaagcgatctcttctgaggatccggcaagatggtgagtgttgcgatttggcgcgtctctgccgggcctatccggctccatccaacctctgaccgtctcgcgggggccgcagttcgtccccgcggctacggcggcttgctcccgaccctgcaggcggctggatgttggggcgaggggcggacttggtgggtgtcgggacgacgcggggctgggaaggcctgtccgggccttcatgtccgggtcctcgtaacccggagccgcgagtgatccccggggacgggtcgaagcggtgtgtccctgtcgggcttctgtccccggcggcgccgcgcgtcttccgcggtgtcctcgggcccggtggccccgggagatgggtgtcgggatcccgctgacgcccgatccgcgcccgcacaggcagaagtagagcagaagaagaagcggaccttccgcaagttcacctaccgcggcgtggacctcgaccagctgctggacatgtcctacgagcagctgatgcagctgtacagtgcgcgccagcggcggcggctgaaccggggcctgcggcggaagcagcactccctgctgaagcgcctgcgcaaggccaagaaggaggcgccgcccatggagaagccggaagtggtgaagacgcacctgcgggacatgatcatcctacccgagatggtgggcagcatggtgggcgtctacaacggcaagaccttcaaccaggtggagatcaagcccgagatgatcggccactacctgggcgagttctccatcacctacaagcccgtaaagcatggccggcccggcatcggggccacccactcctcccgcttcatccctctcaagtaatggctcagctaataaaggcgcacatgactccaaaaaaaaaaaaaaaaaaaaaaaaaaaaaccggggggtcttttttggggggggggaaaaaaggggttttggaaaggggccctttgggccatgtgttgtttcttggccccattttttttttcccaaggggggaaaatctcggggggtccccctattaggggggg

SEQ ID NO: 445715 - DNA, 1254 bp, Homo sapiens
cgagggggcgggacatgccggcagtctcgcgataactgcgcaggcgcggaccaaagcgatctcttctgaggatccggcaagatggtgagtgttgcgatttggcgcgtctctgccgggcctatccggctccatccaacctctgaccgtctcgcgggggccgcagttcgtccccgcggctacggcggcttgctcccgaccctgcaggcggctggatgttggggcgaggggcggacttggtgggtgtcgggacgacgcggggctgggaaggcctgtccgggccttcatgtccgggtcctcgtaacccggagccgcgagtgatccccggggacgggtcgaagcggtgtgtccctgtcgggcttctgtccccggcggcgccgcgcgtcttccgcggtgtcctcgggcccggtggccccgggagatgggtgtcgggatcccgctgacgcccgatccgcgcccgcacaggcagaagtagagcagaagaagaagcggaccttccgcaagttcacctaccgcggcgtggacctcgaccagctgctggacatgtcctacgagcagctgatgcagctgtacagtgcgcgccagcggcggcggctgaaccggggcctgcggcggaagcagcactccctgctgaagcgcctgcgcaaggccaagaaggaggcgccgcccatggagaagccggaagtggtgaagacgcacctgcgggacatgatcatcctacccgagatggtgggcagcatggtgggcgtctacaacggcaagaccttcaaccaggtggagatcaagcccgagatgatcggccactacctgggcgagttctccatcacctacaagcccgtaaagcatggccggcccggcatcggggccacccactcctcccgcttcatccctctcaagtaatggctcagctaataaaggcgcacatgactccaaaaaaaaaaaaaaaaaaaaagaaaaaaaaaaaaaaaaaaaagggggggggggcctaaaagttcccccgggggggccacgaaattagacgcactaacccgcgcaattgtggaccaagaggggccccacaaaggagcgcgaataaaacgccaaagcacaggggcgagcgaaaacagtcacccagaggaacaacgccacgagtgcaattggggaggaccccactcggggatgacaaagggcccaacccccccgggataagcgccagcgccacaaacagacggtaaagggcaaacagccgatagtgcgcggacagggagcgaagcgaat

SEQ ID NO: 445716 - DNA, 1123 bp, Homo sapiens
cgagggggcgggacatgccggcagtctcgcgataactgcgcaggcgcggaccaaagcgatctcttctgaggatccggcaagatggtgagtgttgcgatttggcgcgtctctgccgggcctatccggctccatccaacctctgaccgtctcgcgggggccgcagttcgtccccgcggctacggcggcttgctcccgaccctgcaggcggctggatgttggggcgaggggcggacttggtgggtgtcgggacgacgcggggctgggaaggcctgtccgggccttcatgtccgggtcctcgtaacccggagccgcgagtgatccccggggacgggtcgaagcggtgtgtccctgtcgggcttctgtccccggcggcgccgcgcgtcttccgcggtgtcctcgggcccggtggccccgggagatgggtgtcgggatcccgctgacgcccgatccgcgcccgcacaggcagaagtagagcagaagaagaagcggaccttccgcaagttcacctaccgcggcgtggacctcgaccagctgctggacatgtcctacgagcagctgatgcagctgtacagtgcgcgccagcggcggcggctgaaccggggcctgcggcggaagcagcactccctgctgaagcgcctgcgcaaggccaagaaggaggcgccgcccatggagaagccggaagtggtgaagacgcacctgcgggacatgatcatcctacccgagatggtgggcagcatggtgggcgtctacaacggcaagaccttcaaccaggtggagatcaagcccgagatgatcggccactacctgggcgagttctccatcacctacaagcccgtaaagcatggccggcccggcatcggggccacccactcctcccgcttcatccctctcaagtaatggctcagctaataaaggcgcacatgactccaaaaaaaaaaaaaaaaaaaaaaaaaaaaaaaaaaaaaaaaaaaaaaaaaaaaaaaaaaaaaccggggggtcttttttggggggggggaaaaaaggggttttggaaaggggccctttgggccatgtgttgtttcttggccccattttttttttcccaaggggggaaaatctcggggggtccccctattaggggggg

SEQ ID NO: 445717 - DNA, 338 bp, Homo sapiens
ccgctccaacatcagaatggtaagcagcactccctgctgaagcgcctgcgcaaggccaagaaggaggcgccgcccatggagaagccggaagtggtgaagacgcacctgcgggacatgatcatcctacccgagatggtgggcagcatggtgggcgtctacaacggcaagaccttcaaccaggtggagatcaagcccgagatgatcggccactacctgggcgagttctccatcacctacaagcccgtaaagcatggccggcccggcatcggggccacccactcctcccgcttcatccctctcaagtaatggctcagctaataaaggcgcacatgactcca

SEQ ID NO: 445718 - DNA, 901 bp, Homo sapiens
  misc_feature (886)..(886): n is a, c, g, or t
cgagggggcgggacatgccggcagtctcgcgataactgcgcaggcgcggaccaaagcgatctcttctgaggatccggcaagatggtgagtgttgcgatttggcgcgtctctgccgggcctatccggctccatccaacctctgaccgtctcgcgggggccgcagttcgtccccgcggctacggcggcttgctcccgaccctgcaggcggctggatgttggggcgaggggcggacttggtgggtgtcgggacgacgcggggctgggaaggcctgtccgggccttcatgtccgggtcctcgtaacccggagccgcgagtgatccccggggacgggtcgaagcggtgtgtccctgtcgggcttctgtccccggcggcgccgcgcgtcttccgcggtgtcctcgggcccggtggccccgggagatgggtgtcgggatcccgctgacgcccgatccgcgcccgcacaggcagaagtagagcagaagaagaagcggaccttccgcaagttcacctaccgcggcgtggacctcgaccagctgctggacatgtcctacgagcagctgatgcagctgtacagtgcgcgccagcggcggcggctgaaccggggcctgcggcggaagcagcactccctgctgaagcgcctgcgcaaggccaagaaggaggcgccgcccatggagaagccggaagtggtgaagacgcacctgcgggacatgatcatcctacccgagatggtgggcagcatggtgggcgtctacaacggcaagaccttcaaccaggtggagatcaagcccgagatgatcggccactacctgggcgagttctccatcacctacaagcccgtaaagctgcgcccgcaattataaacaccgggcctcaatcgggggaacgtcncgtcccctcagcgtt

SEQ ID NO: 445719 - DNA, 1093 bp, Homo sapiens
cgagggggcgggacatgccggcagtctcgcgataactgcgcaggcgcggaccaaagcgatctcttctgaggatccggcaagatggtgagtgttgcgatttggcgcgtctctgccgggcctatccggctccatccaacctctgaccgtctcgcgggggccgcagttcgtccccgcggctacggcggcttgctcccgaccctgcaggcggctggatgttggggcgaggggcggacttggtgggtgtcgggacgacgcggggctgggaaggcctgtccgggccttcatgtccgggtcctcgtaacccggagccgcgagtgatccccggggacgggtcgaagcggtgtgtccctgtcgggcttctgtccccggcggcgccgcgcgtcttccgcggtgtcctcgggcccggtggccccgggagatgggtgtcgggatcccgctgacgcccgatccgcgcccgcacaggcagaagtagagcagaagaagaagcggaccttccgcaagttcacctaccgcggcgtggacctcgaccagctgctggacatgtcctacgagcagctgatgcagctgtacagtgcgcgccagcggcggcggctgaaccggggcctgcggcggaagcagcactccctgctgaagcgcctgcgcaaggccaagaaggaggcgccgcccatggagaagccggaagtggtgaagacgcacctgcgggacatgatcatcctacccgagatggtgggcagcatggtgggcgtctacaacggcaagaccttcaaccaggtggagatcaaggtgtgtgcggccgtccctgccggctggggtgggctggggtcgcctgatgcaggcgggatcagctgacacccagctttgctcttggtctcccgcagcccgagatgatcggccactacctgggcgagttctccatcacctacaagcccgtaaagcatggccggcccggcatcggggccacccactcctcccgcttcatccctctcaagtaatggctcagctaataaaggcgcacatgactccaaaaaaaaaggagatgaaaaaatgaaaacctcggggtttttttttgggggggggcaaaaagggttgtaag

SEQ ID NO: 445720 - DNA, 1946 bp, Homo sapiens
  misc_feature (13)..(13): n is a, c, g, or t
  misc_feature (43)..(43): n is a, c, g, or t
  misc_feature (50)..(50): n is a, c, g, or t
  misc_feature (1609)..(1609): n is a, c, g, or t
ttttaaaaccccnttttactactactactactactactactangctgctnagaagacgactgaaggggctcttctgaggatccggcaagatggcagaagtagagcagaagaagaagcggaccttccgcaagttcacctaccgcggcgtggacctcgaccagctgctggacatgtcctacgagcagctgatgcagctgtacagtgcgcgccagcggcggcggctgaaccggggcctgcggcggaagcagcactccctgctgaagcgcctgcgcaaggccaagaaggaggcgccgcccatggagaagccggaagtggtgaagacgcacctgcgggacatgatcatcctacccgagatggtgggcagcatggtgggcgtctacaacggcaagaccatcacctacaagcccgtaaagcatggccggcccggcatcggggccacccactcctcccgcttcatccctctcaagtaatggctcagctaataaaggcgcacatgactccagtcctttgcgcagcttgttcttcctggcgtcccgagctctgggaggggcctgggcctgcttcaggttcgtggtgtgaggaggttcaggttggacgttcgggggtgtgtggtagtgttgtgtggatggtctcttggtgtcgaagactgacagctgtgcgggccctgccccaactcggctgcccctgctcctgtctgcagggacagctgtggagctgggtgcccaagcccaggtgtgtagctccgtcccttttggccccctcagcgttcttgacctcggggcagctgcctggcctcactctgtcttctgggtacctcacgtagagggggccactcctgggctaagtgcagcccctcaagccctcacctggcctgggctctcctttctggcttccctcatctcctgtggagggttcccgcaggaagtgaagcagcagcaggaacctttgggccacctgagcccctcccttctatcctcacccctgcttggcttcttagaagctcctgactctcctcctgacaccacgctgctggcatctcctctcccagcaggctccatggctgcagccagccccatccgcccagcctggggctttgtgtccgggacagagccgtgtcccgtggttaggctgcaccatccgtggcctggccagctctgtctcctttgcacagaatgcttgaaagaacaggacaaagtggctgtgcctgtgggtggggggcaccgtccagccctccatgggctctctgatggccgtacgtgggttggagaacatggtgagaactaaccccgttcaatgctggagtcacctcagcccagaaggtggtaactttgctcactaagcacccagcagagtggcccagggatgtggggtgggcctccccttgggcagtggacaggagggtgagagctcagccaggcagatgggggcaggggagatgtgaggagccccaccttcaccctcaaatggcccacaacagcctcctgtgggccctcttctataatgtttctccacttttttttttaaatttgttgcccagccggagtgcagtggtgtgatcatggctcactgcagcctaaatctcatgggctcaggtgatcttcccactgcntcccaaagtgctgggatcacaggcatgagacactgcagctggctatatcttcaaatttaaacatgatttgcagccaggcgcggtggttcacgtctgtgatcctagcactttgggaggccgagatgggtggatcacctgaggtcaggagttcgagaccagcctgaccaacgtggtaaaaccttgtctctactgaaaatacaaaaaaattagcctaactgggcatggtggcatgcggctataatctcagctacttgagaggctgaagcaggagagtcacttgaacccaggaggcggaaatcgcactctagcccgggcaacaagagctagactctgcctc

SEQ ID NO: 445721 - DNA, 1079 bp, Homo sapiens
aggcagggttaatcggacgaggagatggcagaagtagagcagaagaagaagcggaccttccgcaagttcacctaccgcggcgtggacctcgaccagctgctggacatgtcctagttggtcttgaactcctgggctcaagcgaccctcccgcctcaacctcccgaagtgctgggatcacaggcgggagccactgcgccctacctgccttcccctgcgtttttagaggcctttggcccgagctgtacgctgcagcaccttgtctgaggctgtggtctccgggccgcttgttctctctgaatctctgcagtcacacggtggctcttgcatgtgagggcgagcagctgatgcagctgtacagtgcgcgccagcggcggcggctgaaccggggcctgcggcggaagcagcactccctgctgaagcgcctgcgcaaggccaagaaggaggcgccgcccatggagaagccggaagtggtgaagacgcacctgcgggacatgatcatcctacccgagatggtgggcagcatggtgggcgtctacaacggcaagaccttcaaccaggtggagatcaagcccgagatgatcggccactacctgggcgagttctccatcacctacaagcccgtaaagcatggccggcccggcatcggggccacccactcctcccgcttcatccctctcaagtaatggctcagctaataaaggcgcacatgactccaaaaaaaaaaaaaacaaacaaaaaaaaaaaaaaaaaaaaaaaagaaaaaaaaaaaaaaaaaaaaaaaaagagggggggcgcgcaccaagaacacacccaggagcgccacaaaacagggcaccaccgatatgggccaaaggggcccaaagaggcggccctaaaacacgaagacacggcgcgcgtaacaacacgccagacgacgggaaaccggcaacgcggacaatgggaaacgcacccaccaccggggcgggccaacactggcgcaccaccctccacgaatataccctcggggcctctcaattccagtgtatcgttgctaaccccggtatattcgctgagaactgcccacgcactgttgaaattcg

SEQ ID NO: 445722 - DNA, 388 bp, Homo sapiens
ttgtagacgccccccatgctgccccccatctcgggtaggatgatcatgcccgagatgatcggccactacctgggcgagttctccatcacctacaagcccgtaaagcatggccggcccggcatcggggccacccactcctcccgcttcatccctctcaagtaatggctcagctaataaaggcgcacatgactccaaaaaaaaaaaaaaaaaaaaaaaaaaaaaaaaaaaaaaaaaaaaaaaaaaaaaaaaaaaaaccggggggtcttttttggggggggggaaaaaaggggttttggaaaggggccctttgggccatgtgttgtttcttggccccattttttttttcccaaggggggaaaatctcggggggtccccctattaggggggg

SEQ ID NO: 445723 - DNA, 499 bp, Homo sapiens
aaaccctaggctaggtacgaggctgggtgtgggcagaagtagagcagaagaagaagcggaccttccgcaagttcacctaccgcggcgtggacctcgaccagctgctggacatgtcctacgagcagctgatgcagctgtacagtgcgcgccagcggcggcggctgaaccggggcctgcggcggaagcagcactccctgctgaagcgcctgcgcaaggccaagaaggaggcgccgcccatggagaagccggaagtggtgaagacgcacctgcgggacatgatcatcctacccgagatggtgggcagcatggtgggcgtctacaacggcaagaccttcaaccaggtggagatcaagcccgagatgatcggccactacctgggcgagttctccatcacctacaagcccgtaaagcatggccggcccggcatcggggccacccactcctcccgcttcatccctctcaagtaatggctcagctaataaaggcgcacatgactcca

SEQ ID NO: 445724 - DNA, 518 bp, Homo sapiens
  misc_feature (22)..(22): n is a, c, g, or t
cagccatcttaagcagctgacncctctcgtccgaattcggcacgagagatggcagaagtagagcagaagaagaagcggaccttccgcaagttcacctaccgcggcgtggacctcgaccagctgctggacatgtcctacgagcagctgatgcagctgtacagtgcgcgccagcggcggcggctgaaccggggcctgcggcggaagcagcactccctgctgaagcgcctgcgcaaggccaagaaggaggcgccgcccatggagaagccggaagtggtgaagacgcacctgcgggacatgatcatcctacccgagatggtgggcagcatggtgggcgtctacaacggcaagaccttcaaccaggtggagatcaagcccgagatgatcggccactacctgggcgagttctccatcacctacaagcccgtaaagcatggccggcccggcatcggggccacccactcctcccgcttcatccctctcaagtaatggctcagctaataaaggcgcacatgactcca

SEQ ID NO: 445725 - DNA, 501 bp, Homo sapiens
aggctggtacggccggaagttttggatcaagatggcagaagtagagcagaagaagaagcggaccttccgcaagttcacctaccgcggcgtggacctcgaccagctgctggacatgtcctacgagcagctgatgcagctgtacagtgcgcgccagcggcggcggctgaaccggggcctgcggcggaagcagcactccctgctgaagcgcctgcgcaaggccaagaaggaggcgccgcccatggagaagccggaagtggtgaagacgcacctgcgggacatgatcatcctacccgagatggtgggcagcatggtgggcgtctacaacggcaagaccttcaaccaggtggagatcaagcccgagatgatcggccactacctgggcgagttctccatcacctacaagcccgtaaagcatggccggcccggcatcggggccacccactcctcccgcttcatccctctcaagtaatggctcagctaataaaggcgcacatgactcca

SEQ ID NO: 445726 - DNA, 680 bp, Homo sapiens
  misc_feature (22)..(22): n is a, c, g, or t
cagccatcttaagcagctgacncctctcgtccgaattcggcacgagagatggcagaagtagagcagaagaagaagcggaccttccgcaagttcacctaccgcggcgtggacctcgaccagctgctggacatgtcctacgagcagctgatgcagctgtacagtgcgcgccagcggcggcggctgaaccggggcctgcggcggaagcagcactccctgctgaagcgcctgcgcaaggccaagaaggaggcgccgcccatggagaagccggaagtggtgaagacgcacctgcgggacatgatcatcctacccgagatggtgggcagcatggtgggcgtctacaacggcaagaccttcaaccaggtggagatcaagcccgagatgatcggccactacctgggcgagttctccatcacctacaagcccgtaaagcatggccggcccggcatcggggccacccactcctcccgcttcatccctctcaagtaatggctcagctaataaaggcgcacatgactccaaaaaaaaaaaaaaaaaaaaaaaaaaaaaccggggggtcttttttggggggggggaaaaaaggggttttggaaaggggccctttgggccatgtgttgtttcttggccccattttttttttcccaaggggggaaaatctcggggggtccccctattaggggggg

SEQ ID NO: 445727 - DNA, 329 bp, Homo sapiens
  misc_feature (44)..(44): n is a, c, g, or t
  misc_feature (48)..(48): n is a, c, g, or t
gacatgtcctacgagcagctgatgcagctgtacagtgtgccgcnccangctgctgaagcgccgcccatggagaagccggaagtggtgaagacgcacctgcgggacatgatcatcctacccgagatggtgggcagcatggtgggcgtctacaacggcaagaccttcaaccaggtggagatcaagcccgagatgatcggccactacctgggcgagttctccatcacctacaagcccgtaaagcatggccggcccggcatcggggccacccactcctcccgcttcatccctctcaagtaatggctcagctaataaaggcgcacatgactcca

SEQ ID NO: 445728 - DNA, 606 bp, Homo sapiens
  misc_feature (66)..(66): n is a, c, g, or t
tgatcttgggttaagtttatttaccctcccttgtatttcaagggttaacttattgaagaaaagagntttaattggctcacggttctgcaggcttgtacaggaagcacagtagcatctgcttctggggaggccctcagggagcttccagtcatacactcagggcagaagtagagcagaagaagaagcggaccttccgcaagttcacctaccgcggcgtggacctcgaccagctgctggacatgtcctacgagcagctgatgcagctgtacagtgcgcgccagcggcggcggctgaaccggggcctgcggcggaagcagcactccctgctgaagcgcctgcgcaaggccaagaaggaggcgccgcccatggagaagccggaagtggtgaagacgcacctgcgggacatgatcacatggtgggcgtctacaacggcaagaccttcaaccaggtggagatcaagcccgagatgatcggccactacctgggcgagttctccatcacctacaagcccgtaaagcatggccggcccggcatcggggccacccactcctcccgcttcatccctctcaagtaatggctcagctaataaaggcgcacatgactcca

SEQ ID NO: 445729 - DNA, 628 bp, Homo sapiens
  misc_feature (66)..(66): n is a, c, g, or t
tgatcttgggttaagtttatttaccctcccttgtatttcaagggttaacttattgaagaaaagagntttaattggctcacggttctgcaggcttgtacaggaagcacagtagcatctgcttctggggaggccctcagggagcttccagtcatacactcagggcagaagtagagcagaagaagaagcggaccttccgcaagttcacctaccgcggcgtggacctcgaccagctgctggacatgtcctacgagcagctgatgcagctgtacagtgcgcgccagcggcggcggctgaaccggggcctgcggcggaagcagcactccctgctgaagcgcctgcgcaaggccaagaaggaggcgccgcccatggagaagccggaagtggtgaagacgcacctgcgggacatgatcatcctacccgagatggtgggcagcatggtgggcgtctacaacggcaagaccttcaaccaggtggagatcaagcccgagatgatcggccactacctgggcgagttctccatcacctacaagcccgtaaagcatggccggcccggcatcggggccacccactcctcccgcttcatccctctcaagtaatggctcagctaataaaggcgcacatgactcca

SEQ ID NO: 445730 - DNA, 2373 bp, Homo sapiens
  misc_feature (2036)..(2036): n is a, c, g, or t
cgagggggcgggacatgccggcagtctcgcgataactgcgcaggcgcggaccaaagcgatctcttctgaggatccggcaagatggtgagtgttgcgatttggcgcgtctctgccgggcctatccggctccatccaacctctgaccgtctcgcgggggccgcagttcgtccccgcggctacggcggcttgctcccgaccctgcaggcggctggatgttggggcgaggggcggacttggtgggtgtcgggacgacgcggggctgggaaggcctgtccgggccttcatgtccgggtcctcgtaacccggagccgcgagtgatccccggggacgggtcgaagcggtgtgtccctgtcgggcttctgtccccggcggcgccgcgcgtcttccgcggtgtcctcgggcccggtggccccgggagatgggtgtcgggatcccgctgacgcccgatccgcgcccgcacaggcagaagtagagcagaagaagaagcggaccttccgcaagttcacctaccgcggcgtggacctcgaccagctgctggacatgtcctacgagcagctgatgcagctgtacagtgcgcgccagcggcggcggctgaaccggggcctgcggcggaagcagcactccctgctgaagcgcctgcgcaaggccaagaaggaggcgccgcccatggagaagccggaagtggtgaagacgcacctgcgggacatgatcatcctacccgagatggtgggcagcatggtgggcgtctacaacggcaagaccttcaaccaggtggagatcaagcccgagatgatcggccactacctgggcgagttctccatcacctacaagcccgtaaagcatggccggcccggcatcggggccacccactcctcccgcttcatccctctcaagtaatggctcagctaataaaggcgcacatgactccagtcctttgcgcagcttgttcttcctggcgtcccgagctctgggaggggcctgggcctgcttcaggttcgtggtgtgaggaggttcaggttggacgttcgggggtgtgtggtagtgttgtgtggatggtctcttggtgtcgaagactgacagctgtgcgggccctgccccaactcggctgcccctgctcctgtctgcagggacagctgtggagctgggtgcccaagcccaggtgtgtagctccgtcccttttggccccctcagcgttcttgacctcggggcagctgcctggcctcactctgtcttctgggtacctcacgtagagggggccactcctgggctaagtgcagcccctcaagccctcacctggcctgggctctcctttctggcttccctcatctcctgtggagggttcccgcaggaagtgaagcagcagcaggaacctttgggccacctgagcccctcccttctatcctcacccctgcttggcttcttagaagctcctgactctcctcctgacaccacgctgctggcatctcctctcccagcaggctccatggctgcagccagccccatccgcccagcctggggctttgtgtccgggacagagccgtgtcccgtggttaggctgcaccatccgtggcctggccagctctgtctcctttgcacagaatgcttgaaagaacaggacaaagtggctgtgcctgtgggtggggggcaccgtccagccctccatgggctctctgatggccgtacgtgggttggagaacatggtgagaactaaccccgttcaatgctggagtcacctcagcccagaaggtggtaactttgctcactaagcacccagcagagtggcccagggatgtggggtgggcctccccttgggcagtggacaggagggtgagagctcagccaggcagatgggggcaggggagatgtgaggagccccaccttcaccctcaaatggcccacaacagcctcctgtgggccctcttctataatgtttctccacttttttttttaaatttgttgcccagccggagtgcagtggtgtgatcatggctcactgcagcctaaatctcatgggctcaggtgatcttcccactgcntcccaaagtgctgggatcacaggcatgagacactgcagctggctatatcttcaaatttaaacatgatttgcagccaggcgcggtggttcacgtctgtgatcctagcactttgggaggccgagatgggtggatcacctgaggtcaggagttcgagaccagcctgaccaacgtggtaaaaccttgtctctactgaaaatacaaaaaaattagcctaactgggcatggtggcatgcggctataatctcagctacttgagaggctgaagcaggagagtcacttgaacccaggaggcggaaatcgcactctagcccgggcaacaagagctagactctgcctc

SEQ ID NO: 445731 - DNA, 906 bp, Homo sapiens
gaggaaaaggggaaactaggctaggaacgaggctgggtgttagatggcagaagtagagcagaagaagaagcggaccttccgcaagttcacctaccgcggcgtggacctcgaccagctgctggacatgtcctacgagcagctgatgcagctgtacagtgcgcgccagcggcggcggctgaaccggggcctgcggcggaagcagcactccctgctgaagcgcctgcgcaaggccaagaaggaggcgccgcccatggagaagccggaagtggtgaagacgcacctgcgggacatgatcatcctacccgagatggtgggcagcatggtgggcgtctacaacggcaagaccttcaaccaggtggagatcaagcccgagatgatcggccactacctgggcgagttctccatcacctacaagcccgtaaagcatggccggcccggcatcggggccacccactcctcccgcttcatccctctcaagtaatggctcagctaataaaggcgcacatgactccaaaaaaaaaaaaaaaaaaaaaaaaaaaaacaaaaaaaaaaaaacaaacaaaaaaaaaaaaaaaaaaaaaaaagaaaaaaaaaaaaaaaaaaaaaaaaagagggggggcgcgcaccaagaacacacccaggagcgccacaaaacagggcaccaccgatatgggccaaaggggcccaaagaggcggccctaaaacacgaagacacggcgcgcgtaacaacacgccagacgacgggaaaccggcaacgcggacaatgggaaacgcacccaccaccggggcgggccaacactggcgcaccaccctccacgaatataccctcggggcctctcaattccagtgtatcgttgctaaccccggtatattcgctgagaactgcccacgcactgttgaaattcg

SEQ ID NO: 445732 - DNA, 1024 bp, Homo sapiens
cgagggggcgggacatgccggcagtctcgcgataactgcgcaggcgcggaccaaagcgatctcttctgaggatccggcaagatggtgagtgttgcgatttggcgcgtctctgccgggcctatccggctccatccaacctctgaccgtctcgcgggggccgcagttcgtccccgcggctacggcggcttgctcccgaccctgcaggcggctggatgttggggcgaggggcggacttggtgggtgtcgggacgacgcggggctgggaaggcctgtccgggccttcatgtccgggtcctcgtaacccggagccgcgagtgatccccggggacgggtcgaagcggtgtgtccctgtcgggcttctgtccccggcggcgccgcgcgtcttccgcggtgtcctcgggcccggtggccccgggagatgggtgtcgggatcccgctgacgcccgatccgcgcccgcacaggcagaagtagagcagaagaagaagcggaccttccgcaagttcacctaccgcggcgtggacctcgaccagctgctggacatgtcctacgagcagctgatgcagctgtacagtgcgcgccagcggcggcggctgaaccggggcctgcggcggaagcagcactccctgctgaagcgcctgcgcaaggccaagaaggaggcgccgcccatggagaagccggaagtggtgaagacgcacctgcgggacatgatcatcctacccgagatggtgggcagcatggtgggcgtctacaacggcaagaccttcaaccaggtggagatcaaggtgtgtgcggccgtccctgccggctggggtgggctggggtcgcctgatgcaggcgggatcagctgacacccagctttgctcttggtctcccgcagcccgagatgatcggccactacctgggcgagttctccatcacctacaagcccgtaaagcatggccggcccggcatcggggccacccactcctcccgcttcatccctctcaagtaatggctcagctaataaaggcgcacatgactcca

SEQ ID NO: 445733 - DNA, 1122 bp, Homo sapiens
cgagggggcgggacatgccggcagtctcgcgataactgcgcaggcgcggaccaaagcgatctcttctgaggatccggcaagatggtgagtgttgcgatttggcgcgtctctgccgggcctatccggctccatccaacctctgaccgtctcgcgggggccgcagttcgtccccgcggctacggcggcttgctcccgaccctgcaggcggctggatgttggggcgaggggcggacttggtgggtgtcgggacgacgcggggctgggaaggcctgtccgggccttcatgtccgggtcctcgtaacccggagccgcgagtgatccccggggacgggtcgaagcggtgtgtccctgtcgggcttctgtccccggcggcgccgcgcgtcttccgcggtgtcctcgggcccggtggccccgggagatgggtgtcgggatcccgctgacgcccgatccgcgcccgcacaggcagaagtagagcagaagaagaagcggaccttccgcaagttcacctaccgcggcgtggacctcgaccagctgctggacatgtcctacgagcagctgatgcagctgtacagtgcgcgccagcggcggcggctgaaccggggcctgcggcggaagcagcactccctgctgaagcgcctgcgcaaggccaagaaggaggcgccgcccatggagaagccggaagtggtgaagacgcacctgcgggacatgatcatcctacccgagatggtgggcagcatggtgggcgtctacaacggcaagaccttcaaccaggtggagatcaagcccgagatagatcggccactaccttgggcgagttctccaattcaacccttaccaaaaggccccccggggttaaaaaaaaggccaatttgggccctgggcccccgggcaatcgggggcccacccccacttccttcccccgcttcattcccctgctgccaaaaagggttttaaaacttggggggggcgtttcccaaggcgcctttagcattacaagaaggggccggcgatctaattgaaccttccccaaaaagaagacataacacgaagaaaaacaaaatctgcccgaaggggcggcatctctatcatgtggtggcagggagatggacgggcgagagacag

SEQ ID NO: 445734 - DNA, 502 bp, Homo sapiens
  misc_feature (13)..(13): n is a, c, g, or t
  misc_feature (43)..(43): n is a, c, g, or t
  misc_feature (50)..(50): n is a, c, g, or t
ttttaaaaccccnttttactactactactactactactactangctgctnagaagacgactgaaggggctcttctgaggatccggcaagatggcagaagtagagcagaagaagaagcggaccttccgcaagttcacctaccgcggcgtggacctcgaccagctgctggacatgtcctacgagcagctgatgcagctgtacagtgcgcgccagcggcggcggctgaaccggggcctgcggcggaagcagcactccctgctgaagcgcctgcgcaaggccaagaaggaggcgccgcccatggagaagccggaagtggtgaagacgcacctgcgggacatgatcatcctacccgagatggtgggcagcatggtgggcgtctacaacggcaagaccatcacctacaagcccgtaaagcatggccggcccggcatcggggccacccactcctcccgcttcatccctctcaagtaatggctcagctaataaaggcgcacatgactcca

SEQ ID NO: 445735 - DNA, 674 bp, Homo sapiens
  misc_feature (9)..(9): n is a, c, g, or t
  misc_feature (48)..(48): n is a, c, g, or t
  misc_feature (66)..(66): n is a, c, g, or t
  misc_feature (93)..(93): n is a, c, g, or t
ttggacccnggtaaaaaaatgggggggcccggaaaggcccccccaacnggaggtcccggttaaaanatggggtaccctggaatttccccccgntacctatggacctcaaccggcccaggtataaactatatctcctagtaacattttccatttttgtttaatcaaatacttgcttatgaaggatttcagaaatttgtaataaatgtcagcttttgatagcatagcagtaattgacatttcaaaaatatatatttctttctgtgtttggttgggtgtaatgaggaaaatacctgataaaatgtctgaagacactttctaatgttatcttggtgcataagctgtaatttttattcaaaattaaatttcaaatgtttgcagttttggctaaaacattgagttgaaagaattatgaaaagtgggcccatatgaagtaccatgttcattttgaaatatagatttaagatttagaaatatattaaaagagttaatggagcctcctaaattggattttattttgtgggtgaagaattgtaggaagatgaatgtggcctacagttttagtaatctcctagtggagttttttttaacttagtacttttttatttttaagttttttaatctataaaaaatgtgatttctataaaccatgattacaataaataattatattaaac

SEQ ID NO: 445736 - DNA, 486 bp, Homo sapiens
ggtggtgtgggagtgggtacggggagggaagtggaggggagggggtaagtgatagggtaggggaggccctgggaaaggcaggacctcgaggcgcggccgcgcgaggtgaccggagtcacagttcccgcaggcggcgacagcagagcgcccactgcctccagcagattaatattaagattggaagtttgtgtcttttgctggatattggaaattgaatgtaatggcaacagaatttataaagagttgctgtggaggatgtttctatggtgaaacagaaaaacacaacttttctgtggaaagagattttaaagcagcagtcccaaatagtcaaaatgctactatctctgtacctccattgacttctgtttctgtaaagcctcagcttggctgtactgaggattatttgctttccaaattaccatcgggtggcccacgatagtacaatgtaatgtgcgtctctctgaagtaaaggcgccaggtttcgat

SEQ ID NO: 445737 - DNA, 5043 bp, Homo sapiens
ggtggtgtgggagtgggtacggggagggaagtggaggggagggggtaagtgatagggtaggggaggccctgggaaaggcaggacctcgaggcgcggccgcgcgaggtgaccggagtcacagttcccgcaggcggcgacagcagagcgcccactgcctccagcagattaatattaagattggaagtttgtgtcttttgctggatattggaaattgaatgtaatggcaacagaatttataaagagttgctgtggaggatgtttctatggtgaaacagaaaaacacaacttttctgtggaaagagattttaaagcagcagtcccaaatagtcaaaatgctactatctctgtacctccattgacttctgtttctgtaaagcctcagcttggctgtactgaggattatttgctttccaaattaccatctgatggcaaagaagtaccatttgtggtgcccaagtttaagttatcttacattcaacccaggacacaagaaactccttcacatctggaagaacttgaaggatctgccagagcatcttttggagatcgaaaggtagaactttccagttcatcccagcacggacctagctatgatgtgtataacccattctatatgtatcagcacatttcacctgatttgagtcgacgctttcctccccgttcagaagtgacgagactgtatggatcggtttgtgatttaaggacgaacaaacttcccggttcccctgggctaagcaaatctatgtttgatcttacaaactcatctcagcgattcatccagagacatgattcattgtccagtgtacccagtagttcttcttcaaggaaaaattctcaggggagtaacagaagcctggatacaattactctatcaggagatgaaagggactttgggagactgaatgtgaaattgttttataattcttcagtagaacagatctggatcacagttttacagtgcagagatttaagttggccctctagttatggagacactcctactgtttctataaaaggaatacttacattgcccaaaccagtgcatttcaaatcttcagccaaggaaggttccaacgctattgaatttatggaaacgtttgtatttgctattaaacttcaaaatctacaaactgtaagacttgtatttaagattcaaacccagactcccaggaagaaaaccattggagaatgctcaatgtcactcagaacccttagcacacaggaaatggattactctttggatataacaccaccttcaaaaatttctgtttgccatgcagaacttgaattggggacttgttttcaagcagtaaatagcagaattcagttacaaattcttgaggcacggtaccttccaagctcatcaacacctctgactttgagttttttcgtgaaggtgggaatgtttagctcgggagagttgatttataagaaaaagacacgcttactgaaggcctccaatggaagagtcaagtggggagagactatgatttttccacttatacagagtgaaaaagaaattgtttttctcattaagctttacagtcgaagctctgtaagaagaaaacactttgtgggccagatttggataagtgaagacagtaataacattgaagcagtgaaccagtggaaagagacagtaataaatccagaaaaggttgttatcaggtggcacaaattaaatccatcttgaagacttcacacattaatttggtgaagaacttgacattcttttagaagacttatgatttcaatttgctaccaatgagaagaggcaaatcaacaaatttgtcaatttatgggggctataattatggtatataatgtatctgatagaaaatttgataagaaaatgtaatgaattttatcagatatccaaagtaaaggaaatgttttaaaactgcaacaagagacacagacagtaaaatcaaagtattattaggatgactaaataaattataaagtctgtgagaatatcaaccatagatagttctttctatattatgtttttgcttttgtattttaagctttacttagatattcaaaacctggtatatcaagtctctgttagtactattggcatttagaagactttaccattatttcagtgctaggcattattgattaggtcttggctccactgtttacctcttgctatgtattttctcccggtaaaaatgaattgaaccatttcaactattttctatatttggagaaagtttgtgccctgtgttttataatttttttacccataagacatcacattatccctttgtaagctacttatctccaaaaaacttcagaaatagaaaactacattttggcaggaataattgaaaacaccagaaggttgaagtttaattggaaacccagaatatacatactttgctgttttcttccctcaaatattttactatttgttttatttggagttaaaataagagtatcatccatatggtccatcctaattcacagaattaaatgagcttaaatagaaaattcagtattttatgataatcacttcgtttttagtttttaaaatttagattattctataatttaccgtgtttgagtattttctcatttttttcataaccatacctgattatactgtgtaacaaatattttctattgcagttttctttccagtacttattagaactcagtatttggaaataatttcagcttaattgaccataagaactgtggccaaaaagaacagttttttggagaggcagatgacattatacctgattttagaaaatctcactttatttttgctaataagtagactaagtgctctgtgttctcagtcttccctttttttctgcccccattcttactttgtcccaggcatgcagagaaagatggtgatattttaggccaggagtataccttgctataacctaagcatgccttctttattccagctcctatgttctgtgtatatcattaacattttcccaaataaacacttaattctcttttccctaggtgccatctcctcaagctacaaaatgtccacatcttatatcccctttgcttctactgctctgattttgtggtaccagtactctctgccactgaacattttgaaatatttttgttttagatttgcaaaaaatgacatataggtcagtactcacatggatttttaagataaatcacctgtgtgataatattttgaatctgagacgaatacaacttttaaaaattgtttttaaaaatagacttttttttttagagcagttgtaggttaacagaaaaattgagaggaagatagagatttcctttctcccctgacaaagccctcaacagcctcccaggctatcagtatcctgcaccacaatggtacatttgttacaatcaatgaacctactctgaaacatcattatcatccaaagttcatggtttacattagagtcccctcttggtgttatacatgctagaggacaaatatatgatgatatgtatgcatcattataatatagtatagtttcgctgccctaaacatcctctgcaaatgcaactattttaatgggtaccaaagaagtaaatgtatttactggcttttagataataaataacgggctttattgtttattttaaaagctacaatttgttttagctggtttctctgttctattaatgctttgaatttccaaatttaatatatgtagtcatgcatttaacttaatatttaattatttgatttatttaattttctatattcttacaatgtatgtatgatgtataatttaagggaaagctatgacttctcagtttcttagaatcctaggtaaataaaacaataaaaagaaaacccttacatttaaaagagctttcaggtacagaagtattgatacaactaagatcctaaatgttttaattagtgtttacttaagcctttttcaggtgaggaggtactaatgctggttatttccttgaagctttatgtggacctataaataaaaatccaatctcctgctaataggtatgcatattgtgagaaaaacgttaggagctggtagtaaaaaatgagattctatgccaaaataacttctcttcatatttgcctaggcatttcttgacctttacccacttacgcaaggagaaggaaatcataatgatgtcatgtgatcaaaggaaaccatggaagggttcacgctgatagctgatagcttttacagtgctcattcctaacagtggatttacttgtaagctttcagatcaacacaaatagctgcagcctgggttaaaatataacatcactatttggcttttgttttgcatgatttttaaaagcagtactcctagggaaatggcctctgaagtatatcagtttcatctcttaccaagactgttaagaagaaactagtgggattttgaacaagttatataattgtggtctgaaaagaccctaaactgaagttctgtttaaatatagttacatgaatttctctgatactaatgtactcaacagccaggtataaactatatctcctagtaacattttccatttttgtttaatcaaatacttgcttatgaaggatttcagaaatttgtaataaatgtcagcttttgatagcatagcagtaattgacatttcaaaaatatatatttctttctgtgtttggttgggtgtaatgaggaaaatacctgataaaatgtctgaagacactttctaatgttatcttggtgcataagctgtaatttttattcaaaattaaatttcaaatgtttgcagttttggctaaaacattgagttgaaagaattatgaaaagtgggcccatatgaagtaccatgttcattttgaaatatagatttaagatttagaaatatattaaaagagttaatggagcctcctaaattggattttattttgtgggtgaagaattgtaggaagatgaatgtggcctacagttttagtaatctcctagtggagttttttttaacttagtacttttttatttttaagttttttaatctataaaaaatgtgatttctataaaccatgattacaataaataattatattaaac

SEQ ID NO: 445738 - DNA, 5025 bp, Homo sapiens
ggtggtgtgggagtgggtacggggagggaagtggaggggagggggtaagtgatagggtaggggaggccctgggaaaggcaggacctcgaggcgcggccgcgcgaggtgaccggagtcacagttcccgcaggcggcgacagcagagcgcccactgcctccagcagattaatattaagattggaagtttgtgtcttttgctggatattggaaattgaatgtaatggcaacagaatttataaagagttgctgtggaggatgtttctatggtgaaacagaaaaacacaacttttctgtggaaagagattttaaagcagcagtcccaaatagtcaaaatgctactatctctgtacctccattgacttctgtttctgtaaagcctcagcttggctgtactgaggattatttgctttccaaattaccatctgatggcaaagaagtaccatttgtggtgcccaagtttaagttatcttacattcaacccaggacacaagaaactccttcacatctggaagaacttgaaggatctgccagagcatcttttggagatcgaaaggtagaactttccagttcatcccagcacggacctagctatgatgtgtataacccattctatatgtatcagcacatttcacctgatttgagtcgacgctttcctccccgttcagaagtgacgagactgtatggatcggtttgtgatttaaggacgaacaaacttcccggttcccctgggctaagcaaatctatgtttgatcttacaaactcatctcagcgattcatccagagacatgattcattgtccagtgtacccagtagttcttcttcaaggaaaaattctcaggggagtaacagaagcctgggagatgaaagggactttgggagactgaatgtgaaattgttttataattcttcagtagaacagatctggatcacagttttacagtgcagagatttaagttggccctctagttatggagacactcctactgtttctataaaaggaatacttacattgcccaaaccagtgcatttcaaatcttcagccaaggaaggttccaacgctattgaatttatggaaacgtttgtatttgctattaaacttcaaaatctacaaactgtaagacttgtatttaagattcaaacccagactcccaggaagaaaaccattggagaatgctcaatgtcactcagaacccttagcacacaggaaatggattactctttggatataacaccaccttcaaaaatttctgtttgccatgcagaacttgaattggggacttgttttcaagcagtaaatagcagaattcagttacaaattcttgaggcacggtaccttccaagctcatcaacacctctgactttgagttttttcgtgaaggtgggaatgtttagctcgggagagttgatttataagaaaaagacacgcttactgaaggcctccaatggaagagtcaagtggggagagactatgatttttccacttatacagagtgaaaaagaaattgtttttctcattaagctttacagtcgaagctctgtaagaagaaaacactttgtgggccagatttggataagtgaagacagtaataacattgaagcagtgaaccagtggaaagagacagtaataaatccagaaaaggttgttatcaggtggcacaaattaaatccatcttgaagacttcacacattaatttggtgaagaacttgacattcttttagaagacttatgatttcaatttgctaccaatgagaagaggcaaatcaacaaatttgtcaatttatgggggctataattatggtatataatgtatctgatagaaaatttgataagaaaatgtaatgaattttatcagatatccaaagtaaaggaaatgttttaaaactgcaacaagagacacagacagtaaaatcaaagtattattaggatgactaaataaattataaagtctgtgagaatatcaaccatagatagttctttctatattatgtttttgcttttgtattttaagctttacttagatattcaaaacctggtatatcaagtctctgttagtactattggcatttagaagactttaccattatttcagtgctaggcattattgattaggtcttggctccactgtttacctcttgctatgtattttctcccggtaaaaatgaattgaaccatttcaactattttctatatttggagaaagtttgtgccctgtgttttataatttttttacccataagacatcacattatccctttgtaagctacttatctccaaaaaacttcagaaatagaaaactacattttggcaggaataattgaaaacaccagaaggttgaagtttaattggaaacccagaatatacatactttgctgttttcttccctcaaatattttactatttgttttatttggagttaaaataagagtatcatccatatggtccatcctaattcacagaattaaatgagcttaaatagaaaattcagtattttatgataatcacttcgtttttagtttttaaaatttagattattctataatttaccgtgtttgagtattttctcatttttttcataaccatacctgattatactgtgtaacaaatattttctattgcagttttctttccagtacttattagaactcagtatttggaaataatttcagcttaattgaccataagaactgtggccaaaaagaacagttttttggagaggcagatgacattatacctgattttagaaaatctcactttatttttgctaataagtagactaagtgctctgtgttctcagtcttccctttttttctgcccccattcttactttgtcccaggcatgcagagaaagatggtgatattttaggccaggagtataccttgctataacctaagcatgccttctttattccagctcctatgttctgtgtatatcattaacattttcccaaataaacacttaattctcttttccctaggtgccatctcctcaagctacaaaatgtccacatcttatatcccctttgcttctactgctctgattttgtggtaccagtactctctgccactgaacattttgaaatatttttgttttagatttgcaaaaaatgacatataggtcagtactcacatggatttttaagataaatcacctgtgtgataatattttgaatctgagacgaatacaacttttaaaaattgtttttaaaaatagacttttttttttagagcagttgtaggttaacagaaaaattgagaggaagatagagatttcctttctcccctgacaaagccctcaacagcctcccaggctatcagtatcctgcaccacaatggtacatttgttacaatcaatgaacctactctgaaacatcattatcatccaaagttcatggtttacattagagtcccctcttggtgttatacatgctagaggacaaatatatgatgatatgtatgcatcattataatatagtatagtttcgctgccctaaacatcctctgcaaatgcaactattttaatgggtaccaaagaagtaaatgtatttactggcttttagataataaataacgggctttattgtttattttaaaagctacaatttgttttagctggtttctctgttctattaatgctttgaatttccaaatttaatatatgtagtcatgcatttaacttaatatttaattatttgatttatttaattttctatattcttacaatgtatgtatgatgtataatttaagggaaagctatgacttctcagtttcttagaatcctaggtaaataaaacaataaaaagaaaacccttacatttaaaagagctttcaggtacagaagtattgatacaactaagatcctaaatgttttaattagtgtttacttaagcctttttcaggtgaggaggtactaatgctggttatttccttgaagctttatgtggacctataaataaaaatccaatctcctgctaataggtatgcatattgtgagaaaaacgttaggagctggtagtaaaaaatgagattctatgccaaaataacttctcttcatatttgcctaggcatttcttgacctttacccacttacgcaaggagaaggaaatcataatgatgtcatgtgatcaaaggaaaccatggaagggttcacgctgatagctgatagcttttacagtgctcattcctaacagtggatttacttgtaagctttcagatcaacacaaatagctgcagcctgggttaaaatataacatcactatttggcttttgttttgcatgatttttaaaagcagtactcctagggaaatggcctctgaagtatatcagtttcatctcttaccaagactgttaagaagaaactagtgggattttgaacaagttatataattgtggtctgaaaagaccctaaactgaagttctgtttaaatatagttacatgaatttctctgatactaatgtactcaacagccaggtataaactatatctcctagtaacattttccatttttgtttaatcaaatacttgcttatgaaggatttcagaaatttgtaataaatgtcagcttttgatagcatagcagtaattgacatttcaaaaatatatatttctttctgtgtttggttgggtgtaatgaggaaaatacctgataaaatgtctgaagacactttctaatgttatcttggtgcataagctgtaatttttattcaaaattaaatttcaaatgtttgcagttttggctaaaacattgagttgaaagaattatgaaaagtgggcccatatgaagtaccatgttcattttgaaatatagatttaagatttagaaatatattaaaagagttaatggagcctcctaaattggattttattttgtgggtgaagaattgtaggaagatgaatgtggcctacagttttagtaatctcctagtggagttttttttaacttagtacttttttatttttaagttttttaatctataaaaaatgtgatttctataaaccatgattacaataaataattatattaaac

SEQ ID NO: 445739 - DNA, 4001 bp, Homo sapiens
ctatgtatacattcacatgtagtatttaagttacataagtgatgggtactatgaaattactattgatcaagaatgactattagattttaattaagattacactttatttcttgtaaaaggtgatttaaaatgcacattccttaccaatctaatttgaatcatgattagcctcagtttaattatccttacaaaaatatttttgagtggttgggatcagttttaagttgagctcctagatttgttgaataggaaaggatactaataactgttctaggggaaatgattttgtaatatttcaccttgaatttttgaactgaaccttataaactagtcttcagaatgactaagcaggttaaatgttttagcatttaaatgtcaaatagagaaatcaatctgacttttggaaaaaagaaagatgtttaatttaaaatatgtaaagcaaacttccaaatttcttccatcagtaagagtaactaactgtctgaatgtagttattattattgtgtcaagttaaatgattgtacatactttcctttacagatttggataagtgaagacagtaataacattgaagcagtgaaccagtggaaagagacagtaataaatccagaaaaggttgttatcaggtggcacaaattaaatccatcttgaagacttcacacattaatttggtgaagaacttgacattcttttagaagacttatgatttcaatttgctaccaatgagaagaggcaaatcaacaaatttgtcaatttatgggggctataattatggtatataatgtatctgatagaaaatttgataagaaaatgtaatgaattttatcagatatccaaagtaaaggaaatgttttaaaactgcaacaagagacacagacagtaaaatcaaagtattattaggatgactaaataaattataaagtctgtgagaatatcaaccatagatagttctttctatattatgtttttgcttttgtattttaagctttacttagatattcaaaacctggtatatcaagtctctgttagtactattggcatttagaagactttaccattatttcagtgctaggcattattgattaggtcttggctccactgtttacctcttgctatgtattttctcccggtaaaaatgaattgaaccatttcaactattttctatatttggagaaagtttgtgccctgtgttttataatttttttacccataagacatcacattatccctttgtaagctacttatctccaaaaaacttcagaaatagaaaactacattttggcaggaataattgaaaacaccagaaggttgaagtttaattggaaacccagaatatacatactttgctgttttcttccctcaaatattttactatttgttttatttggagttaaaataagagtatcatccatatggtccatcctaattcacagaattaaatgagcttaaatagaaaattcagtattttatgataatcacttcgtttttagtttttaaaatttagattattctataatttaccgtgtttgagtattttctcatttttttcataaccatacctgattatactgtgtaacaaatattttctattgcagttttctttccagtacttattagaactcagtatttggaaataatttcagcttaattgaccataagaactgtggccaaaaagaacagttttttggagaggcagatgacattatacctgattttagaaaatctcactttatttttgctaataagtagactaagtgctctgtgttctcagtcttccctttttttctgcccccattcttactttgtcccaggcatgcagagaaagatggtgatattttaggccaggagtataccttgctataacctaagcatgccttctttattccagctcctatgttctgtgtatatcattaacattttcccaaataaacacttaattctcttttccctaggtgccatctcctcaagctacaaaatgtccacatcttatatcccctttgcttctactgctctgattttgtggtaccagtactctctgccactgaacattttgaaatatttttgttttagatttgcaaaaaatgacatataggtcagtactcacatggatttttaagataaatcacctgtgtgataatattttgaatctgagacgaatacaacttttaaaaattgtttttaaaaatagacttttttttttagagcagttgtaggttaacagaaaaattgagaggaagatagagatttcctttctcccctgacaaagccctcaacagcctcccaggctatcagtatcctgcaccacaatggtacatttgttacaatcaatgaacctactctgaaacatcattatcatccaaagttcatggtttacattagagtcccctcttggtgttatacatgctagaggacaaatatatgatgatatgtatgcatcattataatatagtatagtttcgctgccctaaacatcctctgcaaatgcaactattttaatgggtaccaaagaagtaaatgtatttactggcttttagataataaataacgggctttattgtttattttaaaagctacaatttgttttagctggtttctctgttctattaatgctttgaatttccaaatttaatatatgtagtcatgcatttaacttaatatttaattatttgatttatttaattttctatattcttacaatgtatgtatgatgtataatttaagggaaagctatgacttctcagtttcttagaatcctaggtaaataaaacaataaaaagaaaacccttacatttaaaagagctttcaggtacagaagtattgatacaactaagatcctaaatgttttaattagtgtttacttaagcctttttcaggtgaggaggtactaatgctggttatttccttgaagctttatgtggacctataaataaaaatccaatctcctgctaataggtatgcatattgtgagaaaaacgttaggagctggtagtaaaaaatgagattctatgccaaaataacttctcttcatatttgcctaggcatttcttgacctttacccacttacgcaaggagaaggaaatcataatgatgtcatgtgatcaaaggaaaccatggaagggttcacgctgatagctgatagcttttacagtgctcattcctaacagtggatttacttgtaagctttcagatcaacacaaatagctgcagcctgggttaaaatataacatcactatttggcttttgttttgcatgatttttaaaagcagtactcctagggaaatggcctctgaagtatatcagtttcatctcttaccaagactgttaagaagaaactagtgggattttgaacaagttatataattgtggtctgaaaagaccctaaactgaagttctgtttaaatatagttacatgaatttctctgatactaatgtactcaacagccaggtataaactatatctcctagtaacattttccatttttgtttaatcaaatacttgcttatgaaggatttcagaaatttgtaataaatgtcagcttttgatagcatagcagtaattgacatttcaaaaatatatatttctttctgtgtttggttgggtgtaatgaggaaaatacctgataaaatgtctgaagacactttctaatgttatcttggtgcataagctgtaatttttattcaaaattaaatttcaaatgtttgcagttttggctaaaacattgagttgaaagaattatgaaaagtgggcccatatgaagtaccatgttcattttgaaatatagatttaagatttagaaatatattaaaagagttaatggagcctcctaaattggattttattttgtgggtgaagaattgtaggaagatgaatgtggcctacagttttagtaatctcctagtggagttttttttaacttagtacttttttatttttaagttttttaatctataaaaaatgtgatttctataaaccatgattacaataaataattatattaaac

SEQ ID NO: 445740 - DNA, 4633 bp, Homo sapiens
ggtggtgtgggagtgggtacggggagggaagtggaggggagggggtaagtgatagggtaggggaggccctgggaaaggcaggacctcgaggcgcggccgcgcgaggtgaccggagtcacagttcccgcaggcggcgacagcagagcgcccactgcctccagcagattaatattaagattggaagtttgtgtcttttgctggatattggaaattgaatgtaatggcaacagaatttataaagagttgctgtggaggatgtttctatggtgaaacagaaaaacacaacttttctgtggaaagagattttaaagcagcagtcccaaatagtcaaaatgctactatctctgtacctccattgacttctgtttctgtaaagcctcagcttggctgtactgaggattatttgctttccaaattaccatctgatggcaaagaagtaccatttgtggtgcccaagtttaagttatcttacattcaacccaggacacaagaaactccttcacatctggaagaacttgaaggatctgccagagcatcttttggagatcgaaaggtagaactttccagttcatcccagcacggacctagctatgatgtgtataacccattctatatgtatcagcacatttcacctgatttgagtcgacgctttcctccccgttcagaagtgacgagactgtatggatcggtttgtgatttaaggacgaacaaacttcccggttcccctgggctaagcaaatctatgtttgatcttacaaactcatctcagcgattcatccagagacatgattcattgtccagtgtacccagtagttcttcttcaaggaaaaattctcaggggagtaacagaagcctggatacaattactctatcaggagatgaaagggactttgggagactgaatgtgaaattgttttataattcttcagtagaacagatctggatcacagttttacagtgcagagatttaagttggccctctagttatggagacactcctactgtttctataaaaggaatacttacattgcccaaaccagtgcatttcaaatcttcagccaaggaaggttccaacgctattgaatttatggaaacgtttgtatttgctattaaacttcaaaatctacaaactgtaagacttgtatttaagattcaaacccagactcccaggaagaaaaccattggagaatgctcaatgtcactcagaacccttagcacacaggaaatggattactctttggatataacaccaccttcaaaaatttctgtttgccatgcagaacttgaattggggacttgttttcaagcagtaaatagcagaattcagttacaaattcttgaggcacggtaccttccaagctcatcaacacctctgactttgagttttttcgtgaaggtgggaatgtttagctcgggagagttgatttataagaaaaagacacgcttactgaaggcctccaatggaagagtcaagtggggagagactatgatttttccacttatacagagtgaaaaagaaattgtttttctcattaagctttacagtcgaagctctgtaagaagaaaacactttgtgggccagatttggataagtgaagacagtaataacattgaagcagtgaaccagtggaaagagacagtaataaatccagaaaaggttgttatcaggtggcacaaattaaatccatcttgaagacttcacacattaatttggtgaagaacttgacattcttttagaagacttatgatttcaatttgctaccaatgagaagaggcaaatcaacaaatttgtcaatttatgggggctataattatggtatataatgtatctgatagaaaatttgataagaaaatgtaatgaattttatcagatatccaaagtaaaggaaatgttttaaaactgcaacaagagacacagacagtaaaatcaaagtattattaggatgactaaataaattataaagtctgtgagaatatcaaccatagatagttctttctatattatgtttttgcttttgtattttaagctttacttagatattcaaaacctggtatatcaagtctctgttagtactattggcatttagaagactttaccattatttcagtgctaggcattattgattaggtcttggctccactgtttacctcttgctatgtattttctcccggtaaaaatgaattgaaccatttcaactattttctatatttggagaaagtttgtgccctgtgttttataatttttttacccataagacatcacattatccctttgtaagctacttatctccaaaaaacttcagaaatagaaaactacattttggcaggaataattgaaaacaccagaaggttgaagtttaattggaaacccagaatatacatactttgctgttttcttccctcaaatattttactatttgttttatttggagttaaaataagagtatcatccatatggtccatcctaattcacagaattaaatgagcttaaatagaaaattcagtattttatgataatcacttcgtttttagtttttaaaatttagattattctataatttaccgtgtttgagtattttctcatttttttcataaccatacctgattatactgtgtaacaaatattttctattgcagttttctttccagtacttattagaactcagtatttggaaataatttcagcttaattgaccataagaactgtggccaaaaagaacagttttttggagaggcagatgacattatacctgattttagaaaatctcactttatttttgctaataagtagactaagtgctctgtgttctcagtcttccctttttttctgcccccattcttactttgtcccaggcatgcagagaaagatggtgatattttaggccaggagtataccttgctataacctaagcatgccttctttattccagctcctatgttctgtgtatatcattaacattttcccaaataaacacttaattctcttttccctaggtgccatctcctcaagctacaaaatgtccacatcttatatcccctttgcttctactgctctgattttgtggtaccagtactctctgccactgaacattttgaaatatttttgttttagatttgcaaaaaatgacatataggtcagtactcacatggatttttaagataaatcacctgtgtgataatattttgaatctgagacgaatacaacttttaaaaattgtttttaaaaatagacttttttttttagagcagttgtaggttaacagaaaaattgagaggaagatagagatttcctttctcccctgacaaagccctcaacagcctcccaggctatcagtatcctgcaccacaatggtacatttgttacaatcaatgaacctactctgaaacatcattatcatccaaagttcatggtttacattagagtcccctcttggtgttatacatgctagaggacaaatatatgatgatatgtatgcatcattataatatagtatagtttcgctgccctaaacatcctctgcaaatgcaactattttaatgggtaccaaagaagtaaatgtatttactggcttttagataataaataacgggctttattgtttattttaaaagctacaatttgttttagctggtttctctgttctattaatgctttgaatttccaaatttaatatatgtagtcatgcatttaacttaatatttaattatttgatttatttaattttctatattcttacaatgtatgtatgatgtataatttaagggaaagctatgacttctcagtttcttagaatcctaggtaaataaaacaataaaaagaaaacccttacatttaaaagagctttcaggtacagaagtattgatacaactaagatcctaaatgttttaattagtgtttacttaagcctttttcaggtgaggaggtactaatgctggttatttccttgaagctttatgtggacctataaataaaaatccaatctcctgctaataggtatgcatattgtgagaaaaacgttaggagctggtagtaaaaaatgagattctatgccaaaataacttctcttcatatttgcctaggcatttcttgacctttacccacttacgcaaggagaaggaaatcataatgatgtcatgtgatcaaaggaaaccatggaagggttcacgctgatagctgatagcttttacagtgctcattcctaacagtggatttacttatggaatcgccacttatatatgtttcagttttgcttttgaacatatttgaattttcatcaggaatagtatataataaagatgatacagagaaacgctttgcatgttctaacaaagggttccctcaagagaatgaaataatcaagttgtatcttttcttagaaaacttgaaaatccagtgtttcttccaaactgaaaatgaaattgcatcaaaagcaatgctaagtgtgttcacatcaggaggacttgctcccagcttgggaatcatgaatagtacatataatggcatcttccactttaatttaacgttgttcagtgatcggattttgtggttggttgatattcctagagaaaacatcacacaaagcacagatattgcagctgtagaagaatggttagttagaatcactttacatca

SEQ ID NO: 445741 - DNA, 831 bp, Homo sapiens
gcggccgcgcggcgccggcccagcgcgggcgtgggacgtggagacccggaggagggcggcgggacccgggcggggaaaggcgcggcgtggcttggctcaggtgcgcttctcccacctggcagctcgctcagggctgtggggggcgcctgtgagggcggccccgccttgcgggctggagattaatattaagattggaagtttgtgtcttttgctggatattggaaattgaatgtaatggcaacagaatttataaagagttgctgtggaggatgtttctatggtgaaacagaaaaacacaacttttctgtggaaagagattttaaagcagcagtcccaaatagtcaaaatgctactatctctgtacctccattgacttctgtttctgtaaagcctcagcttggctgtactgaggattatttgctttccaaattaccatctgatggcaaagaagtaccatttgtggtgcccaagtttaagttatcttacattcaacccaggacacaagaaactccttcacatctggaagaacttgaaggtaaacaataaaatagcagtatttaaaaatcgatatgtagcatttaagtgctattattttacttttatatttttaatacaaaattcatataaaatttttttattttactttttatattttgctctttctgtagaagaacttaatgtacagtagttttgaaaggtcccattttgaaatctgatcataatacaataatttgtatgtagaattggccttttttcaagaaataatatgtaattggccctccatatctttgggttccacatctgtggatttaaccaactgcacctcaaaaa

SEQ ID NO: 445742 - DNA, 284 bp, Homo sapiens
gtatcagcacatttcacctgatttgagtcgacgctttcctccccgttcagaagtgacgagactgtatggatcgggtatgaagatcttttgtgcttttcctctctgtgtttctctttaagaaatttagaaatcaaatgtaagatatgggaataaatgatttttactattaaaagcattttaaaaataagaaaacaagcttcataaatgtgataaacgttatgacatctctgtagtattatatctaatataagaattgaaagattaatgagttatatctgttggta

SEQ ID NO: 445743 - DNA, 577 bp, Homo sapiens
agctgctgattggctgttaccaaaggtgactagagtgctaagccagtcaacagggaaaacttggctcctgactttgggtctttcttctcagtctatatggaagaaaactgagaaaaaatataaaaaagaagaacacaactagttgcgcatctcctaaagagatggaatcgccacttatatatgtttcagttttgcttttgaacatatttgaattttcatcaggaatagtatataataaagatgatacagagaaacgctttgcatgttctaacaaagggttccctcaagagaatgaaataatcaagttgtatcttttcttagaaaacttgaaaatccagtgtttcttccaaactgaaaatgaaattgcatcaaaagcaatgctaagtgtgttcacatcaggaggacttgctcccagcttgggaatcatgaatagtacatataatggcatcttccactttaatttaacgttgttcagtgatcggattttgtggttggttgatattcctagagaaaacatcacacaaagcacagatattgcagctgtagaagaatggttagttagaatcactttacatca

SEQ ID NO: 445744 - DNA, 5057 bp, Homo sapiens
gcggccgcgcggcgccggcccagcgcgggcgtgggacgtggagacccggaggagggcggcgggacccgggcggggaaaggcgcggcgtggcttggctcaggtgcgcttctcccacctggcagctcgctcagggctgtggggggcgcctgtgagggcggccccgccttgcgggctggagattaatattaagattggaagtttgtgtcttttgctggatattggaaattgaatgtaatggcaacagaatttataaagagttgctgtggaggatgtttctatggtgaaacagaaaaacacaacttttctgtggaaagagattttaaagcagcagtcccaaatagtcaaaatgctactatctctgtacctccattgacttctgtttctgtaaagcctcagcttggctgtactgaggattatttgctttccaaattaccatctgatggcaaagaagtaccatttgtggtgcccaagtttaagttatcttacattcaacccaggacacaagaaactccttcacatctggaagaacttgaaggatctgccagagcatcttttggagatcgaaaggtagaactttccagttcatcccagcacggacctagctatgatgtgtataacccattctatatgtatcagcacatttcacctgatttgagtcgacgctttcctccccgttcagaagtgacgagactgtatggatcggtttgtgatttaaggacgaacaaacttcccggttcccctgggctaagcaaatctatgtttgatcttacaaactcatctcagcgattcatccagagacatgattcattgtccagtgtacccagtagttcttcttcaaggaaaaattctcaggggagtaacagaagcctggatacaattactctatcaggagatgaaagggactttgggagactgaatgtgaaattgttttataattcttcagtagaacagatctggatcacagttttacagtgcagagatttaagttggccctctagttatggagacactcctactgtttctataaaaggaatacttacattgcccaaaccagtgcatttcaaatcttcagccaaggaaggttccaacgctattgaatttatggaaacgtttgtatttgctattaaacttcaaaatctacaaactgtaagacttgtatttaagattcaaacccagactcccaggaagaaaaccattggagaatgctcaatgtcactcagaacccttagcacacaggaaatggattactctttggatataacaccaccttcaaaaatttctgtttgccatgcagaacttgaattggggacttgttttcaagcagtaaatagcagaattcagttacaaattcttgaggcacggtaccttccaagctcatcaacacctctgactttgagttttttcgtgaaggtgggaatgtttagctcgggagagttgatttataagaaaaagacacgcttactgaaggcctccaatggaagagtcaagtggggagagactatgatttttccacttatacagagtgaaaaagaaattgtttttctcattaagctttacagtcgaagctctgtaagaagaaaacactttgtgggccagatttggataagtgaagacagtaataacattgaagcagtgaaccagtggaaagagacagtaataaatccagaaaaggttgttatcaggtggcacaaattaaatccatcttgaagacttcacacattaatttggtgaagaacttgacattcttttagaagacttatgatttcaatttgctaccaatgagaagaggcaaatcaacaaatttgtcaatttatgggggctataattatggtatataatgtatctgatagaaaatttgataagaaaatgtaatgaattttatcagatatccaaagtaaaggaaatgttttaaaactgcaacaagagacacagacagtaaaatcaaagtattattaggatgactaaataaattataaagtctgtgagaatatcaaccatagatagttctttctatattatgtttttgcttttgtattttaagctttacttagatattcaaaacctggtatatcaagtctctgttagtactattggcatttagaagactttaccattatttcagtgctaggcattattgattaggtcttggctccactgtttacctcttgctatgtattttctcccggtaaaaatgaattgaaccatttcaactattttctatatttggagaaagtttgtgccctgtgttttataatttttttacccataagacatcacattatccctttgtaagctacttatctccaaaaaacttcagaaatagaaaactacattttggcaggaataattgaaaacaccagaaggttgaagtttaattggaaacccagaatatacatactttgctgttttcttccctcaaatattttactatttgttttatttggagttaaaataagagtatcatccatatggtccatcctaattcacagaattaaatgagcttaaatagaaaattcagtattttatgataatcacttcgtttttagtttttaaaatttagattattctataatttaccgtgtttgagtattttctcatttttttcataaccatacctgattatactgtgtaacaaatattttctattgcagttttctttccagtacttattagaactcagtatttggaaataatttcagcttaattgaccataagaactgtggccaaaaagaacagttttttggagaggcagatgacattatacctgattttagaaaatctcactttatttttgctaataagtagactaagtgctctgtgttctcagtcttccctttttttctgcccccattcttactttgtcccaggcatgcagagaaagatggtgatattttaggccaggagtataccttgctataacctaagcatgccttctttattccagctcctatgttctgtgtatatcattaacattttcccaaataaacacttaattctcttttccctaggtgccatctcctcaagctacaaaatgtccacatcttatatcccctttgcttctactgctctgattttgtggtaccagtactctctgccactgaacattttgaaatatttttgttttagatttgcaaaaaatgacatataggtcagtactcacatggatttttaagataaatcacctgtgtgataatattttgaatctgagacgaatacaacttttaaaaattgtttttaaaaatagacttttttttttagagcagttgtaggttaacagaaaaattgagaggaagatagagatttcctttctcccctgacaaagccctcaacagcctcccaggctatcagtatcctgcaccacaatggtacatttgttacaatcaatgaacctactctgaaacatcattatcatccaaagttcatggtttacattagagtcccctcttggtgttatacatgctagaggacaaatatatgatgatatgtatgcatcattataatatagtatagtttcgctgccctaaacatcctctgcaaatgcaactattttaatgggtaccaaagaagtaaatgtatttactggcttttagataataaataacgggctttattgtttattttaaaagctacaatttgttttagctggtttctctgttctattaatgctttgaatttccaaatttaatatatgtagtcatgcatttaacttaatatttaattatttgatttatttaattttctatattcttacaatgtatgtatgatgtataatttaagggaaagctatgacttctcagtttcttagaatcctaggtaaataaaacaataaaaagaaaacccttacatttaaaagagctttcaggtacagaagtattgatacaactaagatcctaaatgttttaattagtgtttacttaagcctttttcaggtgaggaggtactaatgctggttatttccttgaagctttatgtggacctataaataaaaatccaatctcctgctaataggtatgcatattgtgagaaaaacgttaggagctggtagtaaaaaatgagattctatgccaaaataacttctcttcatatttgcctaggcatttcttgacctttacccacttacgcaaggagaaggaaatcataatgatgtcatgtgatcaaaggaaaccatggaagggttcacgctgatagctgatagcttttacagtgctcattcctaacagtggatttacttgtaagctttcagatcaacacaaatagctgcagcctgggttaaaatataacatcactatttggcttttgttttgcatgatttttaaaagcagtactcctagggaaatggcctctgaagtatatcagtttcatctcttaccaagactgttaagaagaaactagtgggattttgaacaagttatataattgtggtctgaaaagaccctaaactgaagttctgtttaaatatagttacatgaatttctctgatactaatgtactcaacagccaggtataaactatatctcctagtaacattttccatttttgtttaatcaaatacttgcttatgaaggatttcagaaatttgtaataaatgtcagcttttgatagcatagcagtaattgacatttcaaaaatatatatttctttctgtgtttggttgggtgtaatgaggaaaatacctgataaaatgtctgaagacactttctaatgttatcttggtgcataagctgtaatttttattcaaaattaaatttcaaatgtttgcagttttggctaaaacattgagttgaaagaattatgaaaagtgggcccatatgaagtaccatgttcattttgaaatatagatttaagatttagaaatatattaaaagagttaatggagcctcctaaattggattttattttgtgggtgaagaattgtaggaagatgaatgtggcctacagttttagtaatctcctagtggagttttttttaacttagtacttttttatttttaagttttttaatctataaaaaatgtgatttctataaaccatgattacaataaataattatattaaac

SEQ ID NO: 445745 - DNA, 4182 bp, Homo sapiens
cctagttttagaagtttcaatagcacctagtttagaagtttcaatagtcctagttttagaagtttcaatagcacagatctggatcacagttttacagtgcagagatttaagttggccctctagttatggagacactcctactgtttctataaaaggaatacttacattgcccaaaccagtgcatttcaaatcttcagccaaggaaggttccaacgctattgaatttatggaaacgtttgtatttgctattaaacttcaaaatctacaaactgtaagacttgtatttaagattcaaacccagactcccaggaagaaaaccattggagaatgctcaatgtcactcagaacccttagcacacaggaaatggattactctttggatataacaccaccttcaaaaatttctgtttgccatgcagaacttgaattggggacttgttttcaagcagtaaatagcagaattcagttacaaattcttgaggcacggtaccttccaagctcatcaacacctctgactttgagttttttcgtgaaggtgggaatgtttagctcgggagagttgatttataagaaaaagacacgcttactgaaggcctccaatggaagagtcaagtggggagagactatgatttttccacttatacagagtgaaaaagaaattgtttttctcattaagctttacagtcgaagctctgtaagaagaaaacactttgtgggccagatttggataagtgaagacagtaataacattgaagcagtgaaccagtggaaagagacagtaataaatccagaaaaggttgttatcaggtggcacaaattaaatccatcttgaagacttcacacattaatttggtgaagaacttgacattcttttagaagacttatgatttcaatttgctaccaatgagaagaggcaaatcaacaaatttgtcaatttatgggggctataattatggtatataatgtatctgatagaaaatttgataagaaaatgtaatgaattttatcagatatccaaagtaaaggaaatgttttaaaactgcaacaagagacacagacagtaaaatcaaagtattattaggatgactaaataaattataaagtctgtgagaatatcaaccatagatagttctttctatattatgtttttgcttttgtattttaagctttacttagatattcaaaacctggtatatcaagtctctgttagtactattggcatttagaagactttaccattatttcagtgctaggcattattgattaggtcttggctccactgtttacctcttgctatgtattttctcccggtaaaaatgaattgaaccatttcaactattttctatatttggagaaagtttgtgccctgtgttttataatttttttacccataagacatcacattatccctttgtaagctacttatctccaaaaaacttcagaaatagaaaactacattttggcaggaataattgaaaacaccagaaggttgaagtttaattggaaacccagaatatacatactttgctgttttcttccctcaaatattttactatttgttttatttggagttaaaataagagtatcatccatatggtccatcctaattcacagaattaaatgagcttaaatagaaaattcagtattttatgataatcacttcgtttttagtttttaaaatttagattattctataatttaccgtgtttgagtattttctcatttttttcataaccatacctgattatactgtgtaacaaatattttctattgcagttttctttccagtacttattagaactcagtatttggaaataatttcagcttaattgaccataagaactgtggccaaaaagaacagttttttggagaggcagatgacattatacctgattttagaaaatctcactttatttttgctaataagtagactaagtgctctgtgttctcagtcttccctttttttctgcccccattcttactttgtcccaggcatgcagagaaagatggtgatattttaggccaggagtataccttgctataacctaagcatgccttctttattccagctcctatgttctgtgtatatcattaacattttcccaaataaacacttaattctcttttccctaggtgccatctcctcaagctacaaaatgtccacatcttatatcccctttgcttctactgctctgattttgtggtaccagtactctctgccactgaacattttgaaatatttttgttttagatttgcaaaaaatgacatataggtcagtactcacatggatttttaagataaatcacctgtgtgataatattttgaatctgagacgaatacaacttttaaaaattgtttttaaaaatagacttttttttttagagcagttgtaggttaacagaaaaattgagaggaagatagagatttcctttctcccctgacaaagccctcaacagcctcccaggctatcagtatcctgcaccacaatggtacatttgttacaatcaatgaacctactctgaaacatcattatcatccaaagttcatggtttacattagagtcccctcttggtgttatacatgctagaggacaaatatatgatgatatgtatgcatcattataatatagtatagtttcgctgccctaaacatcctctgcaaatgcaactattttaatgggtaccaaagaagtaaatgtatttactggcttttagataataaataacgggctttattgtttattttaaaagctacaatttgttttagctggtttctctgttctattaatgctttgaatttccaaatttaatatatgtagtcatgcatttaacttaatatttaattatttgatttatttaattttctatattcttacaatgtatgtatgatgtataatttaagggaaagctatgacttctcagtttcttagaatcctaggtaaataaaacaataaaaagaaaacccttacatttaaaagagctttcaggtacagaagtattgatacaactaagatcctaaatgttttaattagtgtttacttaagcctttttcaggtgaggaggtactaatgctggttatttccttgaagctttatgtggacctataaataaaaatccaatctcctgctaataggtatgcatattgtgagaaaaacgttaggagctggtagtaaaaaatgagattctatgccaaaataacttctcttcatatttgcctaggcatttcttgacctttacccacttacgcaaggagaaggaaatcataatgatgtcatgtgatcaaaggaaaccatggaagggttcacgctgatagctgatagcttttacagtgctcattcctaacagtggatttacttgtaagctttcagatcaacacaaatagctgcagcctgggttaaaatataacatcactatttggcttttgttttgcatgatttttaaaagcagtactcctagggaaatggcctctgaagtatatcagtttcatctcttaccaagactgttaagaagaaactagtgggattttgaacaagttatataattgtggtctgaaaagaccctaaactgaagttctgtttaaatatagttacatgaatttctctgatactaatgtactcaacagccaggtataaactatatctcctagtaacattttccatttttgtttaatcaaatacttgcttatgaaggatttcagaaatttgtaataaatgtcagcttttgatagcatagcagtaattgacatttcaaaaatatatatttctttctgtgtttggttgggtgtaatgaggaaaatacctgataaaatgtctgaagacactttctaatgttatcttggtgcataagctgtaatttttattcaaaattaaatttcaaatgtttgcagttttggctaaaacattgagttgaaagaattatgaaaagtgggcccatatgaagtaccatgttcattttgaaatatagatttaagatttagaaatatattaaaagagttaatggagcctcctaaattggattttattttgtgggtgaagaattgtaggaagatgaatgtggcctacagttttagtaatctcctagtggagttttttttaacttagtacttttttatttttaagttttttaatctataaaaaatgtgatttctataaaccatgattacaataaataattatattaaac

SEQ ID NO: 445746 - DNA, 2121 bp, Homo sapiens
ggtggtgtgggagtgggtacggggagggaagtggaggggagggggtaagtgatagggtaggggaggccctgggaaaggcaggacctcgaggcgcggccgcgcgaggtgaccggagtcacagttcccgcaggcggcgacagcagagcgcccactgcctccagcagattaatattaagattggaagtttgtgtcttttgctggatattggaaattgaatgtaatggcaacagaatttataaagagttgctgtggaggatgtttctatggtgaaacagaaaaacacaacttttctgtggaaagagattttaaagcagcagtcccaaatagtcaaaatgctactatctctgtacctccattgacttctgtttctgtaaagcctcagcttggctgtactgaggattatttgctttccaaattaccatcacaatggtacatttgttacaatcaatgaacctactctgaaacatcattatcatccaaagttcatggtttacattagagtcccctcttggtgttatacatgctagaggacaaatatatgatgatatgtatgcatcattataatatagtatagtttcgctgccctaaacatcctctgcaaatgcaactattttaatgggtaccaaagaagtaaatgtatttactggcttttagataataaataacgggctttattgtttattttaaaagctacaatttgttttagctggtttctctgttctattaatgctttgaatttccaaatttaatatatgtagtcatgcatttaacttaatatttaattatttgatttatttaattttctatattcttacaatgtatgtatgatgtataatttaagggaaagctatgacttctcagtttcttagaatcctaggtaaataaaacaataaaaagaaaacccttacatttaaaagagctttcaggtacagaagtattgatacaactaagatcctaaatgttttaattagtgtttacttaagcctttttcaggtgaggaggtactaatgctggttatttccttgaagctttatgtggacctataaataaaaatccaatctcctgctaataggtatgcatattgtgagaaaaacgttaggagctggtagtaaaaaatgagattctatgccaaaataacttctcttcatatttgcctaggcatttcttgacctttacccacttacgcaaggagaaggaaatcataatgatgtcatgtgatcaaaggaaaccatggaagggttcacgctgatagctgatagcttttacagtgctcattcctaacagtggatttacttgtaagctttcagatcaacacaaatagctgcagcctgggttaaaatataacatcactatttggcttttgttttgcatgatttttaaaagcagtactcctagggaaatggcctctgaagtatatcagtttcatctcttaccaagactgttaagaagaaactagtgggattttgaacaagttatataattgtggtctgaaaagaccctaaactgaagttctgtttaaatatagttacatgaatttctctgatactaatgtactcaacagccaggtataaactatatctcctagtaacattttccatttttgtttaatcaaatacttgcttatgaaggatttcagaaatttgtaataaatgtcagcttttgatagcatagcagtaattgacatttcaaaaatatatatttctttctgtgtttggttgggtgtaatgaggaaaatacctgataaaatgtctgaagacactttctaatgttatcttggtgcataagctgtaatttttattcaaaattaaatttcaaatgtttgcagttttggctaaaacattgagttgaaagaattatgaaaagtgggcccatatgaagtaccatgttcattttgaaatatagatttaagatttagaaatatattaaaagagttaatggagcctcctaaattggattttattttgtgggtgaagaattgtaggaagatgaatgtggcctacagttttagtaatctcctagtggagttttttttaacttagtacttttttatttttaagttttttaatctataaaaaatgtgatttctataaaccatgattacaataaataattatattaaac

SEQ ID NO: 445747 - DNA, 6001 bp, Homo sapiens
gtaaaagtgatggttgactcaggagaccggaagcgagccatcagttctgtgtgcacctacattgtttatcagtgtagtcggccagctcctttacactccagggatctgcactccatgatagtggcagcttttcagtgtctctgtgtctggctgacagagcaccctgatatgcttgatgaaaaggactgccttaaggaagtactggagattgtggaactgggtatctcaggaagtaagtccaagaacaatgagcaagaggtcaagtacaaaggagataaggagccaaaccctgcatctatgagggtaaaggatgctgctgaagccaccctaacatgcattatgcagttgctcggcgcatttccttcacctagtggtcctgcctctccttgtagtcttgtgaatgagaccactttgattaaatactccaggctgccaaccataaacaagcatagtttccggtactttgtcttggataacagtgtcatcctggcaatgctggaacaacctcttggaaatgagcagaatgattttttcccctctgtcactgtgctggtccggggaatgtctggaagacttgcttgggcacaacagctttgtcttttacccagaggagcaaaagcaaatcagaagctttttgtacctgaacctcgcccagttcctaaaaatgacgttggatttaaatattctgtgaaacatcggccatttcctgaagaggtggacaagattccttttgtgaaagcagatctcagcattccagatttgcatgaaatagtcactgaagaatttagaagagagacacgaaaaattaaggagtggcatggcccagcagattgcttatgaaatacaccttgagcaacagagtgaggaggaattgcagaagagaagttttcctgacccagttacggattgcaagcccccgcctcctgcccaggaattccaaacagcccgcctttttctctcacactttggatttttgtccttagaagcactgaaggaacctgcaaatagtcgtctacctcctcaccttattgcacttgattccacgatacctggattttttgatgacattgggtatctggatctcttgccatgtcgtccttttgacacagtttttattttctatatgaagccaggtcagaaaacgaaccaagagattttaaagaatgtggagtcttccagaactgttcagccacatttcctagaatttttgctttcccttggctggtcagtagatgtgggcagacaccctggttggactgggcatgtttctaccagttggtctattaattgttgtgatgatggtgaaggatctcaacaagaagtgatttcctctgaagatattggagctagcattttcaatggacagaagaaggtgctgtattatgctgatgcccttacagaaattgcttttgtggttccttctcctgtggagtccttaactgattcattggaaagtaacatctcggaccaagatagtgattcaaatatggatcttatgccaggaattctgaaacagccatccctgacacttgagcttttccccaatcatacagacaatcttaattcctcacagaggctcagtcccagttccagaatgaggaagctgcctcagggtcgccctgttcctccccttggacctgagacaagagtttctgtagtctgggtggaacgctatgatgatatagaaaactttcccctctcagagctgatgacagagatcagtactggtgtggaaactactgcaaatagtagcacttcactgagatctacaactcttgaaaaagaagttcctgtcatcttcatccaccctttaaacactggattattccggataaaaattcaaggagccactggaaaatttaatatggtcatccctcttgtggatgggatgattgtcagcaggcgagctcttggctttctggtgaggcagactgtaattaacatttgtagaagaaagagactggaaagtgactcctacagtcccccccatgtccgccggaaacagaaaatcaccgacattgtcaacaagtaccggaacaagcagctggagccagagttttatacttcacttttccaggaggttggactcaagaactgcagttcttagaccactgaatttctaagactgttgaactccagtttgggaactataacacagcagaacagtttgataggtgatcactgtaaaaataaaaacaaatcactcccaagagcttactgtttaatcaccagaatagaagaaacacattataacccatttgatagaagactttgggctatctagtgaaatgggctcccagacacaatcatactcctgctgataatgatgatatacattttagccataaactttcttttaaaagtgacaattttagttaaacataagccttttgaggagaaaggcttttatgcatctcagttaaacacgtgcattggtagtatcaacaaatttgcaatatagaagttgaagatagttttttacctcactttttaggaggttgtattcaaaattaaaatctcagaatcttacaggacatttaaagactcatgttgatagcatggaggagaaggaaagaagtcacagccttctactcagttgtaggtcttcttgtcatccagctgtcacactgacaaaaagaaaagatgatacatgttttttgctcagataagaagcctgacattaaaagatgtcatatttttttctccacatttcaaaaagttgtccttctcatcactgcacagatctgtctgaaagcctcagtttctgagtgacccaggaacagatcagaaatggagcatggccttgtcctttaatggggatgcaaataaagtttgtggggttaaaagttataagacagcagtgataccccactctctccattattgtccagcggggtgacataatgacaggttaaatatttgtgattcattgattaaatattatttaaagaaatgtaaattcacaataagggttgaaaattatttggtttcatccattgtctcttatttcaggaccaagcagcaaactgcagtagtttgtgaaggattctaatatggggttcaggaatagcctctcaacgctactaattcagatctctcccagagaactactggatttcctcataattgacaaacatgagtgaccacctctttgggtggctactgttagaaatggctgttgtcatgttttctggactttgccagccaacagatccctgccaggttttggaaatacttctattacctcgctgctacttttctgcagggataaaacttttgaggtggccagacccagaacatccaaggattcctgttacagtgctacagtatacactgctcatttatcctattctcatgtgctttcttctttagtaagattattttaagaaaataagtgatatttaaagtccaaagaggaatgatcacagttgtataaggggtgttttcccacttgaactctgatgtcagtcgactgtgggtcagagctacaaccatctgtttggtttgatgttttggtggtttacttacggagtggggatagtgtgagacctaattccctgtgcaaatgtctcttattccagaaatgtgcattttgtcatctataagcaagaaatatgggcatagcagctcttggtttaaagtttgccataacctgttcatgtttgttttaagctcaggtaaagataacctcctctttctatgactccagtttccattcaggttatagtattattcaatagttgattttctttttaagctgggcaataaattgatgtttccagatggtaacatgggagagggcatataggataaagatgagcaaattctaccctaaaaatgttctagtagttcacaggaagaagatgaggtttaataactttcaaggtaattctagattgacattttgaggggaaaatgggctcttgttctagttgaagtgagcagagaaggctataaattaatatgtaacttacagcattccagaggttaaaaataactgatgcagatgtacttcttcagtgtgattcttcagatcaaacttttacttttggcatagttaatttcagaaaaatgtgctgtatgtgtgtgtgtatgagggttggtcttgctgatccttcagttagctctaaattctggcaactccttgtaattccaatgtatttgatacatgaacaatcatgttgaatgcatttgtgatctgggagacttcctcgtcttccagggaaggaaggatgtgcagcccctgaaggcatgaaactcccagtgtgtacggagccagtggaatatgggatacccataccttaccaggcgctggttccttctgctcacaataacatctgcccaaagagggagtgggaagaacgcttagctctttcactagtatggatttgagttcatggtcactatttttacccacctgcctttgttaaaaatcactttgagtagaatagcactggaggaacatatttagcacctaatattaatatttagtagtccattgataaatttgccagcatatgttctagcctctggggggaaaccaggaccacttttgtctgtggcttaaacagttcagttgctatatctgttgggtatgccgggggtggatgagtgtggcattccgtgaagaggaaggtggtaagtaaggtttcccttctactgccttcttaagttgcaggagggagcttttctcctcccctctggttgggagcactgaggacagtgaggagggcttttaccttgttaatcctttccttatttagctagctttcctttttgtctagggcttcctcttgagaccctcttccatccattgggcctttgaaaggactaatcagacacacacacacacacacacacacacacacacacacactcgcatactcatgcacattttccttcatttccagatcctttatttcagagcagcccattttcctctggattcattgatgaatacaagtacccacacctttggccagtaatgtcagttacctgctgcaggttctgtgtatgaggccttcatgaacggttaccttctccatacactagggaagcatttgtcagactctgcagactgggttctagagaggcagagtctttaagagtattcatttcttctggaaggtggagctttacccaaagtggaagttagccttgctcaaagatgtgttttgtggtaggtggtaaaaataaataaataaataaataataaaaaaagaaacatgtattggaggtaatttgacactgctgctggcagtagttctctattcaccattttaaagcccattcaggttctctcttcctgaaaagaactgattgctgtgtttacatgaaatgacattggagtcagatggtctgttttaaagatttccatgacagcctcttttcctgagttggagagattggaggtggtctatccgtacgatgtggaatcaaacggtgggtttcttagtagctaaagaagccatgtacttctagtgtgtttctcagaatatcaactcatgttcttcagatgcttttctttttttaatggtgagggaaaaggtataatttgggattccacagtgccttgcatatagtaggcgcccagtaaatacttgttgaagcaaaccaagtttcccaagtcctcatctcttatagtgaccaagacatctttctcctctgaagggcttggcagttgtggctaaaaaataagcagtatcattatttgcttgaaatcatatatacagtttgtatgaatttcagtatgttgccaagacatgattttttcttattgtattttctgtaaatatttctggcactgaactgtaaagtaaaggcaaagtgtaaatatgaaggcgtgcccgtgccccttgcctcctgtgtttcatcttcgtcggttagggaagaaggtccagaggtttgtttgtatttatgccgatcctttgtccagaagaagcccatggaatattgaatgtaatacatttagtcaattaaattttaaggagattcttatcta

SEQ ID NO: 445748 - DNA, 4543 bp, Homo sapiens
cgagaatcgctgtcctctccttgcggccgccagtgtggtggaattcattctgaaacagccatccctgacacttgagcttttccccaatcatacagacaatcttaattcctcacagaggctcagtcccagttccagaatgaggaagctgcctcagggtcgccctgttcctccccttggacctgagacaagagtttctgtagtctgggtggaacgctatgatgatatagaaaactttcccctctcagagctgatgacagagatcagtactggtgtggaaactactgcaaatagtagcacttcactgagatctacaactcttgaaaaagaagttcctgtcatcttcatccaccctttaaacactggattattccggataaaaattcaaggagccactggaaaatttaatatggtcatccctcttgtggatgggatgattgtcagcaggcgagctcttggctttctggtgaggcagactgtaattaacatttgtagaagaaagagactggaaagtgactcctacagtcccccccatgtccgccggaaacagaaaatcaccgacattgtcaacaagtaccggaacaagcagctggagccagagttttatacttcacttttccaggaggttggactcaagaactgcagttcttagaccactgaatttctaagactgttgaactccagtttgggaactataacacagcagaacagtttgataggtgatcactgtaaaaataaaaacaaatcactcccaagagcttactgtttaatcaccagaatagaagaaacacattataacccatttgatagaagactttgggctatctagtgaaatgggctcccagacacaatcatactcctgctgataatgatgatatacattttagccataaactttcttttaaaagtgacaattttagttaaacataagccttttgaggagaaaggcttttatgcatctcagttaaacacgtgcattggtagtatcaacaaatttgcaatatagaagttgaagatagttttttacctcactttttaggaggttgtattcaaaattaaaatctcagaatcttacaggacatttaaagactcatgttgatagcatggaggagaaggaaagaagtcacagccttctactcagttgtaggtcttcttgtcatccagctgtcacactgacaaaaagaaaagatgatacatgttttttgctcagataagaagcctgacattaaaagatgtcatatttttttctccacatttcaaaaagttgtccttctcatcactgcacagatctgtctgaaagcctcagtttctgagtgacccaggaacagatcagaaatggagcatggccttgtcctttaatggggatgcaaataaagtttgtggggttaaaagttataagacagcagtgataccccactctctccattattgtccagcggggtgacataatgacaggttaaatatttgtgattcattgattaaatattatttaaagaaatgtaaattcacaataagggttgaaaattatttggtttcatccattgtctcttatttcaggaccaagcagcaaactgcagtagtttgtgaaggattctaatatggggttcaggaatagcctctcaacgctactaattcagatctctcccagagaactactggatttcctcataattgacaaacatgagtgaccacctctttgggtggctactgttagaaatggctgttgtcatgttttctggactttgccagccaacagatccctgccaggttttggaaatacttctattacctcgctgctacttttctgcagggataaaacttttgaggtggccagacccagaacatccaaggattcctgttacagtgctacagtatacactgctcatttatcctattctcatgtgctttcttctttagtaagattattttaagaaaataagtgatatttaaagtccaaagaggaatgatcacagttgtataaggggtgttttcccacttgaactctgatgtcagtcgactgtgggtcagagctacaaccatctgtttggtttgatgttttggtggtttacttacggagtggggatagtgtgagacctaattccctgtgcaaatgtctcttattccagaaatgtgcattttgtcatctataagcaagaaatatgggcatagcagctcttggtttaaagtttgccataacctgttcatgtttgttttaagctcaggtaaagataacctcctctttctatgactccagtttccattcaggttatagtattattcaatagttgattttctttttaagctgggcaataaattgatgtttccagatggtaacatgggagagggcatataggataaagatgagcaaattctaccctaaaaatgttctagtagttcacaggaagaagatgaggtttaataactttcaaggtaattctagattgacattttgaggggaaaatgggctcttgttctagttgaagtgagcagagaaggctataaattaatatgtaacttacagcattccagaggttaaaaataactgatgcagatgtacttcttcagtgtgattcttcagatcaaacttttacttttggcatagttaatttcagaaaaatgtgctgtatgtgtgtgtgtatgagggttggtcttgctgatccttcagttagctctaaattctggcaactccttgtaattccaatgtatttgatacatgaacaatcatgttgaatgcatttgtgatctgggagacttcctcgtcttccagggaaggaaggatgtgcagcccctgaaggcatgaaactcccagtgtgtacggagccagtggaatatgggatacccataccttaccaggcgctggttccttctgctcacaataacatctgcccaaagagggagtgggaagaacgcttagctctttcactagtatggatttgagttcatggtcactatttttacccacctgcctttgttaaaaatcactttgagtagaatagcactggaggaacatatttagcacctaatattaatatttagtagtccattgataaatttgccagcatatgttctagcctctggggggaaaccaggaccacttttgtctgtggcttaaacagttcagttgctatatctgttgggtatgccgggggtggatgagtgtggcattccgtgaagaggaaggtggtaagtaaggtttcccttctactgccttcttaagttgcaggagggagcttttctcctcccctctggttgggagcactgaggacagtgaggagggcttttaccttgttaatcctttccttatttagctagctttcctttttgtctagggcttcctcttgagaccctcttccatccattgggcctttgaaaggactaatcagacacacacacacacacacacacacacacacacacacactcgcatactcatgcacattttccttcatttccagatcctttatttcagagcagcccattttcctctggattcattgatgaatacaagtacccacacctttggccagtaatgtcagttacctgctgcaggttctgtgtatgaggccttcatgaacggttaccttctccatacactagggaagcatttgtcagactctgcagactgggttctagagaggcagagtctttaagagtattcatttcttctggaaggtggagctttacccaaagtggaagttagccttgctcaaagatgtgttttgtggtaggtggtaaaaataaataaataaataaataataaaaaaagaaacatgtattggaggtaatttgacactgctgctggcagtagttctctattcaccattttaaagcccattcaggttctctcttcctgaaaagaactgattgctgtgtttacatgaaatgacattggagtcagatggtctgttttaaagatttccatgacagcctcttttcctgagttggagagattggaggtggtctatccgtacgatgtggaatcaaacggtgggtttcttagtagctaaagaagccatgtacttctagtgtgtttctcagaatatcaactcatgttcttcagatgcttttctttttttaatggtgagggaaaaggtataatttgggattccacagtgccttgcatatagtaggcgcccagtaaatacttgttgaagcaaaccaagtttcccaagtcctcatctcttatagtgaccaagacatctttctcctctgaagggcttggcagttgtggctaaaaaataagcagtatcattatttgcttgaaatcatatatacagtttgtatgaatttcagtatgttgccaagacatgattttttcttattgtattttctgtaaatatttctggcactgaactgtaaagtaaaggcaaagtgtaaatatgaaggcgtgcccgtgccccttgcctcctgtgtttcatcttcgtcggttagggaagaaggtccagaggtttgtttgtatttatgccgatcctttgtccagaagaagcccatggaatattgaatgtaatacatttagtcaattaaattttaaggagattcttatcta

SEQ ID NO: 445749 - DNA, 5838 bp, Homo sapiens
gtaaaagtgatggttgactcaggagaccggaagcgagccatcagttctgtgtgcacctacattgtttatcagtgtagtcggccagctcctttacactccagggatctgcactccatgatagtggcagcttttcagtgtctctgtgtctggctgacagagcaccctgatatgcttgatgaaaaggactgccttaaggaagtactggagattgtggaactgggtatctcaggaagtaagtccaagaacaatgagcaagaggtcaagtacaaaggagataaggagccaaaccctgcatctatgagggtaaaggatgctgctgaagccaccctaacatgcattatgcagttgctcggcgcatttccttcacctagtggtcctgcctctccttgtagtcttgtgaatgagaccactttgattaaatactccaggctgccaaccataaacaagcatagtttccggtactttgtcttggataacagtgtcatcctggcaatgctggaacaacctcttggaaatgagcagaatgattttttcccctctgtcactgtgctggtccggggaatgtctggaagacttgcttgggcacaacagctttgtcttttacccagaggagcaaaagcaaatcagaagctttttgtacctgaacctcgcccagttcctaaaaatgacgttggatttaaatattctgtgaaacatcggccatttcctgaagaggtggacaagattccttttgtgaaagcagatctcagcattccagatttgcatgaaatagtcactgaagaatttagaagagagacacgaaaaattaaggagtggcatggcccagcagattgcttatgaaatacaccttgagcaacagagtgaggaggaattgcagaagagaagttttcctgacccagttacggattgcaagcccccgcctcctgcccaggaattccaaacagcccgcctttttctctcacactttggatttttgtccttagaagcactgaaggaacctgcaaatagtcgtctacctcctcaccttattgcacttgattccacgatacctggattttttgatgacattgggtatctggatctcttgccatgtcgtccttttgacacagtttttattttctatatgaagccaggtcagaaaacgaaccaagagattttaaagaatgtggagtcttccagaactgttcagccacatttcctagaatttttgctttcccttggctggtcagtagatgtgggcagacaccctggttggactgggcatgtttctaccagttggtctattaattgttgtgatgatggtgaaggatctcaacaagaagtgatttcctctgaagatattggagctagcattttcaatggacagaagaaggtgctgtattatgctgatgcccttacagaaattgcttttgtggttccttctcctgtggagtccttaactgattcattggaaagtaacatctcggaccaagatagtgattcaaatatggatcttatgccaggaattctgaaacagccatccctgacacttgagcttttccccaatcatacagacaatcttaattcctcacagaggctcagtcccagttccagaatgaggaagctgcctcagggtcgccctgttcctccccttggacctgagacaagagtttctgtagtctgggtggaacgctatgatgatatagaaaactttcccctctcagagctgatgacagagatcagtactggtgtggaaactactgcaaatagtagcacttcactgagatctacaactcttgaaaaagaagttcctgtcatcttcatccaccctttaaacactggattattccggataaaaattcaaggagccactggaaaatttaatatggtcatccctcttgtggatgggatgattgtcagcaggcgagctcttggctttctggtgaggcagactgtaattaacatttgtagaagaaagagactggaaagtgactcctacagtcccccccatgtccgccggaaacagaaaatcaccgacattgtcaacaagtaccggaacaagcagctggagccagagttttatacttcacttttccaggaggttggactcaagaactgcagttcttagaccactgaatttctaagactgttgaactccagtttgggaactataacacagcagaacagtttgataggtgatcactgtaaaaataaaaacaaatcactcccaagagcttactgtttaatcaccagaatagaagaaacacattataacccatttgatagaagactttgggctatctagtgaaatgggctcccagacacaatcatactcctgctgataatgatgatatacattttagccataaactttcttttaaaagtgacaattttagttaaacataagccttttgaggagaaaggcttttatgcatctcagttaaacacgtgcattggtagtatcaacaaatttgcaatatagaagttgaagatagttttttacctcactttttaggaggttgtattcaaaattaaaatctcagaatcttacaggacatttaaagactcatgttgatagcatggaggagaaggaaagaagtcacagccttctactcagttgtaggtcttcttgtcatccagctgtcacactgacaaaaagaaaagatgatacatgttttttgctcagataagaagcctgacattaaaagatgtcatatttttttctccacatttcaaaaagttgtccttctcatcactgcacagatctgtctgaaagcctcagtttctgagtgacccaggaacagatcagaaatggagcatggccttgtcctttaatggggatgcaaataaagtttgtggggttaaaagttataagacagcagtgataccccactctctccattattgtccagcggggtgacataatgacaggttaaatatttgtgattcattgattaaatattatttaaagaaatgtaaattcacaataagggttgaaaattatttggtttcatccattgtctcttatttcaggaccaagcagcaaactgcagtagtttgtgaaggattctaatatggggttcaggaatagcctctcaacgctactaattcagatctctcccagagaactactggatttcctcataattgacaaacatgagtgaccacctctttgggtggctactgttagaaatggctgttgtcatgttttctggactttgccagccaacagatccctgccaggttttggaaatacttctattacctcgctgctacttttctgcagggataaaacttttgaggtggccagacccagaacatccaaggattcctgttacagtgctacagtatacactgctcatttatcctattctcatgtgctttcttctttagtaagattattttaagaaaataagtgatatttaaagtccaaagaggaatgatcacagttgtataaggggtgttttcccacttgaactctgatgtcagtcgactgtgggtcagagctacaaccatctgtttggtttgatgttttggtggtttacttacggagtggggatagtgtgagacctaattccctgtgcaaatgtctcttattccagaaatgtgcattttgtcatctataagcaagaaatatgggcatagcagctcttggtttaaagtttgccataacctgttcatgtttgttttaagctcaggtaaagataacctcctctttctatgactccagtttccattcaggttatagtattattcaatagttgattttctttttaagctgggcaataaattgatgtttccagatggtaacatgggagagggcatataggataaagatgagcaaattctaccctaaaaatgttctagtagttcacaggaagaagatgaggtttaataactttcaaggtaattctagattgacattttgaggggaaaatgggctcttgttctagttgaagtgagcagagaaggctataaattaatatgtaacttacagcattccagaggttaaaaataactgatgcagatgtacttcttcagtgtgattcttcagatcaaacttttacttttggcatagttaatttcagaaaaatgtgctgtatgtgtgtgtgtatgagggttggtcttgctgatccttcagttagctctaaattctggcaactccttgtaattccaatgtatttgatacatgaacaatcatgttgaatgcatttgtgatctgggagacttcctcgtcttccagggaaggaaggatgtgcagcccctgaaggcatgaaactcccagtgtgtacggagccagtggaatatgggatacccataccttaccaggcgctggttccttctgctcacaataacatctgcccaaagagggagtgggaagaacgcttagctctttcactagtatggatttgagttcatggtcactatttttacccacctgcctttgttaaaaatcactttgagtagaatagcactggaggaacatatttagcacctaatattaatatttagtagtccattgataaatttgccagcatatgttctagcctctggggggaaaccaggaccacttttgtctgtggcttaaacagttcagttgctatatctgttgggtatgccgggggtggatgagtgtggcattccgtgaagaggaaggtggtaagtaaggtttcccttctactgccttcttaagttgcaggagggagcttttctcctcccctctggttgggagcactgaggacagtgaggagggcttttaccttgttaatcctttccttatttagctagctttcctttttgtctagggcttcctcttgagaccctcttccatccattgggcctttgaaaggactaatcagacacacacacacacacacacacacacacacacacacactcgcatactcatgcacattttccttcatttccagatcctttatttcagagcagcccattttcctctggattcattgatgaatacaagtacccacacctttggccagtaatgtcagttacctgctgcaggttctgtgtatgaggccttcatgaacggttaccttctccatacactagggaagcatttgtcagactctgcagactgggttctagagaggcagagtctttaagagtattcatttcttctggaaggtggagctttacccaaagtggaagttagccttgctcaaagatgtgttttgtggtaggtggtaaaaataaataaataaataaataataaaaaaagaaacatgtattggaggtaatttgacactgctgctggcagtagttctctattcaccattttaaagcccattcaggttctctcttcctgaaaagaactgattgctgtgtttacatgaaatgacattggagtcagatggtctgttttaaagatttccatgacagcctcttttcctgagttggagagattggaggtggtctatccgtacgatgtggaatcaaacggtgggtttcttagtagctaaagaagccatgtacttctagtgtgtttctcagaatatcaactcatgttcttcagatgcttttctttttttaatggtgagggaaaaggtataatttgggattccacagtgccttgcatatagtaggcgcccagtaaatacttgttgaagcaaaccaagtttcccaagtcctcatctcttatagtgaccaagacatctttctcctctgaagggcttggcagttgtggctaaaaaataagcagtatcattatttgcttgaaatcatatatacagtttgtatgaatttcagtatgttgccaagacatgattttttcttattgtattttctgtaaatatttctggcactgaactgtaaagtaaaggcaaagtgtaaatatga

SEQ ID NO: 445750 - DNA, 3599 bp, Homo sapiens
tgtttaacattaacgttctatgaggtatttggggccttatctcgagtcttcaggggagggggttgaagatagttttttacctcactttttaggaggttgtattcaaaattaaaatctcagaatcttacaggacatttaaagactcatgttgatagcatggaggagaaggaaagaagtcacagccttctactcagttgtaggtcttcttgtcatccagctgtcacactgacaaaaagaaaagatgatacatgttttttgctcagataagaagcctgacattaaaagatgtcatatttttttctccacatttcaaaaagttgtccttctcatcactgcacagatctgtctgaaagcctcagtttctgagtgacccaggaacagatcagaaatggagcatggccttgtcctttaatggggatgcaaataaagtttgtggggttaaaagttataagacagcagtgataccccactctctccattattgtccagcggggtgacataatgacaggttaaatatttgtgattcattgattaaatattatttaaagaaatgtaaattcacaataagggttgaaaattatttggtttcatccattgtctcttatttcaggaccaagcagcaaactgcagtagtttgtgaaggattctaatatggggttcaggaatagcctctcaacgctactaattcagatctctcccagagaactactggatttcctcataattgacaaacatgagtgaccacctctttgggtggctactgttagaaatggctgttgtcatgttttctggactttgccagccaacagatccctgccaggttttggaaatacttctattacctcgctgctacttttctgcagggataaaacttttgaggtggccagacccagaacatccaaggattcctgttacagtgctacagtatacactgctcatttatcctattctcatgtgctttcttctttagtaagattattttaagaaaataagtgatatttaaagtccaaagaggaatgatcacagttgtataaggggtgttttcccacttgaactctgatgtcagtcgactgtgggtcagagctacaaccatctgtttggtttgatgttttggtggtttacttacggagtggggatagtgtgagacctaattccctgtgcaaatgtctcttattccagaaatgtgcattttgtcatctataagcaagaaatatgggcatagcagctcttggtttaaagtttgccataacctgttcatgtttgttttaagctcaggtaaagataacctcctctttctatgactccagtttccattcaggttatagtattattcaatagttgattttctttttaagctgggcaataaattgatgtttccagatggtaacatgggagagggcatataggataaagatgagcaaattctaccctaaaaatgttctagtagttcacaggaagaagatgaggtttaataactttcaaggtaattctagattgacattttgaggggaaaatgggctcttgttctagttgaagtgagcagagaaggctataaattaatatgtaacttacagcattccagaggttaaaaataactgatgcagatgtacttcttcagtgtgattcttcagatcaaacttttacttttggcatagttaatttcagaaaaatgtgctgtatgtgtgtgtgtatgagggttggtcttgctgatccttcagttagctctaaattctggcaactccttgtaattccaatgtatttgatacatgaacaatcatgttgaatgcatttgtgatctgggagacttcctcgtcttccagggaaggaaggatgtgcagcccctgaaggcatgaaactcccagtgtgtacggagccagtggaatatgggatacccataccttaccaggcgctggttccttctgctcacaataacatctgcccaaagagggagtgggaagaacgcttagctctttcactagtatggatttgagttcatggtcactatttttacccacctgcctttgttaaaaatcactttgagtagaatagcactggaggaacatatttagcacctaatattaatatttagtagtccattgataaatttgccagcatatgttctagcctctggggggaaaccaggaccacttttgtctgtggcttaaacagttcagttgctatatctgttgggtatgccgggggtggatgagtgtggcattccgtgaagaggaaggtggtaagtaaggtttcccttctactgccttcttaagttgcaggagggagcttttctcctcccctctggttgggagcactgaggacagtgaggagggcttttaccttgttaatcctttccttatttagctagctttcctttttgtctagggcttcctcttgagaccctcttccatccattgggcctttgaaaggactaatcagacacacacacacacacacacacacacacacacacacactcgcatactcatgcacattttccttcatttccagatcctttatttcagagcagcccattttcctctggattcattgatgaatacaagtacccacacctttggccagtaatgtcagttacctgctgcaggttctgtgtatgaggccttcatgaacggttaccttctccatacactagggaagcatttgtcagactctgcagactgggttctagagaggcagagtctttaagagtattcatttcttctggaaggtggagctttacccaaagtggaagttagccttgctcaaagatgtgttttgtggtaggtggtaaaaataaataaataaataaataataaaaaaagaaacatgtattggaggtaatttgacactgctgctggcagtagttctctattcaccattttaaagcccattcaggttctctcttcctgaaaagaactgattgctgtgtttacatgaaatgacattggagtcagatggtctgttttaaagatttccatgacagcctcttttcctgagttggagagattggaggtggtctatccgtacgatgtggaatcaaacggtgggtttcttagtagctaaagaagccatgtacttctagtgtgtttctcagaatatcaactcatgttcttcagatgcttttctttttttaatggtgagggaaaaggtataatttgggattccacagtgccttgcatatagtaggcgcccagtaaatacttgttgaagcaaaccaagtttcccaagtcctcatctcttatagtgaccaagacatctttctcctctgaagggcttggcagttgtggctaaaaaataagcagtatcattatttgcttgaaatcatatatacagtttgtatgaatttcagtatgttgccaagacatgattttttcttattgtattttctgtaaatatttctggcactgaactgtaaagtaaaggcaaagtgtaaatatgaaggcgtgcccgtgccccttgcctcctgtgtttcatcttcgtcggttagggaagaaggtccagaggtttgtttgtatttatgccgatcctttgtccagaagaagcccatggaatattgaatgtaatacatttagtcaattaaattttaaggagattcttatcta

SEQ ID NO: 445751 - DNA, 3796 bp, Homo sapiens
tatcggggattcctgtcatgggccgaagctgtgttcctgcttctcctctgggattatcagccttgactatgctgaaattccttgtactctggccggccacacttttgttccctataagaagaggaactaaagtgaaagtcccatagctggttgctaaattcttaactccatgcagcagagtactcttggcctctccttccacccagtgtccctattggttttccaagcatatatattttttcagctcctttctgttagcttagaaagcttgacccagtaatggacctttaggaccagatgttatagggggtagcagcatagattcccagaaagcagattctgagcacactgaccccttggcttttctcagaccactgccaagcaacaggtccctttactaatcttaggctatatgtgggggacttcaactcttgggtgtctcggggacttcaactcttgggtgtctgagataacaattttcttttcttaagatctacaactcttgaaaaagaagttcctgtcatcttcatccaccctttaaacactggattattccggataaaaattcaaggagccactggaaaatttaatatggtcatccctcttgtggatgggatgattgtcagcaggcgagctcttggctttctggtgaggcagactgtaattaacatttgtagaagaaagagactggaaagtgactcctacagtcccccccatgtccgccggaaacagaaaatcaccgacattgtcaacaagtaccggaacaagcagctggagccagagttttatacttcacttttccaggaggaccaagcagcaaactgcagtagtttgtgaaggattctaatatggggttcaggaatagcctctcaacgctactaattcagatctctcccagagaactactggatttcctcataattgacaaacatgagtgaccacctctttgggtggctactgttagaaatggctgttgtcatgttttctggactttgccagccaacagatccctgccaggttttggaaatacttctattacctcgctgctacttttctgcagggataaaacttttgaggtggccagacccagaacatccaaggattcctgttacagtgctacagtatacactgctcatttatcctattctcatgtgctttcttctttagtaagattattttaagaaaataagtgatatttaaagtccaaagaggaatgatcacagttgtataaggggtgttttcccacttgaactctgatgtcagtcgactgtgggtcagagctacaaccatctgtttggtttgatgttttggtggtttacttacggagtggggatagtgtgagacctaattccctgtgcaaatgtctcttattccagaaatgtgcattttgtcatctataagcaagaaatatgggcatagcagctcttggtttaaagtttgccataacctgttcatgtttgttttaagctcaggtaaagataacctcctctttctatgactccagtttccattcaggttatagtattattcaatagttgattttctttttaagctgggcaataaattgatgtttccagatggtaacatgggagagggcatataggataaagatgagcaaattctaccctaaaaatgttctagtagttcacaggaagaagatgaggtttaataactttcaaggtaattctagattgacattttgaggggaaaatgggctcttgttctagttgaagtgagcagagaaggctataaattaatatgtaacttacagcattccagaggttaaaaataactgatgcagatgtacttcttcagtgtgattcttcagatcaaacttttacttttggcatagttaatttcagaaaaatgtgctgtatgtgtgtgtgtatgagggttggtcttgctgatccttcagttagctctaaattctggcaactccttgtaattccaatgtatttgatacatgaacaatcatgttgaatgcatttgtgatctgggagacttcctcgtcttccagggaaggaaggatgtgcagcccctgaaggcatgaaactcccagtgtgtacggagccagtggaatatgggatacccataccttaccaggcgctggttccttctgctcacaataacatctgcccaaagagggagtgggaagaacgcttagctctttcactagtatggatttgagttcatggtcactatttttacccacctgcctttgttaaaaatcactttgagtagaatagcactggaggaacatatttagcacctaatattaatatttagtagtccattgataaatttgccagcatatgttctagcctctggggggaaaccaggaccacttttgtctgtggcttaaacagttcagttgctatatctgttgggtatgccgggggtggatgagtgtggcattccgtgaagaggaaggtggtaagtaaggtttcccttctactgccttcttaagttgcaggagggagcttttctcctcccctctggttgggagcactgaggacagtgaggagggcttttaccttgttaatcctttccttatttagctagctttcctttttgtctagggcttcctcttgagaccctcttccatccattgggcctttgaaaggactaatcagacacacacacacacacacacacacacacacacacacactcgcatactcatgcacattttccttcatttccagatcctttatttcagagcagcccattttcctctggattcattgatgaatacaagtacccacacctttggccagtaatgtcagttacctgctgcaggttctgtgtatgaggccttcatgaacggttaccttctccatacactagggaagcatttgtcagactctgcagactgggttctagagaggcagagtctttaagagtattcatttcttctggaaggtggagctttacccaaagtggaagttagccttgctcaaagatgtgttttgtggtaggtggtaaaaataaataaataaataaataataaaaaaagaaacatgtattggaggtaatttgacactgctgctggcagtagttctctattcaccattttaaagcccattcaggttctctcttcctgaaaagaactgattgctgtgtttacatgaaatgacattggagtcagatggtctgttttaaagatttccatgacagcctcttttcctgagttggagagattggaggtggtctatccgtacgatgtggaatcaaacggtgggtttcttagtagctaaagaagccatgtacttctagtgtgtttctcagaatatcaactcatgttcttcagatgcttttctttttttaatggtgagggaaaaggtataatttgggattccacagtgccttgcatatagtaggcgcccagtaaatacttgttgaagcaaaccaagtttcccaagtcctcatctcttatagtgaccaagacatctttctcctctgaagggcttggcagttgtggctaaaaaataagcagtatcattatttgcttgaaatcatatatacagtttgtatgaatttcagtatgttgccaagacatgattttttcttattgtattttctgtaaatatttctggcactgaactgtaaagtaaaggcaaagtgtaaatatgaaggcgtgcccgtgccccttgcctcctgtgtttcatcttcgtcggttagggaagaaggtccagaggtttgtttgtatttatgccgatcctttgtccagaagaagcccatggaatattgaatgtaatacatttagtcaattaaattttaaggagattcttatcta

SEQ ID NO: 445752 - DNA, 2968 bp, Homo sapiens
gtaaaagtgatggttgactcaggagaccggaagcgagccatcagttctgtgtgcacctacattgtttatcagtgtagtcggccagctcctttacactccagggatctgcactccatgatagtggcagcttttcagtgtctctgtgtctggctgacagagcaccctgatatgcttgatgaaaaggactgccttaaggaagtactggagattgtggaactgggtatctcaggaagtaagtccaagaacaatgagcaagaggtcaagtacaaaggagataaggagccaaaccctgcatctatgagggtaaaggatgctgctgaagccaccctaacatgcattatgcagttgctcggcgcatttccttcacctagtggtcctgcctctccttgtagtcttgtgaatgagaccactttgattaaatactccaggctgccaaccataaacaagcatagtttccggtactttgtcttggataacagtgtcatcctggcaatgctggaacaacctcttggaaatgagcagaatgattttttcccctctgtcactgtgctggtccggggaatgtctggaagacttgcttgggcacaacagctttgtcttttacccagaggagcaaaagcaaatcagaagctttttgtacctgaacctcgcccagttcctaaaaatgacgttggatttaaatattctgtgaaacatcggccatttcctgaagaggtggacaagattccttttgtgaaagcagatctcagcattccagatttgcatgaaatagtcactgaagaatttagaagagagacacgaaaaattaaggagtggcatggcccagcagattgcttatgaaatacaccttgagcaacagagtgaggaggaattgcagaagagaagttttcctgacccagttacggattgcaagcccccgcctcctgcccaggaattccaaacagcccgcctttttctctcacactttggatttttgtccttagaagcactgaaggaacctgcaaatagtcgtctacctcctcaccttattgcacttgattccacgatacctggattttttgatgacattgggtatctggatctcttgccatgtcgtccttttgacacagtttttattttctatatgaagccaggtcagaaaacgaaccaagagattttaaagaatgtggagtcttccagaactgttcagccacatttcctagaatttttgctttcccttggctggtcagtagatgtgggcagacaccctggttggactgggcatgtttctaccagttggtctattaattgttgtgatgatggtgaaggatctcaacaagaagtgatttcctctgaagatattggagctagcattttcaatggacagaagaaggtgctgtattatgctgatgcccttacagaaattgcttttgtggttccttctcctgtggagtccttaactgattcattggaaagtaacatctcggaccaagatagtgattcaaatatggatcttatgccaggaattctgaaacagccatccctgacacttgagcttttccccaatcatacagacaatcttaattcctcacagaggctcagtcccagttccagaatgaggaagctgcctcagggtcgccctgttcctccccttggacctgagacaagagtttctgtagtctgggtggaacgctatgatgatatagaaaactttcccctctcagagctgatgacagagatcagtactggtgtggaaactactgcaaatagtagcacttcactgagatctacaactcttgaaaaagaagttcctgtcatcttcatccaccctttaaacactggattattccggataaaaattcaaggagccactggaaaatttaatatggtcatccctcttgtggatgggatgattgtcagcaggcgagctcttggctttctggtgaggcagactgtaattaacatttgtagaagaaagagactggaaagtgactcctacagtcccccccatgtccgccggaaacagaaaatcaccgacattgtcaacaagtaccggaacaagcagctggagccagagttttatacttcacttttccaggaggttggactcaagaactgcagttcttagaccactgaatttctaagactgttgaactccagtttgggaactataacacagcagaacagtttgataggtgatcactgtaaaaataaaaacaaatcactcccaagagcttactgtttaatcaccagaatagaagaaacacattataacccatttgatagaagactttgggctatctagtgaaatgggctcccagacacaatcatactcctgctgataatgatgatatacattttagccataaactttcttttaaaagtgacaattttagttaaacataagccttttgaggagaaaggcttttatgcatctcagttaaacacgtgcattggtagtatcaacaaatttgcaatatagaagttgaagatagttttttacctcactttttaggaggttgtattcaaaattaaaatctcagaatcttacaggacatttaaagactcatgttgatagcatggaggagaaggaaagaagtcacagccttctactcagttgtaggtcttcttgtcatccagctgtcacactgacaaaaagaaaagatgatacatgttttttgctcagataagaagcctgacattaaaagatgtcatatttttttctccacatttcaaaaagttgtccttctcatcactgcacagatctgtctgaaagcctcagtttctgagtgacccaggaacagatcagaaatggagcatggccttgtcctttaatggggatgcaaataaagtttgtggggttaaaagttataagacagcagtgataccccactctctccattattgtccagcggggtgacataatgacaggttaaatatttgtgattcattgattaaatattatttaaagaaatgtaaattcacaata

SEQ ID NO: 445753 - DNA, 3851 bp, Homo sapiens
gtaaaagtgatggttgactcaggagaccggaagcgagccatcagttctgtgtgcacctacattgtttatcagtgtagtcggccagctcctttacactccagggatctgcactccatgatagtggcagcttttcagtgtctctgtgtctggctgacagagcaccctgatatgcttgatgaaaaggactgccttaaggaagtactggagattgtggaactgggtatctcaggaagtaagtccaagaacaatgagcaagaggtcaagtacaaaggagataaggagccaaaccctgcatctatgagggtaaaggatgctgctgaagccaccctaacatgcattatgcagttgctcggcgcatttccttcacctagtggtcctgcctctccttgtagtcttgtgaatgagaccactttgattaaatactccaggctgccaaccataaacaagcatagtttccggtactttgtcttggataacagtgtcatcctggcaatgctggaacaacctcttggaaatgagcagaatgattttttcccctctgtcactgtgctggtccggggaatgtctggaagacttgcttgggcacaacagctttgtcttttacccagaggagcaaaagcaaatcagaagctttttgtacctgaacctcgcccagttcctaaaaatgacgttggatttaaatattctgtgaaacatcggccatttcctgaagaggtggacaagattccttttgtgaaagcagatctcagcattccagatttgcatgaaatagtcactgaagaatttagaagagagacacgaaaaattaaggagtggcatggcccagcagattgcttatgaaatacaccttgagcaacagagtgaggaggaattgcagaagagaagttttcctgacccagttacggattgcaagcccccgcctcctgcccaggaattccaaacagcccgcctttttctctcacactttggatttttgtccttagaagcactgaaggaacctgcaaatagtcgtctacctcctcaccttattgcacttgattccacgatacctggattttttgatgacattgggtatctggatctcttgccatgtcgtccttttgacacagtttttattttctatatgaagccaggtcagaaaacgaaccaagagattttaaagaatgtggagtcttccagaactgttcagccacatttcctagaatttttgctttcccttggctggtcagtagatgtgggcagacaccctggttggactgggcatgtttctaccagttggtctattaattgttgtgatgatggtgaaggatctcaacaagaagtgatttcctctgaagatattggagctagcattttcaatggacagaagaaggtgctgtattatgctgatgcccttacagaaattgcttttgtggttccttctcctgtggagtccttaactgattcattggaaagtaacatctcggaccaagatagtgattcaaatatggatcttatgccaggaattctgaaacagccatccctgacacttgagcttttccccaatcatacagacaatcttaattcctcacagaggctcagtcccagttccagaatgaggaagctgcctcagggtcgccctgttcctccccttggacctgagacaagagtttctgtagtctgggtggaacgctatgatgatatagaaaactttcccctctcagagctgatgacagagatcagtactggtgtggaaactactgcaaatagtagcacttcactgagatctacaactcttgaaaaagaagttcctgtcatcttcatccaccctttaaacactggattattccggataaaaattcaaggagccactggaaaatttaatatggtcatccctcttgtggatgggatgattgtcagcaggcgagctcttggctttctggtgaggcagactgtaattaacatttgtagaagaaagagactggaaagtgactcctacagtcccccccatgtccgccggaaacagaaaatcaccgacattgtcaacaagtaccggaacaagcagctggagccagagttttatacttcacttttccaggaggttggactcaagaactgcagttcttagaccactgaatttctaagactgttgaactccagtttgggaactataacacagcagaacagtttgataggtgatcactgtaaaaataaaaacaaatcactcccaagagcttactgtttaatcaccagaatagaagaaacacattataacccatttgatagaagactttgggctatctagtgaaatgggctcccagacacaatcatactcctgctgataatgatgatatacattttagccataaactttcttttaaaagtgacaattttagttaaacataagccttttgaggagaaaggcttttatgcatctcagttaaacacgtgcattggtagtatcaacaaatttgcaatatagaagttgaagatagttttttacctcactttttaggaggttgtattcaaaattaaaatctcagaatcttacaggacatttaaagactcatgttgatagcatggaggagaaggaaagaagtcacagccttctactcagttgtaggtcttcttgtcatccagctgtcacactgacaaaaagaaaagatgatacatgttttttgctcagataagaagcctgacattaaaagatgtcatatttttttctccacatttcaaaaagttgtccttctcatcactgcacagatctgtctgaaagcctcagtttctgagtgacccaggaacagatcagaaatggagcatggccttgtcctttaatggggatgcaaataaagtttgtggggttaaaagttataagacagcagtgataccccactctctccattattgtccagcggggtgacataatgacaggttaaatatttgtgattcattgattaaatattatttaaagaaatgtaaattcacaataagggttgaaaattatttggtttcatccattgtctcttatttcaggaccaagcagcaaactgcagtagtttgtgaaggattctaatatggggttcaggaatagcctctcaacgctactaattcagatctctcccagagaactactggatttcctcataattgacaaacatgagtgaccacctctttgggtggctactgttagaaatggctgttgtcatgttttctggactttgccagccaacagatccctgccaggttttggaaatacttctattacctcgctgctacttttctgcagggataaaacttttgaggtggccagacccagaacatccaaggattcctgttacagtgctacagtatacactgctcatttatcctattctcatgtgctttcttctttagtaagattattttaagaaaataagtgatatttaaagtccaaagaggaatgatcacagttgtataaggggtgttttcccacttgaactctgatgtcagtcgactgtgggtcagagctacaaccatctgtttggtttgatgttttggtggtttacttacggagtggggatagtgtgagacctaattccctgtgcaaatgtctcttattccagaaatgtgcattttgtcatctataagcaagaaatatgggcatagcagctcttggtttaaagtttgccataacctgttcatgtttgttttaagctcaggtaaagataacctcctctttctatgactccagtttccattcaggttatagtattattcaatagttgattttctttttaagctgggcaataaattgatgtttccagataggtttcacatgagtgaggcgcaatcgggaaaagaattcgccatccaagcctgccttgtagaaattg

SEQ ID NO: 445754 - DNA, 1293 bp, Homo sapiens
  misc_feature (114)..(114): n is a, c, g, or t
  misc_feature (128)..(128): n is a, c, g, or t
  misc_feature (134)..(134): n is a, c, g, or t
tagagatgataactctccactccctcttttttataccttttgacctcccaaacttcttcccaaaaccctcattcatctttttgacccttgttctttacatttcaggccagtggnccttaaaagcttcnaagtanacacacacacacacacacacacacacacacacactcgcatactcatgcacattttccttcatttccagatcctttatttcagagcagcccattttcctctggattcattgatgaatacaagtacccacacctttggccagtaatgtcagttacctgctgcaggttctgtgtatgaggccttcatgaacggttaccttctccatacactagggaagcatttgtcagactctgcagactgggttctagagaggcagagtctttaagagtattcatttcttctggaaggtggagctttacccaaagtggaagttagccttgctcaaagatgtgttttgtggtaggtggtaaaaataaataaataaataaataataaaaaaagaaacatgtattggaggtaatttgacactgctgctggcagtagttctctattcaccattttaaagcccattcaggttctctcttcctgaaaagaactgattgctgtgtttacatgaaatgacattggagtcagatggtctgttttaaagatttccatgacagcctcttttcctgagttggagagattggaggtggtctatccgtacgatgtggaatcaaacggtgggtttcttagtagctaaagaagccatgtacttctagtgtgtttctcagaatatcaactcatgttcttcagatgcttttctttttttaatggtgagggaaaaggtataatttgggattccacagtgccttgcatatagtaggcgcccagtaaatacttgttgaagcaaaccaagtttcccaagtcctcatctcttatagtgaccaagacatctttctcctctgaagggcttggcagttgtggctaaaaaataagcagtatcattatttgcttgaaatcatatatacagtttgtatgaatttcagtatgttgccaagacatgattttttcttattgtattttctgtaaatatttctggcactgaactgtaaagtaaaggcaaagtgtaaatatgaaggcgtgcccgtgccccttgcctcctgtgtttcatcttcgtcggttagggaagaaggtccagaggtttgtttgtatttatgccgatcctttgtccagaagaagcccatggaatattgaatgtaatacatttagtcaattaaattttaaggagattcttatcta

SEQ ID NO: 445755 - DNA, 1039 bp, Homo sapiens
gtaaaagtgatggttgactcaggagaccggaagcgagccatcagttctgtgtgcacctacattgtttatcagtgtagtcggccagctcctttacactccagggatctgcactccatgatagtggcagcttttcagtgtctctgtgtctggctgacagagcaccctgatatgcttgatgaaaaggactgccttaaggaagtactggagattgtggaactgggtatctcaggaagtaagtccaagaacaatgagcaagaggtcaagtacaaaggagataaggagccaaaccctgcatctatgagggtaaaggatgctgctgaagccaccctaacatgcattatgcagttgctcggcgcatttccttcacctagtggtcctgcctctccttgtagtcttgtgaatgagaccactttgattaaatactccaggctgccaaccataaacaagcatagtttccggtactttgtcttggataacagtgtcatcctggcaatgctggaacaacctcttggaaatgagcagaatgattttttcccctctgtcactgtgctggtccggggaatgtctggaagacttgcttgggcacaacagctttgtcttttacccagaggagcaaaagcaaatcagaagctttttgtacctgaacctcgcccagttcctaaaaatgacgttggatttaaatattctgtgaaacatcggccatttcctgaagaggtggacaagattccttttgtgaaagcagatctcagcattccagatttgcatgaaatagtcactgaagaataaagagactggaaagtgactcctacagtcccccccatgtccgccggaaacagaaaatcaccgacattgtcaacaagtaccggaacaagcagctggagccagagttttatacttcacttttccaggaggttggactcaagaactgcagttcttagaccactgaatttctaagactgttgaactccagtttgggaactataacacagcagaacagtttgataggtgatcactgtaaaaataaaaacaaatcactccc

SEQ ID NO: 445756 - DNA, 446 bp, Homo sapiens
gtgtgatagttacttttcaaccaagccctcaaagatcacagaacatattttctaaaaactctttgctttagatgaaattagctaaaaaatgtcttgagagagaattttttaatttgtagagaataattaagatgatatttcaggacagcacagtccatatatttgccactcacttatgtaaagcgattagaaaattagatttcctattatctgtttgggaaaatgagggagatattaattgtaatgctattattttcttccagaaaactttcccctctcagagctgatgacagagatcagtactggtgtggaaactactgcaaatagtagcacttcactgaggtacactctatttgcttgaagttcatcagcgtgtctttttttaacatattgattgcagcttaataaataaggaattatgaaacgaaagagttgtagacaactag

SEQ ID NO: 445757 - DNA, 366 bp, Homo sapiens
ccaaagaagagctttgttgcaaatgtatacactttttcctaaagtgattttccatgacctgatacttggtcactgagcaccttgacaaatgaatgactgggtagttttattaagccagttttttgttgctgttgtttttcccgctctctgtcttcttcttcttcatgtagctcagtcccagttccagaatgaggaagctgcctcagggtcgccctgttcctccccttggacctgagacaagagtttctgtagtctgggtggaacgctatgatgatataggtactgtatgaggactttgtccataaataaaatggcaatatatgacagtgacttgctaaatgtctacagggagtgggcacataagcc

SEQ ID NO: 445758 - DNA, 242 bp, Homo sapiens
ctttgattaaatactccaggctgccaaccataaacaagcatagtttccggtactttgtcttggataacagtgtcatcctggcaatgctggaacaacctcttggaaatgagcagagtaagtttatagtactttgagccttctctactgcttaatcagtgttaccagtaccatgaagctgtttccaggatcagggaaggacagcctacagattctaagtaggtcagaaagatttctagctgtgg

SEQ ID NO: 445759 - DNA, 6153 bp, Homo sapiens
gtaaaagtgatggttgactcaggagaccggaagcgagccatcagttctgtgtgcacctacattgtttatcagtgtagtcggccagctcctttacactccagggatctgcactccatgatagtggcagcttttcagtgtctctgtgtctggctgacagagcaccctgatatgcttgatgaaaaggactgccttaaggaagtactggagattgtggaactgggtatctcaggaagtaagtccaagaacaatgagcaagaggtcaagtacaaaggagataaggagccaaaccctgcatctatgagggtaaaggatgctgctgaagccaccctaacatgcattatgcagttgctcggcgcatttccttcacctagtggtcctgcctctccttgtagtcttgtgaatgagaccactttgattaaatactccaggctgccaaccataaacaagcatagtttccggtactttgtcttggataacagtgtcatcctggcaatgctggaacaacctcttggaaatgagcagaatgattttttcccctctgtcactgtgctggtccggggaatgtctggaagacttgcttgggcacaacagctttgtcttttacccagaggagcaaaagcaaatcagaagctttttgtacctgaacctcgcccagttcctaaaaatgacgttggatttaaatattctgtgaaacatcggccatttcctgaagaggtggacaagattccttttgtgaaagcagatctcagcattccagatttgcatgaaatagtcactgaagaatttagaagagagacacgaaaaattaaggagtggcatggcccagcagattgcttatgaaatacaccttgagcaacagagtgaggaggaattgcagaagagaagttttcctgacccagttacggattgcaagcccccgcctcctgcccaggaattccaaacagcccgcctttttctctcacactttggatttttgtccttagaagcactgaaggaacctgcaaatagtcgtctacctcctcaccttattgcacttgattccacgatacctggattttttgatgacattgggtatctggatctcttgccatgtcgtccttttgacacagtttttattttctatatgaagccaggtcagaaaacgaaccaagagattttaaagaatgtggagtcttccagaactgttcagccacatttcctagaatttttgctttcccttggctggtcagtagatgtgggcagacaccctggttggactgggcatgtttctaccagttggtctattaattgttgtgatgatggtgaaggatctcaacaagaagtgatttcctctgaagatattggagctagcattttcaatggacagaagaaggtgctgtattatgctgatgcccttacagaaattgcttttgtggttccttctcctgtggagtccttaactgattcattggaaagtaacatctcggaccaagatagtgattcaaatatggatcttatgccaggaattctgaaacagccatccctgacacttgagcttttccccaatcatacagacaatcttaattcctcacagaggctcagtcccagttccagaatgaggaagctgcctcagggtcgccctgttcctccccttggacctgagacaagagtttctgtagtctgggtggaacgctatgatgatatagaaaactttcccctctcagagctgatgacagagatcagtactggtgtggaaactactgcaaatagtagcacttcactgagatctacaactcttgaaaaagaagttcctgtcatcttcatccaccctttaaacactggattattccggataaaaattcaaggagccactggaaaatttaatatggtcatccctcttgtggatgggatgattgtcagcaggcgagctcttggctttctggtgaggcagactgtaattaacatttgtagaagaaagagactggaaagtgactcctacagtcccccccatgtccgccggaaacagaaaatcaccgacattgtcaacaagtaccggaacaagcagctggagccagagttttatacttcacttttccaggaggttggactcaagaactgcagttcttagaccactgaatttctaagactgttgaactccagtttgggaactataacacagcagaacagtttgataggtgatcactgtaaaaataaaaacaaatcactcccaagagcttactgtttaatcaccagaatagaagaaacacattataacccatttgatagaagactttgggctatctagtgaaatgggctcccagacacaatcatactcctgctgataatgatgatatacattttagccataaactttcttttaaaagtgacaattttagttaaacataagccttttgaggagaaaggcttttatgcatctcagttaaacacgtgcattggtagtatcaacaaatttgcaatatagaagttgaagatagttttttacctcactttttaggaggttgtattcaaaattaaaatctcagaatcttacaggacatttaaagactcatgttgatagcatggaggagaaggaaagaagtcacagccttctactcagttgtaggtcttcttgtcatccagctgtcacactgacaaaaagaaaagatgatacatgttttttgctcagataagaagcctgacattaaaagatgtcatatttttttctccacatttcaaaaagttgtccttctcatcactgcacagatctgtctgaaagcctcagtttctgagtgacccaggaacagatcagaaatggagcatggccttgtcctttaatggggatgcaaataaagtttgtggggttaaaagttataagacagcagtgataccccactctctccattattgtccagcggggtgacataatgacaggttaaatatttgtgattcattgattaaatattatttaaagaaatgtaaattcacaataagggttgaaaattatttggtttcatccattgtctcttatttcaggaccaagcagcaaactgcagtagtttgtgaaggattctaatatggggttcaggaatagcctctcaacgctactaattcagatctctcccagagaactactggatttcctcataattgacaaacatgagtgaccacctctttgggtggctactgttagaaatggctgttgtcatgttttctggactttgccagccaacagatccctgccaggttttggaaatacttctattacctcgctgctacttttctgcagggataaaacttttgaggtggccagacccagaacatccaaggattcctgttacagtgctacagtatacactgctcatttatcctattctcatgtgctttcttctttagtaagattattttaagaaaataagtgatatttaaagtccaaagaggaatgatcacagttgtataaggggtgttttcccacttgaactctgatgtcagtcgactgtgggtcagagctacaaccatctgtttggtttgatgttttggtggtttacttacggagtggggatagtgtgagacctaattccctgtgcaaatgtctcttattccagaaatgtgcattttgtcatctataagcaagaaatatgggcatagcagctcttggtttaaagtttgccataacctgttcatgtttgttttaagctcaggtaaagataacctcctctttctatgactccagtttccattcaggttatagtattattcaatagttgattttctttttaagctgggcaataaattgatgtttccagatggtaacatgggagagggcatataggataaagatgagcaaattctaccctaaaaatgttctagtagttcacaggaagaagatgaggtttaataactttcaaggtaattctagattgacattttgaggggaaaatgggctcttgttctagttgaagtgagcagagaaggctataaattaatatgtaacttacagcattccagaggttaaaaataactgatgcagatgtacttcttcagtgtgattcttcagatcaaacttttacttttggcatagttaatttcagaaaaatgtgctgtatgtgtgtgtgtatgagggttggtcttgctgatccttcagttagctctaaattctggcaactccttgtaattccaatgtatttgatacatgaacaatcatgttgaatgcatttgtgatctgggagacttcctcgtcttccagggaaggaaggatgtgcagcccctgaaggcatgaaactcccagtgtgtacggagccagtggaatatgggatacccataccttaccaggcgctggttccttctgctcacaataacatctgcccaaagagggagtgggaagaacgcttagctctttcactagtatggatttgagttcatggtcactatttttacccacctgcctttgttaaaaatcactttgagtagaatagcactggaggaacatatttagcacctaatattaatatttagtagtccattgataaatttgccagcatatgttctagcctctggggggaaaccaggaccacttttgtctgtggcttaaacagttcagttgctatatctgttgggtatgccgggggtggatgagtgtggcattccgtgaagaggaaggtggtaagtaaggtttcccttctactgccttcttaagttgcaggagggagcttttctcctcccctctggttgggagcactgaggacagtgaggagggcttttaccttgttaatcctttccttatttagctagctttcctttttgtctagggcttcctcttgagaccctcttccatccattgggcctttgaaaggactaatcagacacacacacacacacacacacacacacacacacacactcgcatactcatgcacattttccttcatttccagatcctttatttcagagcagcccattttcctctggattcattgatgaatacaagtacccacacctttggccagtaatgtcagttacctgctgcaggttctgtgtatgaggccttcatgaacggttaccttctccatacactagggaagcatttgtcagactctgcagactgggttctagagaggcagagtctttaagagtattcatttcttctggaaggtggagctttacccaaagtggaagttagccttgctcaaagatgtgttttgtggtaggtggtaaaaataaataaataaataaataataaaaaaagaaacatgtattggaggtaatttgacactgctgctggcagtagttctctattcaccattttaaagcccattcaggttctctcttcctgaaaagaactgattgctgtgtttacatgaaatgacattggagtcagatggtctgttttaaagatttccatgacagcctcttttcctgagttggagagattggaggtggtctatccgtacgatgtggaatcaaacggtgggtttcttagtagctaaagaagccatgtacttctagtgtgtttctcagaatatcaactcatgttcttcagatgcttttctttttttaatggtgagggaaaaggtataatttgggattccacagtgccttgcatatagtaggcgcccagtaaatacttgttgaagcaaaccaagtttcccaagtcctcatctcttatagtgaccaagacatctttctcctctgaagggcttggcagttgtggctaaaaaataagcagtatcattatttgcttgaaatcatatatacagtttgtatgaatttcagtatgttgccaagacatgattttttcttattgtattttctgtaaatatttctggcactgaactgtaaagtaaaggcaaagtgtaaatatgaaggcgtgcccgtgccccttgcctcctgtgtttcatcttcgtcggttagggaagaaggtccagaggtttgtttgtatttatgccgatcctttgtccagaagaagcccatggaatattgaatgtaatacatttagtcaattaaattttaaggagattcttatctaataactttgtgtgtgcttttggatacaggctgaggctttactcctacactggtgctgttaattttaccctttcaggggatgtctgctcggctttggctgccctttataatttagatctgtagtttaaatgaacattaaatgagtatttcatg

SEQ ID NO: 445760 - DNA, 4832 bp, Homo sapiens
gtaaaagtgatggttgactcaggagaccggaagcgagccatcagttctgtgtgcacctacattgtttatcagtgtagtcggccagctcctttacactccagggatctgcactccatgatagtggcagcttttcagtgtctctgtgtctggctgacagagcaccctgatatgcttgatgaaaaggactgccttaaggaagtactggagattgtggaactgggtatctcaggaagtaagtccaagaacaatgagcaagaggtcaagtacaaaggagataaggagccaaaccctgcatctatgagggtaaaggatgctgctgaagccaccctaacatgcattatgcagttgctcggcgcatttccttcacctagtggtcctgcctctccttgtagtcttgtgaatgagaccactttgattaaatactccaggctgccaaccataaacaagcatagtttccggtactttgtcttggataacagtgtcatcctggcaatgctggaacaacctcttggaaatgagcagaatgattttttcccctctgtcactgtgctggtccggggaatgtctggaagacttgcttgggcacaacagctttgtcttttacccagaggagcaaaagcaaatcagaagctttttgtacctgaacctcgcccagttcctaaaaatgacgttggatttaaatattctgtgaaacatcggccatttcctgaagaggtggacaagattccttttgtgaaagcagatctcagcattccagatttgcatgaaatagtcactgaagaataaagagactggaaagtgactcctacagtcccccccatgtccgccggaaacagaaaatcaccgacattgtcaacaagtaccggaacaagcagctggagccagagttttatacttcacttttccaggaggttggactcaagaactgcagttcttagaccactgaatttctaagactgttgaactccagtttgggaactataacacagcagaacagtttgataggtgatcactgtaaaaataaaaacaaatcactcccaagagcttactgtttaatcaccagaatagaagaaacacattataacccatttgatagaagactttgggctatctagtgaaatgggctcccagacacaatcatactcctgctgataatgatgatatacattttagccataaactttcttttaaaagtgacaattttagttaaacataagccttttgaggagaaaggcttttatgcatctcagttaaacacgtgcattggtagtatcaacaaatttgcaatatagaagttgaagatagttttttacctcactttttaggaggttgtattcaaaattaaaatctcagaatcttacaggacatttaaagactcatgttgatagcatggaggagaaggaaagaagtcacagccttctactcagttgtaggtcttcttgtcatccagctgtcacactgacaaaaagaaaagatgatacatgttttttgctcagataagaagcctgacattaaaagatgtcatatttttttctccacatttcaaaaagttgtccttctcatcactgcacagatctgtctgaaagcctcagtttctgagtgacccaggaacagatcagaaatggagcatggccttgtcctttaatggggatgcaaataaagtttgtggggttaaaagttataagacagcagtgataccccactctctccattattgtccagcggggtgacataatgacaggttaaatatttgtgattcattgattaaatattatttaaagaaatgtaaattcacaataagggttgaaaattatttggtttcatccattgtctcttatttcaggaccaagcagcaaactgcagtagtttgtgaaggattctaatatggggttcaggaatagcctctcaacgctactaattcagatctctcccagagaactactggatttcctcataattgacaaacatgagtgaccacctctttgggtggctactgttagaaatggctgttgtcatgttttctggactttgccagccaacagatccctgccaggttttggaaatacttctattacctcgctgctacttttctgcagggataaaacttttgaggtggccagacccagaacatccaaggattcctgttacagtgctacagtatacactgctcatttatcctattctcatgtgctttcttctttagtaagattattttaagaaaataagtgatatttaaagtccaaagaggaatgatcacagttgtataaggggtgttttcccacttgaactctgatgtcagtcgactgtgggtcagagctacaaccatctgtttggtttgatgttttggtggtttacttacggagtggggatagtgtgagacctaattccctgtgcaaatgtctcttattccagaaatgtgcattttgtcatctataagcaagaaatatgggcatagcagctcttggtttaaagtttgccataacctgttcatgtttgttttaagctcaggtaaagataacctcctctttctatgactccagtttccattcaggttatagtattattcaatagttgattttctttttaagctgggcaataaattgatgtttccagatggtaacatgggagagggcatataggataaagatgagcaaattctaccctaaaaatgttctagtagttcacaggaagaagatgaggtttaataactttcaaggtaattctagattgacattttgaggggaaaatgggctcttgttctagttgaagtgagcagagaaggctataaattaatatgtaacttacagcattccagaggttaaaaataactgatgcagatgtacttcttcagtgtgattcttcagatcaaacttttacttttggcatagttaatttcagaaaaatgtgctgtatgtgtgtgtgtatgagggttggtcttgctgatccttcagttagctctaaattctggcaactccttgtaattccaatgtatttgatacatgaacaatcatgttgaatgcatttgtgatctgggagacttcctcgtcttccagggaaggaaggatgtgcagcccctgaaggcatgaaactcccagtgtgtacggagccagtggaatatgggatacccataccttaccaggcgctggttccttctgctcacaataacatctgcccaaagagggagtgggaagaacgcttagctctttcactagtatggatttgagttcatggtcactatttttacccacctgcctttgttaaaaatcactttgagtagaatagcactggaggaacatatttagcacctaatattaatatttagtagtccattgataaatttgccagcatatgttctagcctctggggggaaaccaggaccacttttgtctgtggcttaaacagttcagttgctatatctgttgggtatgccgggggtggatgagtgtggcattccgtgaagaggaaggtggtaagtaaggtttcccttctactgccttcttaagttgcaggagggagcttttctcctcccctctggttgggagcactgaggacagtgaggagggcttttaccttgttaatcctttccttatttagctagctttcctttttgtctagggcttcctcttgagaccctcttccatccattgggcctttgaaaggactaatcagacacacacacacacacacacacacacacacacacacactcgcatactcatgcacattttccttcatttccagatcctttatttcagagcagcccattttcctctggattcattgatgaatacaagtacccacacctttggccagtaatgtcagttacctgctgcaggttctgtgtatgaggccttcatgaacggttaccttctccatacactagggaagcatttgtcagactctgcagactgggttctagagaggcagagtctttaagagtattcatttcttctggaaggtggagctttacccaaagtggaagttagccttgctcaaagatgtgttttgtggtaggtggtaaaaataaataaataaataaataataaaaaaagaaacatgtattggaggtaatttgacactgctgctggcagtagttctctattcaccattttaaagcccattcaggttctctcttcctgaaaagaactgattgctgtgtttacatgaaatgacattggagtcagatggtctgttttaaagatttccatgacagcctcttttcctgagttggagagattggaggtggtctatccgtacgatgtggaatcaaacggtgggtttcttagtagctaaagaagccatgtacttctagtgtgtttctcagaatatcaactcatgttcttcagatgcttttctttttttaatggtgagggaaaaggtataatttgggattccacagtgccttgcatatagtaggcgcccagtaaatacttgttgaagcaaaccaagtttcccaagtcctcatctcttatagtgaccaagacatctttctcctctgaagggcttggcagttgtggctaaaaaataagcagtatcattatttgcttgaaatcatatatacagtttgtatgaatttcagtatgttgccaagacatgattttttcttattgtattttctgtaaatatttctggcactgaactgtaaagtaaaggcaaagtgtaaatatgaaggcgtgcccgtgccccttgcctcctgtgtttcatcttcgtcggttagggaagaaggtccagaggtttgtttgtatttatgccgatcctttgtccagaagaagcccatggaatattgaatgtaatacatttagtcaattaaattttaaggagattcttatcta

SEQ ID NO: 445761 - DNA, 4877 bp, Homo sapiens
gtaaaagtgatggttgactcaggagaccggaagcgagccatcagttctgtgtgcacctacattgtttatcagtgtagtcggccagctcctttacactccagggatctgcactccatgatagtggcagcttttcagtgtctctgtgtctggctgacagagcaccctgatatgcttgatgaaaaggactgccttaaggaagtactggagattgtggaactgggtatctcaggaagtaagtccaagaacaatgagcaagaggtcaagtacaaaggagataaggagccaaaccctgcatctatgagggtaaaggatgctgctgaagccaccctaacatgcattatgcagttgctcggcgcatttccttcacctagtggtcctgcctctccttgtagtcttgtgaatgagaccactttgattaaatactccaggctgccaaccataaacaagcatagtttccggtactttgtcttggataacagtgtcatcctggcaatgctggaacaacctcttggaaatgagcagaatgattttttcccctctgtcactgtgctggtccggggaatgtctggaagacttgcttgggcacaacagctttgtcttttacccagaggagcaaaagcaaatcagaagctttttgtacctgaacctcgcccagttcctaaaaatgacgttggatttaaatattctgtgaaacatcggccatttcctgaagaggtggacaagattccttttgtgaaagcagatctcagcattccagatttgcatgaaatagtcactgaagaatttagaagagagacacgaaaaattaaggagtggcatggcccagcagattgcttatgaaatacaccttgagcaacagagtgaggaggaattgcagaagagaagttttcctgacccagttacggattgcaagcccccgcctcctgcccaggaattccaaacagcccgcctttttctctcacactttggatttttgtccttagaagcactgaaggaacctgcaaatagtcgtctacctcctcaccttattgcacttgattccacgatacctggattttttgatgacattgggtatctggatctcttgccatgtcgtccttttgacacagtttttattttctatatgaagccaggtcagaaaacgaaccaagagattttaaagaatgtggagtcttccagaactgttcagccacatttcctagaatttttgctttcccttggctggtcagtagatgtgggcagacaccctggttggactgggcatgtttctaccagttggtctattaattgttgtgatgatggtgaaggatctcaacaagaagtgatttcctctgaagatattggagctagcattttcaatggacagaagaaggtgctgtattatgctgatgcccttacagaaattgcttttgtggttccttctcctgtggagtccttaactgattcattggaaagtaacatctcggaccaagatagtgattcaaatatggatcttatgccaggaattctgaaacagccatccctgacacttgagcttttccccaatcatacagacaatcttaattcctcacagaggctcagtcccagttccagaatgaggaagctgcctcagggtcgccctgttcctccccttggacctgagacaagagtttctgtagtctgggtggaacgctatgatgatatagaaaactttcccctctcagagctgatgacagagatcagtactggtgtggaaactactgcaaatagtagcacttcactgagatctacaactcttgaaaaagaagttcctgtcatcttcatccaccctttaaacactggattattccggataaaaattcaaggagccactggaaaatttaatatggtcatccctcttgtggatgggatgattgtcagcaggcgagctcttggctttctggtgaggcagactgtaattaacatttgtagaagaaagagactggaaagtgactcctacagtcccccccatgtccgccggaaacagaaaatcaccgacattgtcaacaagtaccggaacaagcagctggagccagagttttatacttcacttttccaggaggttggactcaagaactgcagttcttagaccactgaatttctaagactgttgaactccagtttgggaactataacacagcagaacagtttgataggtgatcactgtaaaaataaaaacaaatcactcccaagagcttactgtttaatcaccagaatagaagaaacacattataacccatttgatagaagactttgggctatctagtgaaatgggctcccagacacaatcatactcctgctgataatgatgatatacattttagccataaactttcttttaaaagtgacaattttagttaaacataagccttttgaggagaaaggcttttatgcatctcagttaaacacgtgcattggtagtatcaacaaatttgcaatatagaagttgaagatagttttttacctcactttttaggaggttgtattcaaaattaaaatctcagaatcttacaggacatttaaagactcatgttgatagcatggaggagaaggaaagaagtcacagccttctactcagttgtaggtcttcttgtcatccagctgtcacactgacaaaaagaaaagatgatacatgttttttgctcagataagaagcctgacattaaaagatgtcatatttttttctccacatttcaaaaagttgtccttctcatcactgcacagatctgtctgaaagcctcagtttctgagtgacccaggaacagatcagaaatggagcatggccttgtcctttaatggggatgcaaataaagtttgtggggttaaaagttataagacagcagtgataccccactctctccattattgtccagcggggtgacataatgacaggttaaatatttgtgattcattgattaaatattatttaaagaaatgtaaattcacaataagggttgaaaattatttggtttcatccattgtctcttatttcaggaccaagcagcaaactgcagtagtttgtgaaggattctaatatggggttcaggaatagcctctcaacgctactaattcagatctctcccagagaactactggatttcctcataattgacaaacatgagtgaccacctctttgggtggctactgttagaaatggctgttgtcatgttttctggactttgccagccaacagatccctgccaggttttggaaatacttctattacctcgctgctacttttctgcagggataaaacttttgaggtggccagacccagaacatccaaggattcctgttacagtgctacagtatacactgctcatttatcctattctcatgtgctttcttctttagtaagattattttaagaaaataagtgatatttaaagtccaaagaggaatgatcacagttgtataaggggtgttttcccacttgaactctgatgtcagtcgactgtgggtcagagctacaaccatctgtttggtttgatgttttggtggtttacttacggagtggggatagtgtgagacctaattccctgtgcaaatgtctcttattccagaaatgtgcattttgtcatctataagcaagaaatatgggcatagcagctcttggtttaaagtttgccataacctgttcatgtttgttttaagctcaggtaaagataacctcctctttctatgactccagtttccattcaggttatagtattattcaatagttgattttctttttaagctgggcaataaattgatgtttccagatggtaacatgggagagggcatataggataaagatgagcaaattctaccctaaaaatgttctagtagttcacaggaagaagatgaggtttaataactttcaaggtaattctagattgacattttgaggggaaaatgggctcttgttctagttgaagtgagcagagaaggctataaattaatatgtaacttacagcattccagaggttaaaaataactgatgcagatgtacttcttcagtgtgattcttcagatcaaacttttacttttggcatagttaatttcagaaaaatgtgctgtatgtgtgtgtgtatgagggttggtcttgctgatccttcagttagctctaaattctggcaactccttgtaattccaatgtatttgatacatgaacaatcatgttgaatgcatttgtgatctgggagacttcctcgtcttccagggaaggaaggatgtgcagcccctgaaggcatgaaactcccagtgtgtacggagccagtggaatatgggatacccataccttaccaggcgctggttccttctgctcacaataacatctgcccaaagagggagtgggaagaacgcttagctctttcactagtatggatttgagttcatggtcactatttttacccacctgcctttgttaaaaatcactttgagtagaatagcactggaggaacatatttagcacctaatattaatatttagtagtccattgataaatttgccagcatatgttctagcctctggggggaaaccaggaccacttttgtttgtggctaaaaaataagcagtatcattatttgcttgaaatcatatatacagtttgtatgaatttcagtatgttgccaagacatgattttttcttattgtattttctgtaaatatttctggcactgaactgtaaagtaaaggcaaagtgtaaatatgaaggcgtgcccgtgccccttgcctcctgtgtttcatcttcgtcggttagggaagaaggtccagaggtttgtttgtatttatgccgatcctttgtccagaagaagcccatggaatattgaatgtaatacatttagtcaattaaattttaaggagattcttatcta

SEQ ID NO: 445762 - DNA, 2208 bp, Homo sapiens
gtaaaagtgatggttgactcaggagaccggaagcgagccatcagttctgtgtgcacctacattgtttatcagtgtagtcggccagctcctttacactccagggatctgcactccatgatagtggcagcttttcagtgtctctgtgtctggctgacagagcaccctgatatgcttgatgaaaaggactgccttaaggaagtactggagattgtggaactgggtatctcaggaagtaagtccaagaacaatgagcaagaggtcaagtacaaaggagataaggagccaaaccctgcatctatgagggtaaaggatgctgctgaagccaccctaacatgcattatgcagttgctcggcgcatttccttcacctagtggtcctgcctctccttgtagtcttgtgaatgagaccactttgattaaatactccaggctgccaaccataaacaagcatagtttccggtactttgtcttggataacagtgtcatcctggcaatgctggaacaacctcttggaaatgagcagaatgattttttcccctctgtcactgtgctggtccggggaatgtctggaagacttgcttgggcacaacagctttgtcttttacccagaggagcaaaagcaaatcagaagctttttgtacctgaacctcgcccagttcctaaaaatgacgttggatttaaatattctgtgaaacatcggccatttcctgaagaggtggacaagattccttttgtgaaagcagatctcagcattccagatttgcatgaaatagtcactgaagaatttagaagagagacacgaaaaattaaggagtggcatggcccagcagattgcttatgaaatacaccttgagcaacagagtgaggaggaattgcagaagagaagttttcctgacccagttacggattgcaagcccccgcctcctgcccaggaattccaaacagcccgcctttttctctcacactttggatttttgtccttagaagcactgaaggaacctgcaaatagtcgtctacctcctcaccttattgcacttgattccacgatacctggattttttgatgacattgggtatctggatctcttgccatgtcgtccttttgacacagtttttattttctatatgaagccaggtcagaaaacgaaccaagagattttaaagaatgtggagtcttccagaactgttcagccacatttcctagaatttttgctttcccttggctggtcagtagatgtgggcagacaccctggttggactgggcatgtttctaccagttggtctattaattgttgtgatgatggtgaaggatctcaacaagaagtgatttcctctgaagatattggagctagcattttcaatggacagaagaaggtgctgtattatgctgatgcccttacagaaattgcttttgtggttccttctcctgtggagtccttaactgattcattggaaagtaacatctcggaccaagatagtgattcaaatatggatcttatgccaggaattctgaaacagccatccctgacacttgagcttttccccaatcatacagacaatcttaattcctcacagaggctcagtcccagttccagaatgaggaagctgcctcagggtcgccctgttcctccccttggacctgagacaagagtttctgtagtctgggtggaacgctatgatgatatagaaaactttcccctctcagagctgatgacagagatcagtactggtgtggaaactactgcaaatagtagcacttcactgagatctacaactcttgaaaaagaagttcctgtcatcttcatccaccctttaaacactggattattccggataaaaattcaaggagccactggaaaatttaatatggtcatccctcttgtggatgggatgattgtcagcaggcgagctcttggctttctggtgaggcagactgtaattaacatttgtagaagaaagagactggaaagtgactcctacagtcccccccatgtccgccggaaacagaaaatcaccgacattgtcaacaagtaccggaacaagcagctggagccagagttttatacttcacttttccaggaggttggactcaagaactgcagttcttagaccactgaatttctaagactgttgaactccagtttgggaactataacacagcagaacagtttgataggtgatcactgtaaaaataaaaacaaatcactccc

SEQ ID NO: 445763 - DNA, 777 bp, Homo sapiens
caaagtcgtcccaccatcaatgaaggcaggccacttccggcgtagccatggcggctaacgctactaccaacccgtcgcagctgctgccgttagagcttgtggacaaatgtataggatcaagaattcacatcgtgatgaagagtgataaggaaattgttggtactcttctaggatttgatgactttgtcaatatggtactggaagatgtcactgagtttgaaatcacaccagaaggaagaaggattactaaattagatcagattttgctaaatggaaataatataacaatgctggttcctggaggagaaggacctgaagtgtgaatgagtttccttgacttacactagattttgttttggcttataatgacaagaaaatggaattttttttcccactttctaatgtttaaatcccataaagctaagtttcccgttaaagggaagtgctttgaagatgtgtacccatttttgtaagttaatcatgattatcctggaaaaagaagaaaagagcttcttctttgcagatgaaaataaaggtgtttttggttaactgtcattttgtttattctactgcagtagccagtggaacaaagtttgtagttattttgccacttacttttctgtcattatatgcttatttgttttgtcatttacgtgaccatttgattctcaaacaaaagttgttccaaacaaaatgatgaactttgatttgaacaggtgcatttaaacaaccggaaatgatcacttagaaaattcaattaaaatgctgttgttttgt

SEQ ID NO: 445764 - DNA, 549 bp, Homo sapiens
caaagtcgtcccaccatcaatgaaggcaggccacttccggcgtagccatggcggctaacgctactaccaacccgtcgcagctgctgccgttagagcttgtggacaaatgtataggatcaagaattcacatcgtgatgaagagtgataaggaaattgttggtactcttctaggatttgatgactttgtcaatatggtactggaagatgtcactgagtttgaaatcacaccagaaggaagaaggattactaaattagatcagattttgctaaatggaaataatataacaatgctggttcctggaggagaaggacctgaagtgtgaatgagtttccttgacttacactagattttgttttggcttataatgacaagaaaatggaattttttttcccactttctaatgtttaaatcccataaagctaagtttcccgttaaagggaagtgctttgaagatgtgtacccatttttgtaagttaatcatgattatcctggaaaaagaagaaaagagcttcttctttgcagatgaaaataaaggtgtttttggttaa

SEQ ID NO: 445765 - DNA, 1147 bp, Homo sapiens
tttgcttgttctgtttggttatgtgttgtgtctgcttgtgtggttctcgtttcgtgcgtgtgtgttgttctgtgcatcgttctctgtttctcgttctggtatggttgcgctgcttgtgctttctgttttctccgtctcgctcgtctgctgctcttcagtgcatactgctgtattggttgttgcctccttcgtgcttttcctgtcccttctcgctccgctcgttgtgtgggtattgtgagatgctgctctgcctcgtccatttttttatatattctcccctgagagacattgtgtgtgggcgcggatgaatagggcggggtgtgccccctcattcctcttgaggtgtgtttcctccgggcgtataatctctctgtgttgtctcgcatatggttcccccgccccgtgttgtgttctctcccaagtgtcgcccctgttagattgttctcctctgcggccgtggttttagtgccgcgcgcgttgttgctgtgttatttcgctctcttttgcgcgcctttctcaaaatctgtgtgtctattatttgtgcgcccctctggggtttttttatggcgccccccctcctttttgtgttttttttttttttttgtttttttttttttgtttttttttttttttttttttttttttttggcggctaacgctactaccaacccgtcgcagctgctgccgttagagcttgtggacaaatgtataggatcaagaattcacatcgtgatgaagagtgataaggaaattgttggtactcttctaggatttgatgactttgtcaatatggtactggaagatgtcactgagtttgaaatcacaccagaaggaagaaggattactaaattagatcagattttgctaaatggaaataatataacaatgctggttcctggaggagaaggacctgaagtgtgaatgagtttccttgacttacactagattttgttttggcttataatgacaagaaaatggaattttttttcccactttctaatgtttaaatcccataaagctaagtttcccgttaaagggaagtgctttgaagatgtgtacccatttttgtaagttaatcatgattatcctggaaaaagaagaaaagagcttcttctttgcagatgaaaataaaggtgtttttggttaa

SEQ ID NO: 445766 - DNA, 793 bp, Homo sapiens
  misc_feature (696)..(696): n is a, c, g, or t
  misc_feature (720)..(720): n is a, c, g, or t
  misc_feature (761)..(761): n is a, c, g, or t
  misc_feature (777)..(777): n is a, c, g, or t
  misc_feature (793)..(793): n is a, c, g, or t
caaagtcgtcccaccatcaatgaaggcaggccacttccggcgtagccatggcggctaacgctactaccaacccgtcgcagctgctgccgttagagcttgtggacaaatgtataggatcaagaattcacatcgtgatgaagagtgataaggaaattgttggtactcttctaggatttgatgactttgtcaatatggtactggaagatgtcactgagtttgaaatcacaccagaaggaagaaggattactaaattagatcagattttgctaaatggaaataatataacaatgctggttcctggaggagaaggacctgaagtgtgaatgagtttccttgacttacactagattttgttttggcttataatgacaagaaaatggaattttttttcccactttctaatgtttaaatcccataaagctaagtttcccgttaaagggaagtgctttgaagatgtgtacccatttttgtaagttaatcatgattatcctggaaaaagaagaaaagagcttcttctttgcagatgaaaataaaggtgtttttggttaactgtcattttgtttattctactgcagtagccagtggaacaaagtttgtagttattttgccacttacttttctgtcattatatgcttatttgttttgtcatttacgtgaccatttgattctcaaacaaaagttgttccaaacaaaaantgaatgaaactttttgaattttgnaaacaagggttggcatttttaaaaccaaaccccgggaaaantggatccacttttaanaaaaaaattcccattn

SEQ ID NO: 445767 - DNA, 532 bp, Homo sapiens
tcactggaaaaggtccacatttagtgaacgcgtcgtcggcctactttgttgtgagcccgcctctgcagtgttatagagcttgtggacaaatgtataggatcaagaattcacatcgtgatgaagagtgataaggaaattgttggtactcttctaggatttgatgactttgtcaatatggtactggaagatgtcactgagtttgaaatcacaccagaaggaagaaggattactaaattagatcagattttgctaaatggaaataatataacaatgctggttcctggaggagaaggacctgaagtgtgaatgagtttccttgacttacactagattttgttttggcttataatgacaagaaaatggaattttttttcccactttctaatgtttaaatcccataaagctaagtttcccgttaaagggaagtgctttgaagatgtgtacccatttttgtaagttaatcatgattatcctggaaaaagaagaaaagagcttcttctttgcagatgaaaataaaggtgtttttggttaa

SEQ ID NO: 445768 - DNA, 875 bp, Homo sapiens
  misc_feature (753)..(753): n is a, c, g, or t
  misc_feature (796)..(796): n is a, c, g, or t
  misc_feature (830)..(830): n is a, c, g, or t
tacgtgacccgggcggctgggcttgcagagcctgtggtgtccgcgggacctggagagcttgtggacaaatgtataggatcaagaattcacatcgtgatgaagagtgataaggaaattgttggtactcttctaggatttgatgactttgtcaatatggtactggaagatgtcactgagtttgaaatcacaccagaaggaagaaggattactaaattagatcagattttgctaaatggaaataatataacaatgctggttcctggaggagaaggacctgaagtgtgaatgagtttccttgacttacactagattttgttttggcttataatgacaagaaaatggaattttttttcccactttctaatgtttaaatcccataaagctaagtttcccgttaaagggaagtgctttgaagatgtgtacccatttttgtaagttaatcatgattatcctggaaaaagaagaaaagagcttcttctttgcagatgaaaataaaggtgtttttggttaactgtcattttgtttattctactgcagtagccagtggaacaaagtttgtagttattttgccacttacttttctgtcattatatgcttatttgttttgtcatttacgtgaccatttgattctcaaacaaaagttgttccaaacaaaatgatgaactttgatttgaacaggtgcatttaaacaaccggaaatgatcttgaaatcattaatggcggtgttgtgcaaaaaaaaaaaaaaaaaattgngggcggccgaaatttaaacttggggcggccagaagaaggaagngaacgggggaggggttccaaaacgggggtgaacnaggtgtcggtctatccccccccccgcgaaaaaaaaaaaaggagtt

SEQ ID NO: 445769 - DNA, 2212 bp, Homo sapiens
tacgtgacccgggcggctgggcttgcagagcctgtggtgtccgcgggacctggagagcttgtggacaaatgtataggatcaagaattcacatcgtgatgaagagtgataaggaaattgttggtactcttctaggatttgatgactttgtcaatatggtactggaagatgtcactgagtttgaaatcacaccagaaggaagaaggattactaaattagatcagattttgctaaatggaaataatataacaatgctggttcctggaggagaaggacctgaagtgtgaatgagtttccttgacttacactagattttgttttggcttataatgacaagaaaatggaattttttttcccactttctaatgtttaaatcccataaagctaagtttcccgttaaagggaagtgctttgaagatgtgtacccatttttgtaagttaatcatgattatcctggaaaaagaagaaaagagcttcttctttgcagatgaaaataaaggtgtttttggttaactgtcattttgtttattctactgcagtagccagtggaacaaagtttgtagttattttgccacttacttttctgtcattatatgcttatttgttttgtcatttacgtgaccatttgattctcaaacaaaagttgttccaaacaaaatgatgaactttgatttgaacaggtgcatttaaacaaccggaaatgatcacttagaaaattcaattaaaatgctgttgttttgtaatgaggatttttcttctgatttcaaattccatgaactcctattgaaaacaaacaatgtacaggtaatatatgcacattgtagaaatgcaggaattatctattggaattaccctaaagatagaaattttatctatttgcttataaaattgattcagaaggttattaccttaatgtagttattactgaattgccaggaaatgagtggagacagagctttaagataaaggatactaaaaacagctaagaactccaggactcaggtcaaatcaaggaactgataataagatcattgaactgtataaattaagtcaaagaactcctattaaaaacaaacaggtaatatatgcacattgtagaattgtaggtaagcaaaaaggagaaggttgatcatgctttgctgtatgtcttcgtagactttctcagtccactctcagtacacgttttattttacttgctcatcctgattatactgtttttaccctccacttaagtcattttttgaatttaaatggtgaatatctttctgtgtcaaatatttcaacattaatatgtacatagtattaaatggatttactataaattatttagcctattcttactggccacagtagtctaactagatctttatacatttgtatttttctagaataaactcaaaaatgtgtaagatcaaagggtatatattgtgttgccaagaaaaagtttgtgccaatgtatatttttgccaggagtctttcatagtaccatttatatccttcccagcattagctgtgttctaccttctctcctctttgccatttttacaagaaaaccgggcatgtctaaagttttcttttcctttttttttttttttttgttttttggagagtctcactggaatgcagtggcatgatcttggctccctgcaacctccagtcaggctggtgtgccttgtcgcgatatcaacgcgacctccgcctcccaggttcaagtgattgtcctgcctcaccctcctgagtagctgggattacaggtgggcgccaccactcccatctaatttttatatttttagagagatggggttttaccttgttggccaggctggtcttgaactcctgacctctagtgatccacctgcctcagcctcccaaagtgccggtattaaaggcatgagccaccaggcctggcctaaaattttcttgattaattttgatctcatttgtattttgtaaatgacttatctgttgaggcttttgccattgagatgtttgtctttttcttactaatttgtaagaattcttgatgggtttctgttagtcatgtattttgctaataatttccctagtttgtagtttgccacttagtgctatttttgacataaatgatgtattttaatgtagttgcatgttgacctagtccattatggtttttgtatttggtccacgtggattggaaaacctttgctttgattatacttttctttgggcacttta

SEQ ID NO: 445770 - DNA, 2233 bp, Homo sapiens
tcactggaaaaggtccacatttagtgaacgcgtcgtcggcctactttgttgtgagcccgcctctgcagtgttatagagcttgtggacaaatgtataggatcaagaattcacatcgtgatgaagagtgataaggaaattgttggtactcttctaggatttgatgactttgtcaatatggtactggaagatgtcactgagtttgaaatcacaccagaaggaagaaggattactaaattagatcagattttgctaaatggaaataatataacaatgctggttcctggaggagaaggacctgaagtgtgaatgagtttccttgacttacactagattttgttttggcttataatgacaagaaaatggaattttttttcccactttctaatgtttaaatcccataaagctaagtttcccgttaaagggaagtgctttgaagatgtgtacccatttttgtaagttaatcatgattatcctggaaaaagaagaaaagagcttcttctttgcagatgaaaataaaggtgtttttggttaactgtcattttgtttattctactgcagtagccagtggaacaaagtttgtagttattttgccacttacttttctgtcattatatgcttatttgttttgtcatttacgtgaccatttgattctcaaacaaaagttgttccaaacaaaatgatgaactttgatttgaacaggtgcatttaaacaaccggaaatgatcacttagaaaattcaattaaaatgctgttgttttgtaatgaggatttttcttctgatttcaaattccatgaactcctattgaaaacaaacaatgtacaggtaatatatgcacattgtagaaatgcaggaattatctattggaattaccctaaagatagaaattttatctatttgcttataaaattgattcagaaggttattaccttaatgtagttattactgaattgccaggaaatgagtggagacagagctttaagataaaggatactaaaaacagctaagaactccaggactcaggtcaaatcaaggaactgataataagatcattgaactgtataaattaagtcaaagaactcctattaaaaacaaacaggtaatatatgcacattgtagaattgtaggtaagcaaaaaggagaaggttgatcatgctttgctgtatgtcttcgtagactttctcagtccactctcagtacacgttttattttacttgctcatcctgattatactgtttttaccctccacttaagtcattttttgaatttaaatggtgaatatctttctgtgtcaaatatttcaacattaatatgtacatagtattaaatggatttactataaattatttagcctattcttactggccacagtagtctaactagatctttatacatttgtatttttctagaataaactcaaaaatgtgtaagatcaaagggtatatattgtgttgccaagaaaaagtttgtgccaatgtatatttttgccaggagtctttcatagtaccatttatatccttcccagcattagctgtgttctaccttctctcctctttgccatttttacaagaaaaccgggcatgtctaaagttttcttttcctttttttttttttttttgttttttggagagtctcactggaatgcagtggcatgatcttggctccctgcaacctccagtcaggctggtgtgccttgtcgcgatatcaacgcgacctccgcctcccaggttcaagtgattgtcctgcctcaccctcctgagtagctgggattacaggtgggcgccaccactcccatctaatttttatatttttagagagatggggttttaccttgttggccaggctggtcttgaactcctgacctctagtgatccacctgcctcagcctcccaaagtgccggtattaaaggcatgagccaccaggcctggcctaaaattttcttgattaattttgatctcatttgtattttgtaaatgacttatctgttgaggcttttgccattgagatgtttgtctttttcttactaatttgtaagaattcttgatgggtttctgttagtcatgtattttgctaataatttccctagtttgtagtttgccacttagtgctatttttgacataaatgatgtattttaatgtagttgcatgttgacctagtccattatggtttttgtatttggtccacgtggattggaaaacctttgctttgattatacttttctttgggcacttta

SEQ ID NO: 445771 - DNA, 4107 bp, Homo sapiens
tttgcttgttctgtttggttatgtgttgtgtctgcttgtgtggttctcgtttcgtgcgtgtgtgttgttctgtgcatcgttctctgtttctcgttctggtatggttgcgctgcttgtgctttctgttttctccgtctcgctcgtctgctgctcttcagtgcatactgctgtattggttgttgcctccttcgtgcttttcctgtcccttctcgctccgctcgttgtgtgggtattgtgagatgctgctctgcctcgtccatttttttatatattctcccctgagagacattgtgtgtgggcgcggatgaatagggcggggtgtgccccctcattcctcttgaggtgtgtttcctccgggcgtataatctctctgtgttgtctcgcatatggttcccccgccccgtgttgtgttctctcccaagtgtcgcccctgttagattgttctcctctgcggccgtggttttagtgccgcgcgcgttgttgctgtgttatttcgctctcttttgcgcgcctttctcaaaatctgtgtgtctattatttgtgcgcccctctggggtttttttatggcgccccccctcctttttgtgttttttttttttttttgtttttttttttttgtttttttttttttttttttttttttttttggcggctaacgctactaccaacccgtcgcagctgctgccgttagagcttgtggacaaatgtataggatcaagaattcacatcgtgatgaagagtgataaggaaattgttggtactcttctaggatttgatgactttgtcaatatggtactggaagatgtcactgagttgtgagtagtgttaaagaattggggggaatctcttcttaattaaagacagttttactacttttgagtaaaattatttatgagaaaacattacctcttggtggaataacgttaaagatagacgttttatctgtttgcttgtaaaattggatcagagtgttattaccttaatgtaattattagtaaacgcctagaatattagtggagacacagttttaaggtagaagataacaaaaagagccaggaattttagggttcaggtcaaataaaggaactgatagtaagagcatttaggctggacatggtggctcattcctgtaatcctagcactttggaaggccaaaggaggaggattaagcctgggagtttgagaccagcctgggcaacaaagggagacccctgtctctataaaaaatttaaaaattagctggttatagtagggggcagctgtagtcctagctgctctggagggtgaggatcccttgagcccaggagttctaggctgcagtgaactatgattgtaccactgtactcagcctgggcaacagagcaagaccctgtctcttaaaaaaaaaaaaaacccaaaaaacatttcatttcatatttgatctcctgggcaagctttcacttctttttatgaagctctgtctgatagacgtgggtcttagtgtcagtgagttcattctgctgcttttaatgaaggttacattacctagtggataacctttgtatctgaaaattgtggatataattgctcaacctcagtgtaatttgtatacaaggataacctttttagggagggtaagtatttccaaaatgttggctttgattttcactgtttgtcctgactgtattttatctattcatttagtgaaatcacaccagaaggaagaaggattactaaattagatcagattttgctaaatggaaataatataacaatggtaagacacattgaaactgttttattttgatgggagcccatttttggggagcagtgattacagaactaaccttaatgttgcttgcttgactaaatgatcatggcccagtggtgcataagatgggaaaggggttctctgtggtcagggtcctaaagctcagctattgaagaggcattgggtctaaaggttagtttgcttggaacttttaatcgctgttgagatagtaagtattaattgatgacgttgggaattgtaaatagatactgacaatctggagaaaatgggaacgtggagtgcaggggacaggcaaaggtggcttaatgaagagcaaggggtttttagatgacatggtggtagtgttattaataaactctttttcctctttatgcagctggttcctggaggagaaggacctgaagtgtgaatgagtttccttgacttacactagattttgttttggcttataatgacaagaaaatggaattttttttcccactttctaatgtttaaatcccataaagctaagtttcccgttaaagggaagtgctttgaagatgtgtacccatttttgtaagttaatcatgattatcctggaaaaagaagaaaagagcttcttctttgcagatgaaaataaaggtgtttttggttaactgtcattttgtttattctactgcagtagccagtggaacaaagtttgtagttattttgccacttacttttctgtcattatatgcttatttgttttgtcatttacgtgaccatttgattctcaaacaaaagttgttccaaacaaaatgatgaactttgatttgaacaggtgcatttaaacaaccggaaatgatcacttagaaaattcaattaaaatgctgttgttttgtaatgaggatttttcttctgatttcaaattccatgaactcctattgaaaacaaacaatgtacaggtaatatatgcacattgtagaaatgcaggaattatctattggaattaccctaaagatagaaattttatctatttgcttataaaattgattcagaaggttattaccttaatgtagttattactgaattgccaggaaatgagtggagacagagctttaagataaaggatactaaaaacagctaagaactccaggactcaggtcaaatcaaggaactgataataagatcattgaactgtataaattaagtcaaagaactcctattaaaaacaaacaggtaatatatgcacattgtagaattgtaggtaagcaaaaaggagaaggttgatcatgctttgctgtatgtcttcgtagactttctcagtccactctcagtacacgttttattttacttgctcatcctgattatactgtttttaccctccacttaagtcattttttgaatttaaatggtgaatatctttctgtgtcaaatatttcaacattaatatgtacatagtattaaatggatttactataaattatttagcctattcttactggccacagtagtctaactagatctttatacatttgtatttttctagaataaactcaaaaatgtgtaagatcaaagggtatatattgtgttgccaagaaaaagtttgtgccaatgtatatttttgccaggagtctttcatagtaccatttatatccttcccagcattagctgtgttctaccttctctcctctttgccatttttacaagaaaaccgggcatgtctaaagttttcttttcctttttttttttttttttgttttttggagagtctcactggaatgcagtggcatgatcttggctccctgcaacctccagtcaggctggtgtgccttgtcgcgatatcaacgcgacctccgcctcccaggttcaagtgattgtcctgcctcaccctcctgagtagctgggattacaggtgggcgccaccactcccatctaatttttatatttttagagagatggggttttaccttgttggccaggctggtcttgaactcctgacctctagtgatccacctgcctcagcctcccaaagtgccggtattaaaggcatgagccaccaggcctggcctaaaattttcttgattaattttgatctcatttgtattttgtaaatgacttatctgttgaggcttttgccattgagatgtttgtctttttcttactaatttgtaagaattcttgatgggtttctgttagtcatgtattttgctaataatttccctagtttgtagtttgccacttagtgctatttttgacataaatgatgtattttaatgtagttgcatgttgacctagtccattatggtttttgtatttggtccacgtggattggaaaacctttgctttgattatacttttctttgggcacttta

SEQ ID NO: 445772 - DNA, 996 bp, Homo sapiens
  misc_feature (861)..(861): n is a, c, g, or t
caaagtcgtcccaccatcaatgaaggcaggccacttccggcgtagccatggcggctaacgctactaccaacccgtcgcagctgctgccgttagagcttgtggacaaatgtataggatcaagaattcacatcgtgatgaagagtgataaggaaattgttggtactcttctaggatttgatgactttgtcaatatggtactggaagatgtcactgagtttgaaatcacaccagaaggaagaaggattactaaattagatcagattttgctaaatggaaataatataacaatgctggttcctggaggagaaggacctgaagtgtgaatgagtttccttgacttacactagattttgttttggcttataatgacaagaaaatggaattttttttcccactttctaatgtttaaatcccataaagctaagtttcccgttaaagggaagtgctttgaagatgtgtacccatttttgtaagttaatcatgattatcctggaaaaagaagaaaagagcttcttctttgcagatgaaaataaaggtgtttttggttaaaaaaaaaaaaaaaaaaaaaaaaaaaaaaaaaaaaaaaaaaaaaaaaaaaaaaaaaaaaaaaagaggggggggggcgcaaaaaaatctcccggggggcggcaatgagcaccccttttttggaaaaaagggggccccaaaagggggcttataaaaggggggggcgccgcgagcttattaaaacaacggccgcgagggggaaaacacagtcgtcgtatgggggagacagcatgggagaaaagaacccgccctatcgggggcggggcggcaacataatgggggaaccaccatccccccaaagaagaagatattacncaccccggagcgagtaacataaaccccgcgaggggactaatgcggtggggtcaacccaccgagccgcatataagccgtggcgaagaaaaattgctgcccggaggctttcacgtgcggcaaacattataagacgga

SEQ ID NO: 445773 - DNA, 1006 bp, Homo sapiens
tttgcttgttctgtttggttatgtgttgtgtctgcttgtgtggttctcgtttcgtgcgtgtgtgttgttctgtgcatcgttctctgtttctcgttctggtatggttgcgctgcttgtgctttctgttttctccgtctcgctcgtctgctgctcttcagtgcatactgctgtattggttgttgcctccttcgtgcttttcctgtcccttctcgctccgctcgttgtgtgggtattgtgagatgctgctctgcctcgtccatttttttatatattctcccctgagagacattgtgtgtgggcgcggatgaatagggcggggtgtgccccctcattcctcttgaggtgtgtttcctccgggcgtataatctctctgtgttgtctcgcatatggttcccccgccccgtgttgtgttctctcccaagtgtcgcccctgttagattgttctcctctgcggccgtggttttagtgccgcgcgcgttgttgctgtgttatttcgctctcttttgcgcgcctttctcaaaatctgtgtgtctattatttgtgcgcccctctggggtttttttatggcgccccccctcctttttgtgttttttttttttttttgtttttttttttttgtttttttttttttttttttttttttttttggcggctaacgctactaccaacccgtcgcagctgctgccgttagagcttgtggacaaatgtataggatcaagaattcacatcgtgatgaagagtgataaggaaattgttggtactcttctaggatttgatgactttgtcaatatggtactggaagatgtcactgagtttgaaatcacaccaaaagagaaaaagaaggattgatcagagcattgtgcaatacagtttcattaactccttccctcgctcccccaaaaatttgaatttttttttcaacactcttacacctgttatggaaaatgtcaacctttgtaagaaaaccaaaataaaaattgaaaaataaaaaccataaacatttgca

SEQ ID NO: 445774 - DNA, 713 bp, Homo sapiens
aaggcagaagctagagtaaattctgtatttattttcttaacaccaaatttcagatatggtactggaagatgtcactgagttgtgagtagtgttaaagaattggggggaatctcttcttaattaaagacagttttactacttttgagtaaaattatttatgagaaaacattacctcttggtggaataacgttaaagatagacgttttatctgtttgcttgtaaaattggatcagagtgttattaccttaatgtaattattagtaaacgcctagaatattagtggagacacagttttaaggtagaagataacaaaaagagccaggaattttagggttcaggtcaaataaaggaactgatagtaagagcatttaggctggacatggtggctcattcctgtaatcctagcactttggaaggccaaaggaggaggattaagcctgggagtttgagaccagcctgggcaacaaagggagacccctgtctctataaaaaatttaaaaattagctggttatagtagggggcagctgtagtcctagctgctctggagggtgaggatcccttgagcccaggagttctaggctgcagtgaactatgattgtaccactgtactcagcctgggcaacagagcaagaccctgtctcttaaaaaaaaaaaaaacccaaaaaacatttcatttcatatttgatctcctgggcaagctttcacttctttt

SEQ ID NO: 445775 - DNA, 511 bp, Homo sapiens
tacgtgacccgggcggctgggcttgcagagcctgtggtgtccgcgggacctggagagcttgtggacaaatgtataggatcaagaattcacatcgtgatgaagagtgataaggaaattgttggtactcttctaggatttgatgactttgtcaatatggtactggaagatgtcactgagtttgaaatcacaccagaaggaagaaggattactaaattagatcagattttgctaaatggaaataatataacaatgctggttcctggaggagaaggacctgaagtgtgaatgagtttccttgacttacactagattttgttttggcttataatgacaagaaaatggaattttttttcccactttctaatgtttaaatcccataaagctaagtttcccgttaaagggaagtgctttgaagatgtgtacccatttttgtaagttaatcatgattatcctggaaaaagaagaaaagagcttcttctttgcagatgaaaataaaggtgtttttggttaa

SEQ ID NO: 445776 - DNA, 531 bp, Homo sapiens
taccgtatctttatttcttttgctaattttatttctttttgccgctactaccaacccgtcgcagctgctgccgttagagcttgtggacaaatgtataggatcaagaattcacatcgtgatgaagagtgataaggaaattgttggtactcttctaggatttgatgactttgtcaatatggtactggaagatgtcactgagtttgaaatcacaccagaaggaagaaggattactaaattagatcagattttgctaaatggaaataatataacaatgctggttcctggaggagaaggacctgaagtgtgaagagtaaccccacaaagccagattgcagttcttgcccctttttgcgtgtgacatgagatgttaaagaattattcatagtgctcacattgggttaggggacgtctgaccgtgctatttagagccatgatcagtcgtcattcttctaagagagtggagctttgctgtttcattaactgtacagtgtagactaatggtgtttaataaaaatcattcagaatttcgaa

SEQ ID NO: 445777 - DNA, 2234 bp, Homo sapiens
taccgtatctttatttcttttgctaattttatttctttttgccgctactaccaacccgtcgcagctgctgccgttagagcttgtggacaaatgtataggatcaagaattcacatcgtgatgaagagtgataaggaaattgttggtactcttctaggatttgatgactttgtcaatatggtactggaagatgtcactgagtttgaaatcacaccagaaggaagaaggattactaaattagatcagattttgctaaatggaaataatataacaatgctggttcctggaggagaaggacctgaagtgtgaatgagtttccttgacttacactagattttgttttggcttataatgacaagaaaatggaattttttttcccactttctaatgtttaaatcccataaagctaagtttcccgttaaagggaagtgctttgaagatgtgtacccatttttgtaagttaatcatgattatcctggaaaaagaagaaaagagcttcttctttgcagatgaaaataaaggtgtttttggttaactgtcattttgtttattctactgcagtagccagtggaacaaagtttgtagttattttgccacttacttttctgtcattatatgcttatttgttttgtcatttacgtgaccatttgattctcaaacaaaagttgttccaaacaaaatgatgaactttgatttgaacaggtgcatttaaacaaccggaaatgatcacttagaaaattcaattaaaatgctgttgttttgtaatgaggatttttcttctgatttcaaattccatgaactcctattgaaaacaaacaatgtacaggtaatatatgcacattgtagaaatgcaggaattatctattggaattaccctaaagatagaaattttatctatttgcttataaaattgattcagaaggttattaccttaatgtagttattactgaattgccaggaaatgagtggagacagagctttaagataaaggatactaaaaacagctaagaactccaggactcaggtcaaatcaaggaactgataataagatcattgaactgtataaattaagtcaaagaactcctattaaaaacaaacaggtaatatatgcacattgtagaattgtaggtaagcaaaaaggagaaggttgatcatgctttgctgtatgtcttcgtagactttctcagtccactctcagtacacgttttattttacttgctcatcctgattatactgtttttaccctccacttaagtcattttttgaatttaaatggtgaatatctttctgtgtcaaatatttcaacattaatatgtacatagtattaaatggatttactataaattatttagcctattcttactggccacagtagtctaactagatctttatacatttgtatttttctagaataaactcaaaaatgtgtaagatcaaagggtatatattgtgttgccaagaaaaagtttgtgccaatgtatatttttgccaggagtctttcatagtaccatttatatccttcccagcattagctgtgttctaccttctctcctctttgccatttttacaagaaaaccgggcatgtctaaagttttcttttcctttttttttttttttttgttttttggagagtctcactggaatgcagtggcatgatcttggctccctgcaacctccagtcaggctggtgtgccttgtcgcgatatcaacgcgacctccgcctcccaggttcaagtgattgtcctgcctcaccctcctgagtagctgggattacaggtgggcgccaccactcccatctaatttttatatttttagagagatggggttttaccttgttggccaggctggtcttgaactcctgacctctagtgatccacctgcctcagcctcccaaagtgccggtattaaaggcatgagccaccaggcctggcctaaaattttcttgattaattttgatctcatttgtattttgtaaatgacttatctgttgaggcttttgccattgagatgtttgtctttttcttactaatttgtaagaattcttgatgggtttctgttagtcatgtattttgctaataatttccctagtttgtagtttgccacttagtgctatttttgacataaatgatgtattttaatgtagttgcatgttgacctagtccattatggtttttgtatttggtccacgtggattggaaaacctttgctttgattatacttttctttgggcacttta

SEQ ID NO: 445778 - DNA, 894 bp, Homo sapiens
caaagtcgtcccaccatcaatgaaggcaggccacttccggcgtagccatggcggctaacgctactaccaacccgtcgcagctgctgccgttagagcttgtggacaaatgtataggatcaagaattcacatcgtgatgaagagtgataaggaaattgttggtactcttctaggatttgatgactttgtcaatatggtactggaagatgtcactgagtttgaaatcacaccagaaggaagaaggattactaaattagatcagattttgctaaatggaaataatataacaatgctggttcctggaggagaaggacctgaagtgtgaatgagtttccttgacttacactagattttgttttggcttataatgacaagaaaatggaattttttttcccactttctaatgtttaaatcccataaagctaagtttcccgttaaagggaagtgctttgaagatgtgtacccatttttgtaagttaatcatgattatcctggaaaaagaagaaaagagcttcttctttgcagatgaaaataaaggtgtttttggttaactgtcattttgtttattctactgcagtagccagtggaacaaagtttgtagttattttgccacttacttttctgtcattatatgcttatttgttttgtcatttacgtgaccatttgattctcaacaagtgttcaacaatgtgacttggttgaaccgtcctttaacaccggaatgtcacttgaatcctatggggtgttgcccaaaacaaacaaaaaaaagtgcgggcccgcccaaatttaacaactgggggcccgaaagaagatagtaaacaggcgagggggcccacaaaccggcgcgcgacgtggtgtaccctcccgccgcgccagacccgacaaaacaacgacgt

SEQ ID NO: 445779 - DNA, 2250 bp, Homo sapiens
caaagtcgtcccaccatcaatgaaggcaggccacttccggcgtagccatggcggctaacgctactaccaacccgtcgcagctgctgccgttagagcttgtggacaaatgtataggatcaagaattcacatcgtgatgaagagtgataaggaaattgttggtactcttctaggatttgatgactttgtcaatatggtactggaagatgtcactgagtttgaaatcacaccagaaggaagaaggattactaaattagatcagattttgctaaatggaaataatataacaatgctggttcctggaggagaaggacctgaagtgtgaatgagtttccttgacttacactagattttgttttggcttataatgacaagaaaatggaattttttttcccactttctaatgtttaaatcccataaagctaagtttcccgttaaagggaagtgctttgaagatgtgtacccatttttgtaagttaatcatgattatcctggaaaaagaagaaaagagcttcttctttgcagatgaaaataaaggtgtttttggttaactgtcattttgtttattctactgcagtagccagtggaacaaagtttgtagttattttgccacttacttttctgtcattatatgcttatttgttttgtcatttacgtgaccatttgattctcaaacaaaagttgttccaaacaaaatgatgaactttgatttgaacaggtgcatttaaacaaccggaaatgatcacttagaaaattcaattaaaatgctgttgttttgtaatgaggatttttcttctgatttcaaattccatgaactcctattgaaaacaaacaatgtacaggtaatatatgcacattgtagaaatgcaggaattatctattggaattaccctaaagatagaaattttatctatttgcttataaaattgattcagaaggttattaccttaatgtagttattactgaattgccaggaaatgagtggagacagagctttaagataaaggatactaaaaacagctaagaactccaggactcaggtcaaatcaaggaactgataataagatcattgaactgtataaattaagtcaaagaactcctattaaaaacaaacaggtaatatatgcacattgtagaattgtaggtaagcaaaaaggagaaggttgatcatgctttgctgtatgtcttcgtagactttctcagtccactctcagtacacgttttattttacttgctcatcctgattatactgtttttaccctccacttaagtcattttttgaatttaaatggtgaatatctttctgtgtcaaatatttcaacattaatatgtacatagtattaaatggatttactataaattatttagcctattcttactggccacagtagtctaactagatctttatacatttgtatttttctagaataaactcaaaaatgtgtaagatcaaagggtatatattgtgttgccaagaaaaagtttgtgccaatgtatatttttgccaggagtctttcatagtaccatttatatccttcccagcattagctgtgttctaccttctctcctctttgccatttttacaagaaaaccgggcatgtctaaagttttcttttcctttttttttttttttttgttttttggagagtctcactggaatgcagtggcatgatcttggctccctgcaacctccagtcaggctggtgtgccttgtcgcgatatcaacgcgacctccgcctcccaggttcaagtgattgtcctgcctcaccctcctgagtagctgggattacaggtgggcgccaccactcccatctaatttttatatttttagagagatggggttttaccttgttggccaggctggtcttgaactcctgacctctagtgatccacctgcctcagcctcccaaagtgccggtattaaaggcatgagccaccaggcctggcctaaaattttcttgattaattttgatctcatttgtattttgtaaatgacttatctgttgaggcttttgccattgagatgtttgtctttttcttactaatttgtaagaattcttgatgggtttctgttagtcatgtattttgctaataatttccctagtttgtagtttgccacttagtgctatttttgacataaatgatgtattttaatgtagttgcatgttgacctagtccattatggtttttgtatttggtccacgtggattggaaaacctttgctttgattatacttttctttgggcacttta

SEQ ID NO: 445780 - DNA, 642 bp, Homo sapiens
agtgttttttttttttaaatttttttaaaaaatatccccaaaaaaacctcccattaaaagttgtctcccaaagggcaaaaccaagtttttaccccaaaatgaatcctttttcagttaacagatcaaatggatgagttctgagcctctcaagttcctttccccagttagagtggggaactgggcaagtgttaactgtgggactcactgcagcgtcctatcctaaaggcacgagaagacggaaatgcaacctgcggagctgggcttggttcccaggtcacagtttggcccccgctacaggatgctgccctgctcagagagagatttaatagggagctgaaggaatcgttagggggccagggagatgtgactgaggctggctttccacgtgaatgagacggggtcggtggagggtttggtgctacagccagtcagaagatttgcaaatgcgaacacattcctgtgtgaggcacgttaccctttgtcagttattgtgaatatgtgtattttaagcaataagattcagctggtcagacttttctgggcagtctcagtgacgcatttcctgtgctgtgattgttctgaagacagagtggctctaaccactgtgagaagcccaaataaaaattgatcccaaaaatgcta

SEQ ID NO: 445781 - DNA, 3172 bp, Homo sapiens
agcgggaagagggtagaggaggagagggaggaggaggagggaggtggcggcgccgtggcggaggagcaggagcaggagggggatggagaggagaaggctcctgggtggcatggcgctcctgctcctccaggcgctgcccagccccttgtcagccagggctgaacccccgcaggataaggaagcctgtgtgggtaccaacaatcaaagctacatctgtgacacaggacactgctgtggacagtctcagtgccagcacccagcaacttggcaaagcaaccagggtaggggagaaccacgagagaagcattaagtgactttcaaagactttcagagtacagccacttggttcctttttgtttgttttccttctcctctcctgcattttcctccatctccaggtacagttcggggtgtggatgcctcttcctccacaagggcacagtgttgtggagggctaagttggttctgtgactcattcctcataccctaactccatctcctttctttaaagtcaaatctcacctacctgtttgggtcagagagatgtgttttaaaagcccccaaggaaggaggctgggactgtgccctgacatgattcttggtgatggaataggtttgtgctctgattctagtttaagagaacgttgctgtatctcagtccaggagaggcagcccatcttggccctggatgaagaaggaaacccacagaggcccagggcttgtcattgggctgccagtgtctgccaagccagcattgagctaatcctgtgggaggatgagagctactgggccgttgtatgataggttggtaggggcttgttgatctgtcaaattccaggtgacaagatctatgcaccccatgcgtccttgaggggcctcttccccgcaggctctggctggccgcaggctggttctggtgtgaaaggttatactgccttttctttgtttgtttgtttttttctctaaaaacaaacagcaaaagacagctgaaaacaagaacttcaccggtgggcaggcaagaattctcttctggaaaatgacgtttgtggctctttcccaagttggccttcaaagagcctgcctgccgttgagccagaagatgtctcgtgtgaaggctggggtggcggctgtcttggaacctctgtgagcaggaggccctaagccgcagcagtggatagaggtgcagctctctgcctctctgccctttggtctatgttcacaggtgacccgtgtcagcctgcatcgcaagcacacaccctgcgggccttcaagtctcactgttccgtatgaggaaacagacagcggactgaggaagcgatggccccagagaaagggcccctgtagcctggctctcacacagtattttatctttgattctgaataaatattttttgtggggttttttttttttttggtggcagttgtttgttttaaactgaccacttggaagaaacaccttggttatctgtggttttcttgccttgtccctgcctctacccccaccccttttgagtcgggtgactcatttttctgtgtagagactcggtggcccaggcaggaggtgaaagcggccatccggaaggccctggggacccttgtgcctgttgctcgccttcaggtcaccagctgagctgcgataggaaaatctgaatggaggcagcaaacagccaaaacaaacattccccacccggccctgtgcatatgaagtcgttcttcccccaactcttgaacgatgatgatattcagacgaagcattgatgttatggaagaaagaaagaaacaaacaaaaaatatatatatatgtccaaaaacagacaaatccaagggtgtgaggtaaacgagtgtctgcatttagattccacaaaaccaaaatccatgttgaacaaagttaagtccgtacacagtgactttttgggtgagccgtgtgtgtctgtctgttgtgtgtgtgcctcaagccctgttttcctgtgaagatactttgagtggcagccattctctccacgtgaaccacacgtctggagcacagacaggcctctcaaggtcattgatcttacgcatttactgtttaccgaacaaatgtctgactgtgtactcgggtgtactccgcagcattgtcgactgcagtcccctgtgtttgccagagatactgtgctcgaagtagaggttttactctactcatcactgcgatttgcacattgctccgtggacactcggaggcctgcgttctgttccctataaatggaagcgtgctctgagcctgtctgcctccctcggctgctgctggtcctcagtaccagcgcccgggggtgtccacaaccacttgggacagaagaaggtggaatttcagacagaagcttgactgggtcttcaatgacaggcttggactagctgtggcccagacatcggccctgcccagaattgccaggaggaggctttgcaggctctagaggagccgcagggcctgcctgcctctggtgagtccaacaggcacaagcaagctggcgtgtggccagaggtagccggagtgtgtcacagcccctcagatgcctttccttccacctttttttattttttaagaatcccaaataactcactgaagtgtctcaaaggcgaacaagttttaccaaaatgaatcctttttcagttaacagatcaaatggatgagttctgagcctctcaagttcctttccccagttagagtggggaactgggcaagtgttaactgtgggactcactgcagcgtcctatcctaaaggcacgagaagacggaaatgcaacctgcggagctgggcttggttcccaggtcacagtttggcccccgctacaggatgctgccctgctcagagagagatttaatagggagctgaaggaatcgttagggggccagggagatgtgactgaggctggctttccacgtgaatgagacggggtcggtggagggtttggtgctacagccagtcagaagatttgcaaatgcgaacacattcctgtgtgaggcacgttaccctttgtcagttattgtgaatatgtgtattttaagcaataagattcagctggtcagacttttctgggcagtctcagtgacgcatttcctgtgctgtgattgttctgaagacagagtggctctaaccactgtgagaagcccaaataaaaattgatcccaaaaatgcta

SEQ ID NO: 445782 - DNA, 2950 bp, Homo sapiens
  misc_feature (18)..(18): n is a, c, g, or t
tgtattggtggtgctctngtggtcctgccagcacccagcaacttggcaaagcaaccagggtaggggagaaccacgagagaagcattaagtgactttcaaagactttcagagtacagccacttggttcctttttgtttgttttccttctcctctcctgcattttcctccatctccaggtacagttcggggtgtggatgcctcttcctccacaagggcacagtgttgtggagggctaagttggttctgtgactcattcctcataccctaactccatctcctttctttaaagtcaaatctcacctacctgtttgggtcagagagatgtgttttaaaagcccccaaggaaggaggctgggactgtgccctgacatgattcttggtgatggaataggtttgtgctctgattctagtttaagagaacgttgctgtatctcagtccaggagaggcagcccatcttggccctggatgaagaaggaaacccacagaggcccagggcttgtcattgggctgccagtgtctgccaagccagcattgagctaatcctgtgggaggatgagagctactgggccgttgtatgataggttggtaggggcttgttgatctgtcaaattccaggtgacaagatctatgcaccccatgcgtccttgaggggcctcttccccgcaggctctggctggccgcaggctggttctggtgtgaaaggttatactgccttttctttgtttgtttgtttttttctctaaaaacaaacagcaaaagacagctgaaaacaagaacttcaccggtgggcaggcaagaattctcttctggaaaatgacgtttgtggctctttcccaagttggccttcaaagagcctgcctgccgttgagccagaagatgtctcgtgtgaaggctggggtggcggctgtcttggaacctctgtgagcaggaggccctaagccgcagcagtggatagaggtgcagctctctgcctctctgccctttggtctatgttcacaggtgacccgtgtcagcctgcatcgcaagcacacaccctgcgggccttcaagtctcactgttccgtatgaggaaacagacagcggactgaggaagcgatggccccagagaaagggcccctgtagcctggctctcacacagtattttatctttgattctgaataaatattttttgtggggttttttttttttttggtggcagttgtttgttttaaactgaccacttggaagaaacaccttggttatctgtggttttcttgccttgtccctgcctctacccccaccccttttgagtcgggtgactcatttttctgtgtagagactcggtggcccaggcaggaggtgaaagcggccatccggaaggccctggggacccttgtgcctgttgctcgccttcaggtcaccagctgagctgcgataggaaaatctgaatggaggcagcaaacagccaaaacaaacattccccacccggccctgtgcatatgaagtcgttcttcccccaactcttgaacgatgatgatattcagacgaagcattgatgttatggaagaaagaaagaaacaaacaaaaaatatatatatatgtccaaaaacagacaaatccaagggtgtgaggtaaacgagtgtctgcatttagattccacaaaaccaaaatccatgttgaacaaagttaagtccgtacacagtgactttttgggtgagccgtgtgtgtctgtctgttgtgtgtgtgcctcaagccctgttttcctgtgaagatactttgagtggcagccattctctccacgtgaaccacacgtctggagcacagacaggcctctcaaggtcattgatcttacgcatttactgtttaccgaacaaatgtctgactgtgtactcgggtgtactccgcagcattgtcgactgcagtcccctgtgtttgccagagatactgtgctcgaagtagaggttttactctactcatcactgcgatttgcacattgctccgtggacactcggaggcctgcgttctgttccctataaatggaagcgtgctctgagcctgtctgcctccctcggctgctgctggtcctcagtaccagcgcccgggggtgtccacaaccacttgggacagaagaaggtggaatttcagacagaagcttgactgggtcttcaatgacaggcttggactagctgtggcccagacatcggccctgcccagaattgccaggaggaggctttgcaggctctagaggagccgcagggcctgcctgcctctggtgagtccaacaggcacaagcaagctggcgtgtggccagaggtagccggagtgtgtcacagcccctcagatgcctttccttccacctttttttattttttaagaatcccaaataactcactgaagtgtctcaaaggcgaacaagttttaccaaaatgaatcctttttcagttaacagatcaaatggatgagttctgagcctctcaagttcctttccccagttagagtggggaactgggcaagtgttaactgtgggactcactgcagcgtcctatcctaaaggcacgagaagacggaaatgcaacctgcggagctgggcttggttcccaggtcacagtttggcccccgctacaggatgctgccctgctcagagagagatttaatagggagctgaaggaatcgttagggggccagggagatgtgactgaggctggctttccacgtgaatgagacggggtcggtggagggtttggtgctacagccagtcagaagatttgcaaatgcgaacacattcctgtgtgaggcacgttaccctttgtcagttattgtgaatatgtgtattttaagcaataagattcagctggtcagacttttctgggcagtctcagtgacgcatttcctgtgctgtgattgttctgaagacagagtggctctaaccactgtgagaagcccaaataaaaattgatcccaaaaatgcta

SEQ ID NO: 445783 - DNA, 2466 bp, Homo sapiens
tatcgattgccaccctgctgcgttgagccagaagatgtctcgtgtgaaggctggggtggcggctgtcttggaacctctgtgagcaggaggccctaagccgcagcagtggatagaggtgcagctctctgcctctctgccctttggtctatgttcacaggtgacccgtgtcagcctgcatcgcaggctctggctggccgcaggctggttctggtgtgaaaggttatactgccttttctttgtttgtttgtttttttctctaaaaacaaacagcaaaagacagctgaaaacaagaacttcaccggtgggcaggcaagaattctcttctggaaaatgacgtttgtggctctttcccaagttggccttcaaagagcctgcctgccgttgagccagaagatgtctcgtgtgaaggctggggtggcggctgtcttggaacctctgtgagcaggaggccctaagccgcagcagtggatagaggtgcagctctctgcctctctgccctttggtctatgttcacaggtgacccgtgtcagcctgcatcgcaagcacacaccctgcgggccttcaagtctcactgttccgtatgaggaaacagacagcggactgaggaagcgatggccccagagaaagggcccctgtagcctggctctcacacagtattttatctttgattctgaataaatattttttgtggggttttttttttttttggtggcagttgtttgttttaaactgaccacttggaagaaacaccttggttatctgtggttttcttgccttgtccctgcctctacccccaccccttttgagtcgggtgactcatttttctgtgtagagactcggtggcccaggcaggaggtgaaagcggccatccggaaggccctggggacccttgtgcctgttgctcgccttcaggtcaccagctgagctgcgataggaaaatctgaatggaggcagcaaacagccaaaacaaacattccccacccggccctgtgcatatgaagtcgttcttcccccaactcttgaacgatgatgatattcagacgaagcattgatgttatggaagaaagaaagaaacaaacaaaaaatatatatatatgtccaaaaacagacaaatccaagggtgtgaggtaaacgagtgtctgcatttagattccacaaaaccaaaatccatgttgaacaaagttaagtccgtacacagtgactttttgggtgagccgtgtgtgtctgtctgttgtgtgtgtgcctcaagccctgttttcctgtgaagatactttgagtggcagccattctctccacgtgaaccacacgtctggagcacagacaggcctctcaaggtcattgatcttacgcatttactgtttaccgaacaaatgtctgactgtgtactcgggtgtactccgcagcattgtcgactgcagtcccctgtgtttgccagagatactgtgctcgaagtagaggttttactctactcatcactgcgatttgcacattgctccgtggacactcggaggcctgcgttctgttccctataaatggaagcgtgctctgagcctgtctgcctccctcggctgctgctggtcctcagtaccagcgcccgggggtgtccacaaccacttgggacagaagaaggtggaatttcagacagaagcttgactgggtcttcaatgacaggcttggactagctgtggcccagacatcggccctgcccagaattgccaggaggaggctttgcaggctctagaggagccgcagggcctgcctgcctctggtgagtccaacaggcacaagcaagctggcgtgtggccagaggtagccggagtgtgtcacagcccctcagatgcctttccttccacctttttttattttttaagaatcccaaataactcactgaagtgtctcaaaggcgaacaagttttaccaaaatgaatcctttttcagttaacagatcaaatggatgagttctgagcctctcaagttcctttccccagttagagtggggaactgggcaagtgttaactgtgggactcactgcagcgtcctatcctaaaggcacgagaagacggaaatgcaacctgcggagctgggcttggttcccaggtcacagtttggcccccgctacaggatgctgccctgctcagagagagatttaatagggagctgaaggaatcgttagggggccagggagatgtgactgaggctggctttccacgtgaatgagacggggtcggtggagggtttggtgctacagccagtcagaagatttgcaaatgcgaacacattcctgtgtgaggcacgttaccctttgtcagttattgtgaatatgtgtattttaagcaataagattcagctggtcagacttttctgggcagtctcagtgacgcatttcctgtgctgtgattgttctgaagacagagtggctctaaccactgtgagaagcccaaataaaaattgatcccaaaaatgcta

SEQ ID NO: 445784 - DNA, 2856 bp, Homo sapiens
agcgggaagagggtagaggaggagagggaggaggaggagggaggtggcggcgccgtggcggaggagcaggagcaggagggggatggagaggagaaggctcctgggtggcatggcgctcctgctcctccaggcgctgcccagccccttgtcagccagggctgaacccccgcaggataaggaagcctgtgtgggtaccaacaatcaaagctacatctgtgacacaggacactgctgtggacagtctcagtgctgcaactactactatgaactctggtggttctggctggtgtggaccatcatcatcatcctgagctgctgctgtgtttgccaccaccgccgagccaagcaccgccttcaggcccagcagcggcaacatgaaatcaacctgatcgcttaccgagaagcccacaattactcagcgctgccattttatttcaggtttttgccaaactatttactacctccttatgaggaagtggtgaaccgacctccaactcctcccccaccatacagtgccttccagctacagcagcagcagctgctgcctccacagtgtggccctgcaggtggcagtcccccgggcatcgatcccaccaggggatcccagggggcacagagcagccccttgtctgagcccagcagaagcagcacaagacccccaagcatcgctgaccctgatccctctgacctaccagttgaccgagcagccaccaaagccccagggatggagcccagtggctctgtggctggcctgggggagctggacccgggggccttcctggacaaagatgcagaatgtagggaggagctgctgaaagatgacagctctgaacacggcgcacccgacagcaaagagaagacgcctgggagacatcgccgcttcacaggtgactcgggcattgaagtgtgtgtgtgcaaccggggccaccatgacgatgacctcaaagagttcaacacactcatcgatgatgctctggatgggcccctggacttctgcgacagctgccatgtgcggccccctggtgatgaggaggaaggcctctgtcagccctctgaggagcaggctcgagagcctgggcacccgcacctgccacggccgcccgcatgcctgctgctgaacaccatcaacgagcaggactctcccaactcccagagcagcagctcccccagctagagcaggtcctgccagcacccagcaacttggcaaagcaaccagggtaggggagaaccacgagagaagcattaagtgactttcaaagactttcagagtacagccacttggttcctttttgtttgttttccttctcctctcctgcattttcctccatctccaggtacagttcggggtgtggatgcctcttcctccacaagggcacagtgttgtggagggctaagttggttctgtgactcattcctcataccctaactccatctcctttctttaaagtcaaatctcacctacctgtttgggtcagagagatgtgttttaaaagcccccaaggaaggaggctgggactgtgccctgacatgattcttggtgatggaataggtttgtgctctgattctagtttaagagaacgttgctgtatctcagtccaggagaggcagcccatcttggccctggatgaagaaggaaacccacagaggcccagggcttgtcattgggctgccagtgtctgccaagccagcattgagctaatcctgtgggaggatgagagctactgggccgttgtatgataggttggtaggggcttgttgatctgtcaaattccaggtgacaagatctatgcaccccatgcgtccttgaggggcctcttccccgcaggctctggctggccgcaggctggttctggtgtgaaaggttatactgccttttctttgtttgtttgtttttttctctaaaaacaaacagcaaaagacagctgaaaacaagaacttcaccggtgggcaggcaagaattctcttctggaaaatgacgtttgtggctctttcccaagttggccttcaaagagcctgcctgccgttgagccagaagatgtctcgtgtgaaggctggggtggcggctgtcttggaacctctgtgagcaggaggccctaagccgcagcagtggatagaggtgcagctctctgcctctctgccctttggtctatgttcacaggtgacccgtgtcagcctgcatcgcaagcacacaccctgcgggccttcaagtctcactgttccgtatgaggaaacagacagcggactgaggaagcgatggccccagagaaagggcccctgtagcctggctctcacacagtattttatctttgattctgaataaatattttttgtggggttttttttttttttggtggcagttgtttgttttaaactgaccacttggaagaaacaccttggttatctgtggttttcttgccttgtccctgcctctacccccaccccttttgagtcgggtgactcatttttctgtgtagagactcggtggcccaggcaggaggtgaaagcggccatccggaaggccctggggacccttgtgcctgttgctcgccttcaggtcaccagctgagctgcgataggaaaatctgaatggaggcagcaaacagccaaaacaaacattccccacccggccctgtgcatatgaagtcgttcttcccccaactcttgaacgatgatgatattcagacgaagcattgatgttatggaagaaagaaagaaacaaacaaaaaatatatatatatgtccaaaaacagacaaatccaagggtgtgaggtaaacgagtgtctgcgtaagatcaatgaccttgagaggcctgtctgtgctccagacgtgtggttcacgtggagagaatggctgcca

SEQ ID NO: 445785 - DNA, 357 bp, Homo sapiens
tgggatcaatttttatttgggcttctcacagtggttagagccactctgtcttcagaacaatcacagcacaggaaatgcgtcactgaggctggctttccacgtgaatgagacggggtcggtggagggtttggtgctacagccagtcagaagatttgcaaatgcgaacacattcctgtgtgaggcacgttaccctttgtcagttattgtgaatatgtgtattttaagcaataagattcagctggtcagacttttctgggcagtctcagtgacgcatttcctgtgctgtgattgttctgaagacagagtggctctaaccactgtgagaagcccaaataaaaattgatcccaaaaatgcta

SEQ ID NO: 445786 - DNA, 4108 bp, Homo sapiens
agcgggaagagggtagaggaggagagggaggaggaggagggaggtggcggcgccgtggcggaggagcaggagcaggagggggatggagaggagaaggctcctgggtggcatggcgctcctgctcctccaggcgctgcccagccccttgtcagccagggctgaacccccgcaggataaggaagcctgtgtgggtaccaacaatcaaagctacatctgtgacacaggacactgctgtggacagtctcagtgctgcaactactactatgaactctggtggttctggctggtgtggaccatcatcatcatcctgagctgctgctgtgtttgccaccaccgccgagccaagcaccgccttcaggcccagcagcggcaacatgaaatcaacctgatcgcttaccgagaagcccacaattactcagcgctgccattttatttcaggtttttgccaaactatttactacctccttatgaggaagtggtgaaccgacctccaactcctcccccaccatacagtgccttccagctacagcagcagcagctgctgcctccacagtgtggccctgcaggtggcagtcccccgggcatcgatcccaccaggggatcccagggggcacagagcagccccttgtctgagcccagcagaagcagcacaagacccccaagcatcgctgaccctgatccctctgacctaccagttgaccgagcagccaccaaagccccagggatggagcccagtggctctgtggctggcctgggggagctggacccgggggccttcctggacaaagatgcagaatgtagggaggagctgctgaaagatgacagctctgaacacggcgcacccgacagcaaagagaagacgcctgggagacatcgccgcttcacaggtgactcgggcattgaagtgtgtgtgtgcaaccggggccaccatgacgatgacctcaaagagttcaacacactcatcgatgatgctctggatgggcccctggacttctgcgacagctgccatgtgcggccccctggtgatgaggaggaaggcctctgtcagccctctgaggagcaggctcgagagcctgggcacccgcacctgccacggccgcccgcatgcctgctgctgaacaccatcaacgagcaggactctcccaactcccagagcagcagctcccccagctagagcaggtcctgccagcacccagcaacttggcaaagcaaccagggtaggggagaaccacgagagaagcattaagtgactttcaaagactttcagagtacagccacttggttcctttttgtttgttttccttctcctctcctgcattttcctccatctccaggtacagttcggggtgtggatgcctcttcctccacaagggcacagtgttgtggagggctaagttggttctgtgactcattcctcataccctaactccatctcctttctttaaagtcaaatctcacctacctgtttgggtcagagagatgtgttttaaaagcccccaaggaaggaggctgggactgtgccctgacatgattcttggtgatggaataggtttgtgctctgattctagtttaagagaacgttgctgtatctcagtccaggagaggcagcccatcttggccctggatgaagaaggaaacccacagaggcccagggcttgtcattgggctgccagtgtctgccaagccagcattgagctaatcctgtgggaggatgagagctactgggccgttgtatgataggttggtaggggcttgttgatctgtcaaattccaggtgacaagatctatgcaccccatgcgtccttgaggggcctcttccccgcaggctctggctggccgcaggctggttctggtgtgaaaggttatactgccttttctttgtttgtttgtttttttctctaaaaacaaacagcaaaagacagctgaaaacaagaacttcaccggtgggcaggcaagaattctcttctggaaaatgacgtttgtggctctttcccaagttggccttcaaagagcctgcctgccgttgagccagaagatgtctcgtgtgaaggctggggtggcggctgtcttggaacctctgtgagcaggaggccctaagccgcagcagtggatagaggtgcagctctctgcctctctgccctttggtctatgttcacaggtgacccgtgtcagcctgcatcgcaagcacacaccctgcgggccttcaagtctcactgttccgtatgaggaaacagacagcggactgaggaagcgatggccccagagaaagggcccctgtagcctggctctcacacagtattttatctttgattctgaataaatattttttgtggggttttttttttttttggtggcagttgtttgttttaaactgaccacttggaagaaacaccttggttatctgtggttttcttgccttgtccctgcctctacccccaccccttttgagtcgggtgactcatttttctgtgtagagactcggtggcccaggcaggaggtgaaagcggccatccggaaggccctggggacccttgtgcctgttgctcgccttcaggtcaccagctgagctgcgataggaaaatctgaatggaggcagcaaacagccaaaacaaacattccccacccggccctgtgcatatgaagtcgttcttcccccaactcttgaacgatgatgatattcagacgaagcattgatgttatggaagaaagaaagaaacaaacaaaaaatatatatatatgtccaaaaacagacaaatccaagggtgtgaggtaaacgagtgtctgcatttagattccacaaaaccaaaatccatgttgaacaaagttaagtccgtacacagtgactttttgggtgagccgtgtgtgtctgtctgttgtgtgtgtgcctcaagccctgttttcctgtgaagatactttgagtggcagccattctctccacgtgaaccacacgtctggagcacagacaggcctctcaaggtcattgatcttacgcatttactgtttaccgaacaaatgtctgactgtgtactcgggtgtactccgcagcattgtcgactgcagtcccctgtgtttgccagagatactgtgctcgaagtagaggttttactctactcatcactgcgatttgcacattgctccgtggacactcggaggcctgcgttctgttccctataaatggaagcgtgctctgagcctgtctgcctccctcggctgctgctggtcctcagtaccagcgcccgggggtgtccacaaccacttgggacagaagaaggtggaatttcagacagaagcttgactgggtcttcaatgacaggcttggactagctgtggcccagacatcggccctgcccagaattgccaggaggaggctttgcaggctctagaggagccgcagggcctgcctgcctctggtgagtccaacaggcacaagcaagctggcgtgtggccagaggtagccggagtgtgtcacagcccctcagatgcctttccttccacctttttttattttttaagaatcccaaataactcactgaagtgtctcaaaggcgaacaagttttaccaaaatgaatcctttttcagttaacagatcaaatggatgagttctgagcctctcaagttcctttccccagttagagtggggaactgggcaagtgttaactgtgggactcactgcagcgtcctatcctaaaggcacgagaagacggaaatgcaacctgcggagctgggcttggttcccaggtcacagtttggcccccgctacaggatgctgccctgctcagagagagatttaatagggagctgaaggaatcgttagggggccagggagatgtgactgaggctggctttccacgtgaatgagacggggtcggtggagggtttggtgctacagccagtcagaagatttgcaaatgcgaacacattcctgtgtgaggcacgttaccctttgtcagttattgtgaatatgtgtattttaagcaataagattcagctggtcagacttttctgggcagtctcagtgacgcatttcctgtgctgtgattgttctgaagacagagtggctctaaccactgtgagaagcccaaataaaaattgatcccaaaaatgcta

SEQ ID NO: 445787 - DNA, 4054 bp, Homo sapiens
agcgggaagagggtagaggaggagagggaggaggaggagggaggtggcggcgccgtggcggaggagcaggagcaggagggggatggagaggagaaggctcctgggtggcatggcgctcctgctcctccaggcgctgcccagccccttgtcagccagggctgaacccccgcaggataaggaagcctgtgtgggtaccaacaatcaaagctacatctgtgacacaggacactgctgtggacagtctcagtgctgcaactactactatgaactctggtggttctggctggtgtggaccatcatcatcatcctgagctgctgctgtgtttgccaccaccgccgagccaagcaccgccttcaggcccagcagcggcaacatgaaatcaacctgatcgcttaccgagaagcccacaattactcagcgctgccattttatttcaggtttttgccaaactatttactacctccttatgaggaagtggtgaaccgacctccaactcctcccccaccatacagtgccttccagctacagcagcagcagctgctgcctccacagtgtggccctgcaggtggcagtcccccgggcatcgatcccaccaggggatcccagggggcacagagcagccccttgtctgagcccagcagaagcagcacaagacccccaagcatcgctgaccctgatccctctgacctaccagttgaccgagcagccaccaaagccccagggatggagcccagtggctctgtggctggcctgggggagctggacccgggggccttcctggacaaagatgcagaatgtagggaggagctgctgaaagatgacagctctgaacacggcgcacccgacagcaaagagaagacgcctgggagacatcgccgcttcacaggtgactcgggcattgaagtgtgtgtgtgcaaccggggccaccatgacgatgacctcaaagagttcaacacactcatcgatgatgctctggatgggcccctggacttctgcgacagctgccatgtgcggccccctggtgatgaggaggaaggcctctgtcagccctctgaggagcaggctcgagagcctgggcacccgcacctgccacggccgcccgcatgcctgctgctgaacaccatcaacgagcaggactctcccaactcccagagcagcagctcccccagctagagcaggtcctgccagcacccagcaacttggcaaagcaaccagggtaggggagaaccacgagagaagcattaagtgactttcaaagactttcagagtacagccacttggttcctttttgtttgttttccttctcctctcctgcattttcctccatctccaggtacagttcggggtgtggatgcctcttcctccacaagggcacagtgttgtggagggctaagttggttctgtgactcattcctcataccctaactccatctcctttctttaaagtcaaatctcacctacctgtttgggtcagagagatgtgttttaaaagcccccaaggaaggaggctgggactgtgccctgacatgattcttggtgatggaataggtttgtgctctgattctagtttaagagaacgttgctgtatctcagtccaggagaggcagcccatcttggccctggatgaagaaggaaacccacagaggcccagggcttgtcattgggctgccagtgtctgccaagccagcattgagctaatcctgtgggaggatgagagctactgggccgttgtatgataggttggtaggggcttgttgatctgtcaaattccaggtgacaagatctatgcaccccatgcgtccttgaggggcctcttccccgcaggctctggctggccgcaggctggttctggtgtgaaaggttatactgccttttctttgtttgtttgtttttttctctaaaaacaaacagcaaaagacagctgaaaacaagaacttcaccggtgggcaggcaagaattctcttctggaaaatgacgtttgtggctctttcccaagttggccttcaaagagcctgcctgccgttgagccagaagatgtctcgtgtgaaggctggggtggcggctgtcttggaacctctgtgagcaggaggccctaagccgcagcagtggatagaggtgcagctctctgcctctctgccctttggtctatgttcacaggtgacccgtgtcagcctgcatcgcaagcacacaccctgcgggccttcaagtctcactgttccgtatgaggaaacagacagcggactgaggaagcgatggccccagagaaagggcccctgtagcctggctctcacacagtattttatctttgattctgaataaatattttttgtggggttttttttttttttggtggcagttgtttgttttaaactgaccacttggaagaaacaccttggttatctgtggttttcttgccttgtccctgcctctacccccaccccttttgagtcgggtgactcatttttctgtgtagagactcggtggcccaggcaggaggtgaaagcggccatccggaaggccctggggacccttgtgcctgttgctcgccttcaggtcaccagctgagctgcgataggaaaatctgaatggaggcagcaaacagccaaaacaaacattccccacccggccctgtgcatatgaagtcgttcttcccccaactcttgaacgatgatgatattcagacgaagcattgatgttatggaagaaagaaagaaacaaacaaaaaatatatatatatgtccaaaaacagacaaatccaagggtgtgaggtaaacgagtgtctgcatttagattccacaaaaccaaaatccatgttgaacaaagttaagtccgtacacagtgactttttgggtgagccgtgtgtgtctgtctgttgtgtgtgtgcctcaagccctgttttcctgtgaagatactttgagtggcagccattctctccacgtgaaccacacgtctggagcacagacaggcctctcaaggtcattgatcttacgcatttactgtttaccgaacaaatgtctgactgtgtactcgggtgtactccgcagcattgtcgactgcagtcccctgtgtttgccagagatactgtgctcgaagtagaggttttactctactcatcactgcgatttgcacattgctccgtggacactcggaggcctgcgttctgttccctataaatggaagcgtgctctgagcctgtctgcctccctcggctgctgctggtcctcagtaccagcgcccgggggtgtccacaaccacttgggacagaagaaggtggaatttcagacagaagcttgactgggtcttcaatgacaggcttggactagctgtggcccagacatcggccctgcccagaattgccaggaggaggctttgcaggctctagaggagccgcagggcctgcctgcctctggtgagtccaacaggcacaagcaagctggcgtgtggccagaggtagccggagtgtgtcacagcccctcagatgcctttccttccacctttttttattttttaagaatcccaaataactcactgaagtgtctcaaaggcgaacaagttttaccaattcctttccccagttagagtggggaactgggcaagtgttaactgtgggactcactgcagcgtcctatcctaaaggcacgagaagacggaaatgcaacctgcggagctgggcttggttcccaggtcacagtttggcccccgctacaggatgctgccctgctcagagagagatttaatagggagctgaaggaatcgttagggggccagggagatgtgactgaggctggctttccacgtgaatgagacggggtcggtggagggtttggtgctacagccagtcagaagatttgcaaatgcgaacacattcctgtgtgaggcacgttaccctttgtcagttattgtgaatatgtgtattttaagcaataagattcagctggtcagacttttctgggcagtctcagtgacgcatttcctgtgctgtgattgttctgaagacagagtggctctaaccactgtgagaagcccaaataaaaattgatcccaaaaatgcta

SEQ ID NO: 445788 - DNA, 763 bp, Homo sapiens
ttctggtcggggcaggcagcggcggccgcggcggggcctggggcttgggccctggagcccgggcctggggcgctggcgggaggcccctcccaactcccggcgcgcctcgcccggctgcccgcctcactgaaggtcaaggcgctttgttctgcgccgcgggcggcctcctgggcggcggccccttggaggaggcgaagacggcgagaggcgtgcggccgctcaaatctcccgctagcccagcccgccccgcgtgcgggggctgtggcggttacacggccgggcgcgccggagcgttcaggcttcccgtttttaaggtggagacgtccaggacttctttattagatgtttaggaatttgagtttttccgtagggcggttgtcatcgtgagcctctgtggggtcaggctgggctaactggggttttgatgtcagtttggtgtggccgagggcatgtctgacggggaagaaagtccttggcgttgcttcttagctgttgggagctgtgcggtgggagcgagctgggcggcgtgcgctccccgaggactggcctgagtggccttagactagttactcacgggacttggtttcccagccaaggtgggcagcaagtctgtttactatttaaaaccgtctttcacaagggaaaagcaaaatctccaaaaaaaaaaattgtacatgttatggatgggaaagtgccatgcttttctttcagttcagagatggtggaagaggtcacatttgtattttttgacctgaccagagtc

SEQ ID NO: 445789 - DNA, 475 bp, Homo sapiens
tgcactgtggccacatctcatcctggctgctgcgtggcgccaggaggctgtgcacactgtgtgaactccacaccagcacagtagggcccttctaagttccaccgaagttggctctaagcaatacatggtgtgagctcaacaaaacgggaaatgttgataaatgaagctgcattttcatgcactacccttgttatgcaaccagtagtgataaggtggttttgcttttggtgtaagtctcatgtttgaaacttgatttttagtctgaccaatgatgtatttggatgtaggagaaactgattcaagacaattgactaatggtggaggttcacctttgagcaccttattgatcactttaaagattaaacaccaaagttttaatatatttctactaaggtttcttttccctttgtatgagatgtaaaatgatacccagattcctgtatccaataacattatgctgctggttcgatcagcc

SEQ ID NO: 445790 - DNA, 575 bp, Homo sapiens
gggggagaagggactaaaaacatgttccggctaatggtgtgaatgaagttcagagacggcccggcatgtgtggccaggataaggccaagcctgctgtccctgtcacatgcaccttccagagagatgggcagtgttagagtctgtgcaagcaaaagaaaacaaggaaggaagggaggttttagtattgggagcagtctgatagaagtgaaaatcatgcttctgcccattttgaaagtatgatctagtgttgaagttgttcaccccgagttcagtatcttgcagcccttttgtatcatgagaaattgtggccgtttcctcctgtataattttgtgcatttcattttctttcatgctgacagttcctttcaatttttttccccatttaggtgtaatttttgtctgttaatcattcatacgtttctaggtaaggtggaattccattcatacctaacttccaaacttctgatctatactttatacaatgcattgttttgactttgaataaagagggagttgctgtccaggtacactcactgtgtcacaggtttgacataggtgtctgttacatgtacttt

SEQ ID NO: 445791 - DNA, 520 bp, Homo sapiens
ttaaacctcgaggtgagaaatgttacattttatctaccagcacagcttcctcctgtgtgggctttaaaattctgggagttgtcactgtaatttaaatatgttttgtcttttctttttctagcatccggggatggagaatcactggtaagatttgttgttaatagtcttattttcctgttgaagtctctcctgagtgaatgtctacttgtctacttgttaaaaaaagtccagtcctggctgtgtgtggactgggtatgccagtgatcttaatgctttgggaggctgaggtgggaggactgcacgagtccaggagtttgagaccagcctgggcaacatagcacaaccccatctccacaaaaaattaaaaccaaataaattagccagccgaacatggtggttcacgcccgtaataccagcactgtgggaggccaaggtgggtggatcaccagaggtcaggagttcaagaccagtctggtcaacatggtgaaaccccgtttctgcttaaaataccaaaaaaaaa

SEQ ID NO: 445792 - DNA, 2481 bp, Homo sapiens
ggcacgagcttgctcgcggagagaggagctaggagcctcggccaatgggagccggcgttgttggaggccacggcggcgcagccccaaagcgagcgaagctagggtcgccgccactgccgcaggaggcgtgaggggataaaaacattcagatggcagatcacagtttttcagatggggttccttcagattccgtggaagctgctaaaaatgcaagtaacacagaaaagctcacagatcaggtgatgcagaatcctcgagttctggcagctttacaggagcgacttgacaatgtccctcacaccccttccagctacatcgaaactttacctaaagcagtaaaaagaagaattaatgcattgaaacaacttcaggtgagatgtgctcacatagaagccaagttctatgaagaggtacatgacttggaaagaaagtatgcagcgctataccagcctctctttgacaagagaagagaatttatcaccggcgatgttgaaccaacagatgcggaatcggaatggcacagtgaaaatgaagaggaagagaaattggctggagacatgaaaagtaaagtagtcgtcacagaaaaagcagcggcaacggctgaagagccagatcccaaaggaattccagagttctggtttaccatcttcagaaatgtggacatgctgagtgaattagtccaggaatatgatgaaccaatcttgaaacacctgcaggatattaaagtgaaattttctgaccctggacagcctatgtcttttgtgttagagttccactttgaacccaacgactactttaccaactcagtcctgacaaaaacctacaagatgaaatcagaaccagataaggctgatcccttttcctttgaaggtcctgagattgtggactgtgacgggtgtactattgactggaagaaaggaaagaatgttactgtcaaaaccatcaagaaaaagcagaagcataagggtcgaggcactgttagaacaattacgaaacaagtacccaatgagtcctttttcaacttcttcaatccattgaaagcatccggggatggagaatcactggatgaagattctgaattcacattagcctctgattttgaaattggacactttttccgtgagcggatagtcccgcgggctgtgctgtacttcactggggaggccatagaagatgatgacaattttgaagaaggtgaagaaggagaagaggaggaattagaaggtgacgaggagggagaagacgaggatgatgcggaaattaaccccaagaaggaacccagccagccggcggaatgcaagcagcagtaggaagcggaggcgggtgcctggcagaccggctgtcgggactccaggcctgtgggcggggcctcggtccttgccgcagcacaatcccgtggacagagcttactccatctaactcgttttcaagtgcatgattttcactttcacttttcctttttccttattattttgcttaacttgtacagtggcaactgaaatgcatttcagaaataggaggtttcgtccagcaccctctgcagccttggtgcctgtagctctggacttccctgggcctttccctgtgggagggccctgtagaccacatcagggtggggtgggggtcacttggcaaaaagggccgaggtctggtgatgtggttcccaggatctggaacctctcccacccctcctgcagttggactgaattcttccctttcatccgaagaaacccacttgctgtttccagccgctgaatctgctgagtgtgcagcctgcatcacctgctgtatgccgatcatctcagaaagggctgtgtagagtagggccctgttctccttaggatgttgcttcttgatttttttttttttttaggggtgggtcagggttgtgacacaccagcccaggtgagagctgctgcgggtcacctcatatttatttatcccttcttgcctgtgaggactgcggcttttcgctgtggctcgtccttaacgtttctgaaccaccttggtgccctgagcaggaagatgtgccacttcctagcaggcgcaaggcctgtgcggaagaaacgccgctccctgccaccagggctgaagatgcgagcccgtcctcatgacgcaggcgccaccctgctgccggagccgggcttcggcagtcttctccactgagggactgggctgggaagtcctgcgtttcagtggagcgtatgagcgtcaagtcctgctttctcagtagccccattgcggggccccaccattcatcctgtctgaaggtcctgggtttggtgtgaccgcttggcggctggtgggtggggttttcaagtgggtgacggcgctctccggcagccggggatggccgtgtccgcactgaccaggcctgtggagagtgctcggcctaaccttagaacacatttgtaactgaatacagtgttttcaatttgtacagaatagttagaatattctattaaagtggtgaaacattga

SEQ ID NO: 445793 - DNA, 2444 bp, Homo sapiens
tgtgttcagaggatccctaacgatcagtcaggtgcgggggctgtggcggttacacggccgggcgcgccggagcgttcaggcttcccgtttttaaggggataaaaacattcagatggcagatcacagtttttcagatggggttccttcagattccgtggaagctgctaaaaatgcaagtaacacagaaaagctcacagatcaggtgatgcagaatcctcgagttctggcagctttacaggagcgacttgacaatgtccctcacaccccttccagctacatcgaaactttacctaaagcagtaaaaagaagaattaatgcattgaaacaacttcaggtgagatgtgctcacatagaagccaagttctatgaagaggtacatgacttggaaagaaagtatgcagcgctataccagcctctctttgacaagagaagagaatttatcaccggcgatgttgaaccaacagatgcggaatcggaatggcacagtgaaaatgaagaggaagagaaattggctggagacatgaaaagtaaagtagtcgtcacagaaaaagcagcggcaacggctgaagagccagatcccaaaggaattccagagttctggtttaccatcttcagaaatgtggacatgctgagtgaattagtccaggaatatgatgaaccaatcttgaaacacctgcaggatattaaagtgaaattttctgaccctggacagcctatgtcttttgtgttagagttccactttgaacccaacgactactttaccaactcagtcctgacaaaaacctacaagatgaaatcagaaccagataaggctgatcccttttcctttgaaggtcctgagattgtggactgtgacgggtgtactattgactggaagaaaggaaagaatgttactgtcaaaaccatcaagaaaaagcagaagcataagggtcgaggcactgttagaacaattacgaaacaagtacccaatgagtcctttttcaacttcttcaatccattgaaagcatccggggatggagaatcactggatgaagattctgaattcacattagcctctgattttgaaattggacactttttccgtgagcggatagtcccgcgggctgtgctgtacttcactggggaggccatagaagatgatgacaattttgaagaaggtgaagaaggagaagaggaggaattagaaggtgacgaggagggagaagacgaggatgatgcggaaattaaccccaagaaggaacccagccagccggcggaatgcaagcagcagtaggaagcggaggcgggtgcctggcagaccggctgtcgggactccaggcctgtgggcggggcctcggtccttgccgcagcacaatcccgtggacagagcttactccatctaactcgttttcaagtgcatgattttcactttcacttttcctttttccttattattttgcttaacttgtacagtggcaactgaaatgcatttcagaaataggaggtttcgtccagcaccctctgcagccttggtgcctgtagctctggacttccctgggcctttccctgtgggagggccctgtagaccacatcagggtggggtgggggtcacttggcaaaaagggccgaggtctggtgatgtggttcccaggatctggaacctctcccacccctcctgcagttggactgaattcttccctttcatccgaagaaacccacttgctgtttccagccgctgaatctgctgagtgtgcagcctgcatcacctgctgtatgccgatcatctcagaaagggctgtgtagagtagggccctgttctccttaggatgttgcttcttgatttttttttttttttaggggtgggtcagggttgtgacacaccagcccaggtgagagctgctgcgggtcacctcatatttatttatcccttcttgcctgtgaggactgcggcttttcgctgtggctcgtccttaacgtttctgaaccaccttggtgccctgagcaggaagatgtgccacttcctagcaggcgcaaggcctgtgcggaagaaacgccgctccctgccaccagggctgaagatgcgagcccgtcctcatgacgcaggcgccaccctgctgccggagccgggcttcggcagtcttctccactgagggactgggctgggaagtcctgcgtttcagtggagcgtatgagcgtcaagtcctgctttctcagtagccccattgcggggccccaccattcatcctgtctgaaggtcctgggtttggtgtgaccgcttggcggctggtgggtggggttttcaagtgggtgacggcgctctccggcagccggggatggccgtgtccgcactgaccaggcctgtggagagtgctcggcctaaccttagaacacatttgtaactgaatacagtgttttcaatttgtacagaatagttagaatattctattaaagtggtgaaacattga

SEQ ID NO: 445794 - DNA, 2624 bp, Homo sapiens
ggcacgagcttgctcgcggagagaggagctaggagcctcggccaatgggagccggcgttgttggaggccacggcggcgcagccccaaagcgagcgaagctagggtcgccgccactgccgcaggaggcgtgagggaaaagtgttttaggcttccagagtagaaatctgatattacttcgtttgattcttcgaccactatggtgataggaagtagctgatctctgcaggaaactgctgttacctggcctcagctgaatttttgtgggacctcctgaggggataaaaacattcagatggcagatcacagtttttcagatggggttccttcagattccgtggaagctgctaaaaatgcaagtaacacagaaaagctcacagatcaggtgatgcagaatcctcgagttctggcagctttacaggagcgacttgacaatgtccctcacaccccttccagctacatcgaaactttacctaaagcagtaaaaagaagaattaatgcattgaaacaacttcaggtgagatgtgctcacatagaagccaagttctatgaagaggtacatgacttggaaagaaagtatgcagcgctataccagcctctctttgacaagagaagagaatttatcaccggcgatgttgaaccaacagatgcggaatcggaatggcacagtgaaaatgaagaggaagagaaattggctggagacatgaaaagtaaagtagtcgtcacagaaaaagcagcggcaacggctgaagagccagatcccaaaggaattccagagttctggtttaccatcttcagaaatgtggacatgctgagtgaattagtccaggaatatgatgaaccaatcttgaaacacctgcaggatattaaagtgaaattttctgaccctggacagcctatgtcttttgtgttagagttccactttgaacccaacgactactttaccaactcagtcctgacaaaaacctacaagatgaaatcagaaccagataaggctgatcccttttcctttgaaggtcctgagattgtggactgtgacgggtgtactattgactggaagaaaggaaagaatgttactgtcaaaaccatcaagaaaaagcagaagcataagggtcgaggcactgttagaacaattacgaaacaagtacccaatgagtcctttttcaacttcttcaatccattgaaagcatccggggatggagaatcactggatgaagattctgaattcacattagcctctgattttgaaattggacactttttccgtgagcggatagtcccgcgggctgtgctgtacttcactggggaggccatagaagatgatgacaattttgaagaaggtgaagaaggagaagaggaggaattagaaggtgacgaggagggagaagacgaggatgatgcggaaattaaccccaagaaggaacccagccagccggcggaatgcaagcagcagtaggaagcggaggcgggtgcctggcagaccggctgtcgggactccaggcctgtgggcggggcctcggtccttgccgcagcacaatcccgtggacagagcttactccatctaactcgttttcaagtgcatgattttcactttcacttttcctttttccttattattttgcttaacttgtacagtggcaactgaaatgcatttcagaaataggaggtttcgtccagcaccctctgcagccttggtgcctgtagctctggacttccctgggcctttccctgtgggagggccctgtagaccacatcagggtggggtgggggtcacttggcaaaaagggccgaggtctggtgatgtggttcccaggatctggaacctctcccacccctcctgcagttggactgaattcttccctttcatccgaagaaacccacttgctgtttccagccgctgaatctgctgagtgtgcagcctgcatcacctgctgtatgccgatcatctcagaaagggctgtgtagagtagggccctgttctccttaggatgttgcttcttgatttttttttttttttaggggtgggtcagggttgtgacacaccagcccaggtgagagctgctgcgggtcacctcatatttatttatcccttcttgcctgtgaggactgcggcttttcgctgtggctcgtccttaacgtttctgaaccaccttggtgccctgagcaggaagatgtgccacttcctagcaggcgcaaggcctgtgcggaagaaacgccgctccctgccaccagggctgaagatgcgagcccgtcctcatgacgcaggcgccaccctgctgccggagccgggcttcggcagtcttctccactgagggactgggctgggaagtcctgcgtttcagtggagcgtatgagcgtcaagtcctgctttctcagtagccccattgcggggccccaccattcatcctgtctgaaggtcctgggtttggtgtgaccgcttggcggctggtgggtggggttttcaagtgggtgacggcgctctccggcagccggggatggccgtgtccgcactgaccaggcctgtggagagtgctcggcctaaccttagaacacatttgtaactgaatacagtgttttcaatttgtacagaatagttagaatattctattaaagtggtgaaacattga

SEQ ID NO: 445795 - DNA, 2501 bp, Homo sapiens
agtcaagatctagaacattttcatcactctagaaagttccctcctgtcccttctagtggactccatcccacagataaccgttgtttaaaaagtatattgaacaaacatttttgcttatgaatataattattacaactctttttaatttataggggataaaaacattcagatggcagatcacagtttttcagatggggttccttcagattccgtggaagctgctaaaaatgcaagtaacacagaaaagctcacagatcaggtgatgcagaatcctcgagttctggcagctttacaggagcgacttgacaatgtccctcacaccccttccagctacatcgaaactttacctaaagcagtaaaaagaagaattaatgcattgaaacaacttcaggtgagatgtgctcacatagaagccaagttctatgaagaggtacatgacttggaaagaaagtatgcagcgctataccagcctctctttgacaagagaagagaatttatcaccggcgatgttgaaccaacagatgcggaatcggaatggcacagtgaaaatgaagaggaagagaaattggctggagacatgaaaagtaaagtagtcgtcacagaaaaagcagcggcaacggctgaagagccagatcccaaaggaattccagagttctggtttaccatcttcagaaatgtggacatgctgagtgaattagtccaggaatatgatgaaccaatcttgaaacacctgcaggatattaaagtgaaattttctgaccctggacagcctatgtcttttgtgttagagttccactttgaacccaacgactactttaccaactcagtcctgacaaaaacctacaagatgaaatcagaaccagataaggctgatcccttttcctttgaaggtcctgagattgtggactgtgacgggtgtactattgactggaagaaaggaaagaatgttactgtcaaaaccatcaagaaaaagcagaagcataagggtcgaggcactgttagaacaattacgaaacaagtacccaatgagtcctttttcaacttcttcaatccattgaaagcatccggggatggagaatcactggatgaagattctgaattcacattagcctctgattttgaaattggacactttttccgtgagcggatagtcccgcgggctgtgctgtacttcactggggaggccatagaagatgatgacaattttgaagaaggtgaagaaggagaagaggaggaattagaaggtgacgaggagggagaagacgaggatgatgcggaaattaaccccaagaaggaacccagccagccggcggaatgcaagcagcagtaggaagcggaggcgggtgcctggcagaccggctgtcgggactccaggcctgtgggcggggcctcggtccttgccgcagcacaatcccgtggacagagcttactccatctaactcgttttcaagtgcatgattttcactttcacttttcctttttccttattattttgcttaacttgtacagtggcaactgaaatgcatttcagaaataggaggtttcgtccagcaccctctgcagccttggtgcctgtagctctggacttccctgggcctttccctgtgggagggccctgtagaccacatcagggtggggtgggggtcacttggcaaaaagggccgaggtctggtgatgtggttcccaggatctggaacctctcccacccctcctgcagttggactgaattcttccctttcatccgaagaaacccacttgctgtttccagccgctgaatctgctgagtgtgcagcctgcatcacctgctgtatgccgatcatctcagaaagggctgtgtagagtagggccctgttctccttaggatgttgcttcttgatttttttttttttttaggggtgggtcagggttgtgacacaccagcccaggtgagagctgctgcgggtcacctcatatttatttatcccttcttgcctgtgaggactgcggcttttcgctgtggctcgtccttaacgtttctgaaccaccttggtgccctgagcaggaagatgtgccacttcctagcaggcgcaaggcctgtgcggaagaaacgccgctccctgccaccagggctgaagatgcgagcccgtcctcatgacgcaggcgccaccctgctgccggagccgggcttcggcagtcttctccactgagggactgggctgggaagtcctgcgtttcagtggagcgtatgagcgtcaagtcctgctttctcagtagccccattgcggggccccaccattcatcctgtctgaaggtcctgggtttggtgtgaccgcttggcggctggtgggtggggttttcaagtgggtgacggcgctctccggcagccggggatggccgtgtccgcactgaccaggcctgtggagagtgctcggcctaaccttagaacacatttgtaactgaatacagtgttttcaatttgtacagaatagttagaatattctattaaagtggtgaaacattga

SEQ ID NO: 445796 - DNA, 2409 bp, Homo sapiens
ggcacgagcttgctcgcggagagaggagctaggagcctcggccaatgggagccggcgttgttggaggccacggcggcgcagccccaaagcgagcgaagctagggtcgccgccactgccgcaggaggcgtgaggggataaaaacattcagatggcagatcacagtttttcagatggggttccttcagattccgtggaagctgctaaaaatgcaagtaacacagaaaagctcacagatcaggtgatgcagaatcctcgagttctggcagctttacaggagcgacttgacaatgtccctcacaccccttccagctacatcgaaactttacctaaagcagtaaaaagaagaattaatgcattgaaacaacttcaggtgagatgtgctcacatagaagccaagttctatgaagaggtacatgacttggaaagaaagtatgcagcgctataccagcctctctttgacaagagaagagaatttatcaccggcgatgttgaaccaacagatgcggaatcggaatggcacagtgaaaatgaagaggaagagaaattggctggagacatgaaaagtaaagtagtcgtcacagaaaaagcagcggcaacggctgaagagccagatcccaaaggaattccagagttctggtttaccatcttcagaaatgtggacatgctgagtgaattagtccagtcttttgtgttagagttccactttgaacccaacgactactttaccaactcagtcctgacaaaaacctacaagatgaaatcagaaccagataaggctgatcccttttcctttgaaggtcctgagattgtggactgtgacgggtgtactattgactggaagaaaggaaagaatgttactgtcaaaaccatcaagaaaaagcagaagcataagggtcgaggcactgttagaacaattacgaaacaagtacccaatgagtcctttttcaacttcttcaatccattgaaagcatccggggatggagaatcactggatgaagattctgaattcacattagcctctgattttgaaattggacactttttccgtgagcggatagtcccgcgggctgtgctgtacttcactggggaggccatagaagatgatgacaattttgaagaaggtgaagaaggagaagaggaggaattagaaggtgacgaggagggagaagacgaggatgatgcggaaattaaccccaagaaggaacccagccagccggcggaatgcaagcagcagtaggaagcggaggcgggtgcctggcagaccggctgtcgggactccaggcctgtgggcggggcctcggtccttgccgcagcacaatcccgtggacagagcttactccatctaactcgttttcaagtgcatgattttcactttcacttttcctttttccttattattttgcttaacttgtacagtggcaactgaaatgcatttcagaaataggaggtttcgtccagcaccctctgcagccttggtgcctgtagctctggacttccctgggcctttccctgtgggagggccctgtagaccacatcagggtggggtgggggtcacttggcaaaaagggccgaggtctggtgatgtggttcccaggatctggaacctctcccacccctcctgcagttggactgaattcttccctttcatccgaagaaacccacttgctgtttccagccgctgaatctgctgagtgtgcagcctgcatcacctgctgtatgccgatcatctcagaaagggctgtgtagagtagggccctgttctccttaggatgttgcttcttgatttttttttttttttaggggtgggtcagggttgtgacacaccagcccaggtgagagctgctgcgggtcacctcatatttatttatcccttcttgcctgtgaggactgcggcttttcgctgtggctcgtccttaacgtttctgaaccaccttggtgccctgagcaggaagatgtgccacttcctagcaggcgcaaggcctgtgcggaagaaacgccgctccctgccaccagggctgaagatgcgagcccgtcctcatgacgcaggcgccaccctgctgccggagccgggcttcggcagtcttctccactgagggactgggctgggaagtcctgcgtttcagtggagcgtatgagcgtcaagtcctgctttctcagtagccccattgcggggccccaccattcatcctgtctgaaggtcctgggtttggtgtgaccgcttggcggctggtgggtggggttttcaagtgggtgacggcgctctccggcagccggggatggccgtgtccgcactgaccaggcctgtggagagtgctcggcctaaccttagaacacatttgtaactgaatacagtgttttcaatttgtacagaatagttagaatattctattaaagtggtgaaacattga

SEQ ID NO: 445797 - DNA, 2552 bp, Homo sapiens
ggcacgagcttgctcgcggagagaggagctaggagcctcggccaatgggagccggcgttgttggaggccacggcggcgcagccccaaagcgagcgaagctagggtcgccgccactgccgcaggaggcgtgagggaaaagtgttttaggcttccagagtagaaatctgatattacttcgtttgattcttcgaccactatggtgataggaagtagctgatctctgcaggaaactgctgttacctggcctcagctgaatttttgtgggacctcctgaggggataaaaacattcagatggcagatcacagtttttcagatggggttccttcagattccgtggaagctgctaaaaatgcaagtaacacagaaaagctcacagatcaggtgatgcagaatcctcgagttctggcagctttacaggagcgacttgacaatgtccctcacaccccttccagctacatcgaaactttacctaaagcagtaaaaagaagaattaatgcattgaaacaacttcaggtgagatgtgctcacatagaagccaagttctatgaagaggtacatgacttggaaagaaagtatgcagcgctataccagcctctctttgacaagagaagagaatttatcaccggcgatgttgaaccaacagatgcggaatcggaatggcacagtgaaaatgaagaggaagagaaattggctggagacatgaaaagtaaagtagtcgtcacagaaaaagcagcggcaacggctgaagagccagatcccaaaggaattccagagttctggtttaccatcttcagaaatgtggacatgctgagtgaattagtccagtcttttgtgttagagttccactttgaacccaacgactactttaccaactcagtcctgacaaaaacctacaagatgaaatcagaaccagataaggctgatcccttttcctttgaaggtcctgagattgtggactgtgacgggtgtactattgactggaagaaaggaaagaatgttactgtcaaaaccatcaagaaaaagcagaagcataagggtcgaggcactgttagaacaattacgaaacaagtacccaatgagtcctttttcaacttcttcaatccattgaaagcatccggggatggagaatcactggatgaagattctgaattcacattagcctctgattttgaaattggacactttttccgtgagcggatagtcccgcgggctgtgctgtacttcactggggaggccatagaagatgatgacaattttgaagaaggtgaagaaggagaagaggaggaattagaaggtgacgaggagggagaagacgaggatgatgcggaaattaaccccaagaaggaacccagccagccggcggaatgcaagcagcagtaggaagcggaggcgggtgcctggcagaccggctgtcgggactccaggcctgtgggcggggcctcggtccttgccgcagcacaatcccgtggacagagcttactccatctaactcgttttcaagtgcatgattttcactttcacttttcctttttccttattattttgcttaacttgtacagtggcaactgaaatgcatttcagaaataggaggtttcgtccagcaccctctgcagccttggtgcctgtagctctggacttccctgggcctttccctgtgggagggccctgtagaccacatcagggtggggtgggggtcacttggcaaaaagggccgaggtctggtgatgtggttcccaggatctggaacctctcccacccctcctgcagttggactgaattcttccctttcatccgaagaaacccacttgctgtttccagccgctgaatctgctgagtgtgcagcctgcatcacctgctgtatgccgatcatctcagaaagggctgtgtagagtagggccctgttctccttaggatgttgcttcttgatttttttttttttttaggggtgggtcagggttgtgacacaccagcccaggtgagagctgctgcgggtcacctcatatttatttatcccttcttgcctgtgaggactgcggcttttcgctgtggctcgtccttaacgtttctgaaccaccttggtgccctgagcaggaagatgtgccacttcctagcaggcgcaaggcctgtgcggaagaaacgccgctccctgccaccagggctgaagatgcgagcccgtcctcatgacgcaggcgccaccctgctgccggagccgggcttcggcagtcttctccactgagggactgggctgggaagtcctgcgtttcagtggagcgtatgagcgtcaagtcctgctttctcagtagccccattgcggggccccaccattcatcctgtctgaaggtcctgggtttggtgtgaccgcttggcggctggtgggtggggttttcaagtgggtgacggcgctctccggcagccggggatggccgtgtccgcactgaccaggcctgtggagagtgctcggcctaaccttagaacacatttgtaactgaatacagtgttttcaatttgtacagaatagttagaatattctattaaagtggtgaaacattga

SEQ ID NO: 445798 - DNA, 2427 bp, Homo sapiens
ggcacgagcttgctcgcggagagaggagctaggagcctcggccaatgggagccggcgttgttggaggccacggcggcgcagccccaaagcgagcgaagctagggtcgccgccactgccgcaggaggcgtgaggggataaaaacattcagatggcagatcacagtttttcagatggggttccttcagattccgtggaagctgctaaaaatgcaagtaacacagaaaagctcacagatcaggtgatgcagaatcctcgagttctggcagctttacaggagcgacttgacaatgtccctcacaccccttccagctacatcgaaactttacctaaagcagtaaaaagaagaattaatgcattgaaacaacttcaggtgagatgtgctcacatagaagccaagttctatgaagaggtacatgacttggaaagaaagtatgcagcgctataccagcctctctttgacaagagaagagaatttatcaccggcgatgttgaaccaacagatgcggaatcggaatggcacagtgaaaatgaagaggaagagaaattggctggagacatgaaaagtaaagtagtcgtcacagaaaaagcagcggcaacggctgaagagccagatcccaaaggaattccagagttctggtttaccatcttcagaaatgtggacatgctgagtgaattagtccaggaatatgatgaaccaatcttgaaacacctgcaggatattaaagtgaaattttctgaccctggacagcctatgtcttttgtgttagagttccactttgaacccaacgactactttaccaactcagtcctgacaaaaacctacaagatgaaatcagaaccagataaggctgatcccttttcctttgaaggtcctgagattgtggactgtgacgggtgtactattgactggaagaaaggaaagaatgttactgtcaaaaccatcaagaaaaagcagaagcataagggtcgaggcactgttagaacaattacgaaacaagtacccaatgagtcctttttcaacttcttcaatccattgaaagcatccggggatggagaatcactggatgaagattctgaattcacattagcctctgattttgaaattggacactttttccgtgagcggatagtcccgcgggctgtgctgtacttcactggggaggccatagaagatgatgacaattttgaagaaggtgaagaaggagaagaggaggaattagaaggtgacgaggagggagaagacgaggatgatgcggaaattaaccccaagaaggaacccagccagccggcggaatgcaagcagcagtaggaagcggaggcgggtgcctggcagaccggctgtcgggactccaggcctgtgggcggggcctcggtccttgccgcagcacaatcccgtggacagagcttactccatctaactcgttttcaagtgcatgattttcactttcacttttcctttttccttattattttgcttaacttgtacagtggcaactgaaatgcatttcagaaataggaggtttcgtccagcaccctctgcagccttggtgcctgtagctctggacttccctgggcctttccctgtgggagggccctgtagaccacatcagggtggggtgggggtcacttggccctcctgcagttggactgaattcttccctttcatccgaagaaacccacttgctgtttccagccgctgaatctgctgagtgtgcagcctgcatcacctgctgtatgccgatcatctcagaaagggctgtgtagagtagggccctgttctccttaggatgttgcttcttgatttttttttttttttaggggtgggtcagggttgtgacacaccagcccaggtgagagctgctgcgggtcacctcatatttatttatcccttcttgcctgtgaggactgcggcttttcgctgtggctcgtccttaacgtttctgaaccaccttggtgccctgagcaggaagatgtgccacttcctagcaggcgcaaggcctgtgcggaagaaacgccgctccctgccaccagggctgaagatgcgagcccgtcctcatgacgcaggcgccaccctgctgccggagccgggcttcggcagtcttctccactgagggactgggctgggaagtcctgcgtttcagtggagcgtatgagcgtcaagtcctgctttctcagtagccccattgcggggccccaccattcatcctgtctgaaggtcctgggtttggtgtgaccgcttggcggctggtgggtggggttttcaagtgggtgacggcgctctccggcagccggggatggccgtgtccgcactgaccaggcctgtggagagtgctcggcctaaccttagaacacatttgtaactgaatacagtgttttcaatttgtacagaatagttagaatattctattaaagtggtgaaacattga

SEQ ID NO: 445799 - DNA, 1313 bp, Homo sapiens
atgagaatgaactcattcagtcttggctttcattgttgattggagctaattggtgaatggagctggctttgctctctacaagccttgtctttttcattgacagaaggaacccagccagccggcggaatgcaagcagcagtaggaagcggaggcgggtgcctggcagaccggctgtcgggactccaggcctgtgggcggggcctcggtccttgccgcagcacaatcccgtggacagagcttactccatctaactcgttttcaagtgcatgattttcactttcacttttcctttttccttattattttgcttaacttgtacagtggcaactgaaatgcatttcagaaataggaggtttcgtccagcaccctctgcagccttggtgcctgtagctctggacttccctgggcctttccctgtgggagggccctgtagaccacatcagggtggggtgggggtcacttggcaaaaagggccgaggtctggtgatgtggttcccaggatctggaacctctcccacccctcctgcagttggactgaattcttccctttcatccgaagaaacccacttgctgtttccagccgctgaatctgctgagtgtgcagcctgcatcacctgctgtatgccgatcatctcagaaagggctgtgtagagtagggccctgttctccttaggatgttgcttcttgatttttttttttttttaggggtgggtcagggttgtgacacaccagcccaggtgagagctgctgcgggtcacctcatatttatttatcccttcttgcctgtgaggactgcggcttttcgctgtggctcgtccttaacgtttctgaaccaccttggtgccctgagcaggaagatgtgccacttcctagcaggcgcaaggcctgtgcggaagaaacgccgctccctgccaccagggctgaagatgcgagcccgtcctcatgacgcaggcgccaccctgctgccggagccgggcttcggcagtcttctccactgagggactgggctgggaagtcctgcgtttcagtggagcgtatgagcgtcaagtcctgctttctcagtagccccattgcggggccccaccattcatcctgtctgaaggtcctgggtttggtgtgaccgcttggcggctggtgggtggggttttcaagtgggtgacggcgctctccggcagccggggatggccgtgtccgcactgaccaggcctgtggagagtgctcggcctaaccttagaacacatttgtaactgaatacagtgttttcaatttgtacagaatagttagaatattctattaaagtggtgaaacattga

SEQ ID NO: 445800 - DNA, 1837 bp, Homo sapiens
ggcacgagcttgctcgcggagagaggagctaggagcctcggccaatgggagccggcgttgttggaggccacggcggcgcagccccaaagcgagcgaagctagggtcgccgccactgccgcaggaggcgtgaggggataaaaacattcagatggcagatcacagtttttcagatggggttccttcagattccgtggaagctgctaaaaatgcaagtaacacagaaaagctcacagatcaggtgatgcagaatcctcgagttctggcagctttacaggagcgacttgacaatgtccctcacaccccttccagctacatcgaaactttacctaaagcagtaaaaagaagaattaatgcattgaaacaacttcaggtgagatgtgctcacatagaagccaagttctatgaagaggtacatgacttggaaagaaagtatgcagcgctataccagcctctctttgacaagagaagagaatttatcaccggcgatgttgaaccaacagatgcggaatcggaatggcacagtgaaaatgaagaggaagagaaattggctggagacatgaaaagtaaagtagtcgtcacagaaaaagcagcggcaacggctgaagagccagatcccaaaggaattccagagttctggtttaccatcttcagaaatgtggacatgctgagtgaattagtccaggaatatgatgaaccaatcttgaaacacctgcaggatattaaagtgaaattttctgaccctggacagcctatgtcttttgtgttagagttccactttgaacccaacgactactttaccaactcagtcctgacaaaaacctacaagatgaaatcagaaccagataaggctgatcccttttcctttgaaggtcctgagattgtggactgtgacgggtgtactattgactggaagaaaggaaagaatgttactgtcaaaaccatcaagaaaaagcagaagcataagggtcgaggcactgttagaacaattacgaaacaagtacccaatgagtcctttttcaacttcttcaatccattgaaagcatccggggatggagaatcactggatgaagattctgaattcacattagcctctgattttgaaattggacactttttccgtgagcggatagtcccgcgggctgtgctgtacttcactggggaggccatagaagatgatgacaatgtatgaggctcggggaaggggggcttccacctgggtgcttatctctgttggtgcagagtggccctgaattgtggcttaggaaacccccatgcctaatctttttattacatcatcagccagatatgtagtccaagctgctgtccttgttgtggggggaatacgcttgaagaggagaagtctgaggaacagagcaggaaaagcaggtgtctgtgaagcagtttcagaggtgattgccagtttcctatgtgagccctgcctagtgactcaacaatattctctcaaaacctaagcttcagggaacttgtgaacacagggaatatctcttttatggaggtctggccacaacaaacatttattgacagtggacttatgctagcctgtggttcatcaacccaaaagaaatagaaattcctgaacttctatctaattaggtaaaaaggaaaaaaaagaaacccgtgctcccgaagaaaacaacaagattgcatgtcactttcctttctgggcttgagggaagccagctcttccacagtcagaacttgcgggtgcacagcccaagtaccgcttagaaactcccatcctcaccaaggctcaagcagcttcaagtcttcttgatctgtggaaaataaagttttgttttatagactgtactggaa

SEQ ID NO: 445801 - DNA, 1751 bp, Homo sapiens
  misc_feature (1524)..(1524): n is a, c, g, or t
  misc_feature (1556)..(1556): n is a, c, g, or t
  misc_feature (1572)..(1573): n is a, c, g, or t
  misc_feature (1585)..(1585): n is a, c, g, or t
  misc_feature (1588)..(1588): n is a, c, g, or t
  misc_feature (1590)..(1590): n is a, c, g, or t
  misc_feature (1609)..(1609): n is a, c, g, or t
  misc_feature (1620)..(1620): n is a, c, g, or t
ggcacgagcttgctcgcggagagaggagctaggagcctcggccaatgggagccggcgttgttggaggccacggcggcgcagccccaaagcgagcgaagctagggtcgccgccactgccgcaggaggcgtgaggggataaaaacattcagatggcagatcacagtttttcagatggggttccttcagattccgtggaagctgctaaaaatgcaagtaacacagaaaagctcacagatcaggtgatgcagaatcctcgagttctggcagctttacaggagcgacttgacaatgtccctcacaccccttccagctacatcgaaactttacctaaagcagtaaaaagaagaattaatgcattgaaacaacttcaggtgagatgtgctcacatagaagccaagttctatgaagaggtacatgacttggaaagaaagtatgcagcgctataccagcctctctttgacaagagaagagaatttatcaccggcgatgttgaaccaacagatgcggaatcggaatggcacagtgaaaatgaagaggaagagaaattggctggagacatgaaaagtaaagtagtcgtcacagaaaaagcagcggcaacggctgaagagccagatcccaaaggaattccagagttctggtttaccatcttcagaaatgtggacatgctgagtgaattagtccaggaatatgatgaaccaatcttgaaacacctgcaggatattaaagtgaaattttctgaccctggacagcctatgtcttttgtgttagagttccactttgaacccaacgactactttaccaactcagtcctgacaaaaacctacaagatgaaatcagaaccagataaggctgatcccttttcctttgaaggtcctgagattgtggactgtgacgggtgtactattgactggaagaaaggaaagaatgttactgtcaaaaccatcaagaaaaagcagaagcataagggtcgaggcactgttagaacaattacgaaacaagtacccaatgagtcctttttcaacttcttcaatccattgaaagcatccggggatggagaatcactgtttacctaaagcagtaaaaagaagaattaatgcattgaaacaacttcaggtgagatgtgctcacatagaagccaagttctatgaagaggtacatgacttggaaagaaagtatgctgtgccattccgattccgcatctgttggttcaacatcgccggtgataaattctcttctcgtgccgaattcggcacgaggggcagtgggacagggcatggccaggtggccactccagacccctggcttttcactgctggctgccttagaacctttcttacattagcagtttgctttgtatgcactttgtttttttctttgggtcttgttttttttttccacttagaaattgcatttcctgacagaaggactcaggttgtctgaagtcactgcacagtgcatctcagcccacatagtgatggttcccctgttcactctacttagcatgtccctaccgagtctcttctncactggatggaggaaaaccaagccgtggcttnccgtcagccctccctnnccctccctcaancantncccatggaaatgtcaacangtatgaataangacacctactgagaaaaaaaaaaaaacatttataaataaaaaaaaaaaacttcgggtggggcccggacccaattggcccatagtgaggcgattacaattcactgcccggggtttacaaccgtcggactggg

SEQ ID NO: 445802 - DNA, 1127 bp, Homo sapiens
  misc_feature (1093)..(1093): n is a, c, g, or t
  misc_feature (1124)..(1124): n is a, c, g, or t
ggcacgagcttgctcgcggagagaggagctaggagcctcggccaatgggagccggcgttgttggaggccacggcggcgcagccccaaagcgagcgaagctagggtcgccgccactgccgcaggaggcgtgaggggataaaaacattcagatggcagatcacagtttttcagatggggttccttcagattccgtggaagctgctaaaaatgcaagtaacacagaaaagctcacagatcaggtgatgcagaatcctcgagttctggcagctttacaggagcgacttgacaatgtccctcacaccccttccagctacatcgaaactttacctaaagcagtaaaaagaagaattaatgcattgaaacaacttcaggtgagatgtgctcacatagaagccaagttctatgaagaggtacatgacttggaaagaaagtatgcagcgctataccagcctctctttgacaagagaagagaatttatcaccggcgatgttgaaccaacagatgcggaatcggaatggcacagtgaaaatgaagaggaagagaaattggctggagacatgaaaagtaaagtagtcgtcacagaaaaagcagcggcaacggctgaagagccagatcccaaaggaattccagagttctggtttaccatcttcagaaatgtggacatgctgagtgaattagtccaggaatatgatgaaccaatcttgaaacacctgcaggatattaaagtgaaattttctgaccctggacagcctatgtcttttgtgttagagttccactttgaacccaacgactactttaccaactcagtcctgacaaaaacctacaagatgaaatcagaaccagataaggctgatcccttttcctttgaaggtcctgagattgtggactgtgacgggtgtactattgactggaagaaaggaaagaatgttactgtcaaaaccatcaagaaaaagcagaagcataagggtcgaggcactgttagaacaattacgaaacaagtacccaatgagtcctttttcaacttcttcaatccattgaaagcatccggggatggagaatcactgggatgaagatccgaattcacatttagccncggaattttttttggggaaaaaaaaattttnttg

SEQ ID NO: 445803 - DNA, 1440 bp, Homo sapiens
ggcacgagcttgctcgcggagagaggagctaggagcctcggccaatgggagccggcgttgttggaggccacggcggcgcagccccaaagcgagcgaagctagggtcgccgccactgccgcaggaggcgtgaggggataaaaacattcagatggcagatcacagtttttcagatggggttccttcagattccgtggaagctgctaaaaatgcaagtaacacagaaaagctcacagatcaggtgatgcagaatcctcgagttctggcagctttacaggagcgacttgacaatgtccctcacaccccttccagctacatcgaaactttacctaaagcagtaaaaagaagaattaatgcattgaaacaacttcaggtgagatgtgctcacatagaagccaagttctatgaagaggtacatgacttggaaagaaagtatgcagcgctataccagcctctctttgacaagagaagagaatttatcaccggcgatgttgaaccaacagatgcggaatcggaatggcacagtgaaaatgaagaggaagagaaattggctggagacatgaaaagtaaagtagtcgtcacagaaaaagcagcggcaacggctgaagagccagatcccaaaggaattccagagttctggtttaccatcttcagaaatgtggacatgctgagtgaattagtccaggaatatgatgaaccaatcttgaaacacctgcaggatattaaagtgaaattttctgaccctggacagcctatgtcttttgtgttagagttccactttgaacccaacgactactttaccaactcagtcctgacaaaaacctacaagatgaaatcagaaccagataaggctgatcccttttcctttgaaggtcctgagattgtggactgtgacgggtgtactattgactggaagaaaggaaagaatgttactgtcaaaaccatcaagaaaaagcagaagcataagggtcgaggcactgttagaacaattacgaaacaagtacccaatgagtcctttttcaacttcttcaatccattgaaagcatccggggatggagaatcactggtaagatttgttgttaatagtcttattttcctgttgaagtctctcctgagtgaatgtctacttgtctacttgttaaaaaaagtccagtcctggctgtgtgtggactgggtatgccagtgatcttaatgctttgggaggctgaggtgggaggactgcacgagtccaggagtttgagaccagcctgggcaacatagcacaaccccatctccacaaaaaattaaaaccaaataaattagccagccgaacatggtggttcacgcccgtaataccagcactgtgggaggccaaggtgggtggatcaccagaggtcaggagttcaagaccagtctggtcaacatggtgaaaccccgtttctgcttaaaataccaaaaaaaaa

SEQ ID NO: 445804 - DNA, 366 bp, Homo sapiens
tttttttcaatcctcaaaccgtttattgacagcacaaggctcaacagcaggtgagccacgtgagggtggcgagcgcttgcgaggcagtgtgggcaccaggcaggggatcccggagggaagccctctgccagggacatggtgagggcgtggccatcacccacgaagggagcataaataacactggctggtgggtggggttttcaagtgggtgacggcgctctccggcagccggggatggccgtgtccgcactgaccaggcctgtggagagtgctcggcctaaccttagaacacatttgtaactgaatacagtgttttcaatttgtacagaatagttagaatattctattaaagtggtgaaacattga

SEQ ID NO: 445805 - DNA, 667 bp, Homo sapiens
attgatcactttaaagattaaacaccaaagttttaatatatttctactaaggtttcttttccctttgtatgagatgtaaaatgatacccagattcctgtatccaataacattatgctgctggttcgatcagccttgtagaaaatttaaggaaaacaaattcatcggtttacaaaaatcttttcctgtgtgcctgctcctcggtgtgagaacagccagggcagagctgtggtgccaggttcccagctgtgtccagggtacaccctggctgaccagcttcctatcctattccttgttttgtgtgactttcaatttcctggcatgcttttaaaatgcgctgcacacaagcaaatggctcctcaggcaagcgaggcccagcaggcagcgtggctggactttctgctcctcttaggcttggtcagtgagtcacttgatgggactggtgtcttgggcaggctgctgtcatgttttgtaaacctaaaaatgtttttctgtgtttctccagtttgaagaaggtgaagaaggagaagaggaggtaagagacaggtttatgcagtgccacttacctccctgaagttgtttctttggctttctctgcttgaaggttatggactcacagggctgtgttaaacccattttttgtgacgctgtctttgattctaagaatgt

SEQ ID NO: 445806 - DNA, 192 bp, Homo sapiens
gttcacaccaccatgcctggctaattttgttttttttgttgtttttgtagagacgaggtttccccatgttgcccaggctggtctgaaactcctgagcttcaggtgatctgtgataggggtaggatttgaaaccaggctgttcagtgtgtgtctgtcttgttctaggcattgagttctgggttggttggttct

SEQ ID NO: 445807 - DNA, 2519 bp, Homo sapiens
ggcacgagcttgctcgcggagagaggagctaggagcctcggccaatgggagccggcgttgttggaggccacggcggcgcagccccaaagcgagcgaagctagggtcgccgccactgccgcaggaggcgtgaggggataaaaacattcagatggcagatcacagtttttcagatggggttccttcagattccgtggaagctgctaaaaatgcaagtaacacagaaaagctcacagatcaggtgatgcagaatcctcgagttctggcagctttacaggagcgacttgacaatgtccctcacaccccttccagctacatcgaaactttacctaaagcagtaaaaagaagaattaatgcattgaaacaacttcaggtgagatgtgctcacatagaagccaagttctatgaagaggtacatgacttggaaagaaagtatgcagcgctataccagcctctctttgacaagagaagagaatttatcaccggcgatgttgaaccaacagatgcggaatcggaatggcacagtgaaaatgaagaggaagagaaattggctggagacatgaaaagtaaagtagtcgtcacagaaaaagcagcggcaacggctgaagagccagatcccaaaggaattccagagttctggtttaccatcttcagaaatgtggacatgctgagtgaattagtccaggaatatgatgaaccaatcttgaaacacctgcaggatattaaagtgaaattttctgaccctggacagcctatgtcttttgtgttagagttccactttgaacccaacgactactttaccaactcagtcctgacaaaaacctacaagatgaaatcagaaccagataaggctgatcccttttcctttgaaggtcctgagattgtggactgtgacgggtgtactattgactggaagaaaggaaagaatgttactgtcaaaaccatcaagaaaaagcagaagcataagggtcgaggcactgttagaacaattacgaaacaagtacccaatgagtcctttttcaacttcttcaatccattgaaagcatccggggatggagaatcactggatgaagattctgaattcacattagcctctgattttgaaattggacactttttccgtgagcggatagtcccgcgggctgtgctgtacttcactggggaggccatagaagatgatgacaattttgaagaaggtgaagaaggagaagaggaggaattagaaggtgacgaggagggagaagacgaggatgatgcggaaattaaccccaaggtgtaatttttgtctgttaatcattcatacgtttctagaaggaacccagccagccggcggaatgcaagcagcagtaggaagcggaggcgggtgcctggcagaccggctgtcgggactccaggcctgtgggcggggcctcggtccttgccgcagcacaatcccgtggacagagcttactccatctaactcgttttcaagtgcatgattttcactttcacttttcctttttccttattattttgcttaacttgtacagtggcaactgaaatgcatttcagaaataggaggtttcgtccagcaccctctgcagccttggtgcctgtagctctggacttccctgggcctttccctgtgggagggccctgtagaccacatcagggtggggtgggggtcacttggcaaaaagggccgaggtctggtgatgtggttcccaggatctggaacctctcccacccctcctgcagttggactgaattcttccctttcatccgaagaaacccacttgctgtttccagccgctgaatctgctgagtgtgcagcctgcatcacctgctgtatgccgatcatctcagaaagggctgtgtagagtagggccctgttctccttaggatgttgcttcttgatttttttttttttttaggggtgggtcagggttgtgacacaccagcccaggtgagagctgctgcgggtcacctcatatttatttatcccttcttgcctgtgaggactgcggcttttcgctgtggctcgtccttaacgtttctgaaccaccttggtgccctgagcaggaagatgtgccacttcctagcaggcgcaaggcctgtgcggaagaaacgccgctccctgccaccagggctgaagatgcgagcccgtcctcatgacgcaggcgccaccctgctgccggagccgggcttcggcagtcttctccactgagggactgggctgggaagtcctgcgtttcagtggagcgtatgagcgtcaagtcctgctttctcagtagccccattgcggggccccaccattcatcctgtctgaaggtcctgggtttggtgtgaccgcttggcggctggtgggtggggttttcaagtgggtgacggcgctctccggcagccggggatggccgtgtccgcactgaccaggcctgtggagagtgctcggcctaaccttagaacacatttgtaactgaatacagtgttttcaatttgtacagaatagttagaatattctattaaagtggtgaaacattga

SEQ ID NO: 445808 - DNA, 878 bp, Homo sapiens
ctgatagaggactcgcaggtaacaacacagcgaaacgaaagatcagagtggtcctttttcaacttcttcaatccattgaaagcatccggggatggagaatcactggatgaagattctgaattcacattagcctctgattttgaaattggacactttttccgtgagcggatagtcccgcgggctgtgctgtacttcactggggaggccatagaagatgatgacaatgtatgaggctcggggaaggggggcttccacctgggtgcttatctctgttggtgcagagtggccctgaattgtggcttaggaaacccccatgcctaatctttttattacatcatcagccagatatgtagtccaagctgctgtccttgttgtggggggaatacgcttgaagaggagaagtctgaggaacagagcaggaaaagcaggtgtctgtgaagcagtttcagaggtgattgccagtttcctatgtgagccctgcctagtgactcaacaatattctctcaaaacctaagcttcagggaacttgtgaacacagggaatatctcttttatggaggtctggccacaacaaacatttattgacagtggacttatgctagcctgtggttcatcaacccaaaagaaatagaaattcctgaacttctatctaattaggtaaaaaggaaaaaaaagaaacccgtgctcccgaagaaaacaacaagattgcatgtcactttcctttctgggcttgagggaagccagctcttccacagtcagaacttgcgggtgcacagcccaagtaccgcttagaaactcccatcctcaccaaggctcaagcagcttcaagtcttcttgatctgtggaaaataaagttttgttttatagactgtactggaa

SEQ ID NO: 445809 - DNA, 2663 bp, Homo sapiens
ttctggtcggggcaggcagcggcggccgcggcggggcctggggcttgggccctggagcccgggcctggggcgctggcgggaggcccctcccaactcccggcgcgcctcgcccggctgcccgcctcactgaaggtcaaggcgctttgttctgcgccgcgggcggcctcctgggcggcggccccttggaggaggcgaagacggcgagaggcgtgcggccgctcaaatctcccgctagcccagcccgccccgcgtgcgggggctgtggcggttacacggccgggcgcgccggagcgttcaggcttcccgtttttaaggggataaaaacattcagatggcagatcacagtttttcagatggggttccttcagattccgtggaagctgctaaaaatgcaagtaacacagaaaagctcacagatcaggtgatgcagaatcctcgagttctggcagctttacaggagcgacttgacaatgtccctcacaccccttccagctacatcgaaactttacctaaagcagtaaaaagaagaattaatgcattgaaacaacttcaggtgagatgtgctcacatagaagccaagttctatgaagaggtacatgacttggaaagaaagtatgcagcgctataccagcctctctttgacaagagaagagaatttatcaccggcgatgttgaaccaacagatgcggaatcggaatggcacagtgaaaatgaagaggaagagaaattggctggagacatgaaaagtaaagtagtcgtcacagaaaaagcagcggcaacggctgaagagccagatcccaaaggaattccagagttctggtttaccatcttcagaaatgtggacatgctgagtgaattagtccaggaatatgatgaaccaatcttgaaacacctgcaggatattaaagtgaaattttctgaccctggacagcctatgtcttttgtgttagagttccactttgaacccaacgactactttaccaactcagtcctgacaaaaacctacaagatgaaatcagaaccagataaggctgatcccttttcctttgaaggtcctgagattgtggactgtgacgggtgtactattgactggaagaaaggaaagaatgttactgtcaaaaccatcaagaaaaagcagaagcataagggtcgaggcactgttagaacaattacgaaacaagtacccaatgagtcctttttcaacttcttcaatccattgaaagcatccggggatggagaatcactggatgaagattctgaattcacattagcctctgattttgaaattggacactttttccgtgagcggatagtcccgcgggctgtgctgtacttcactggggaggccatagaagatgatgacaattttgaagaaggtgaagaaggagaagaggaggaattagaaggtgacgaggagggagaagacgaggatgatgcggaaattaaccccaagaaggaacccagccagccggcggaatgcaagcagcagtaggaagcggaggcgggtgcctggcagaccggctgtcgggactccaggcctgtgggcggggcctcggtccttgccgcagcacaatcccgtggacagagcttactccatctaactcgttttcaagtgcatgattttcactttcacttttcctttttccttattattttgcttaacttgtacagtggcaactgaaatgcatttcagaaataggaggtttcgtccagcaccctctgcagccttggtgcctgtagctctggacttccctgggcctttccctgtgggagggccctgtagaccacatcagggtggggtgggggtcacttggcaaaaagggccgaggtctggtgatgtggttcccaggatctggaacctctcccacccctcctgcagttggactgaattcttccctttcatccgaagaaacccacttgctgtttccagccgctgaatctgctgagtgtgcagcctgcatcacctgctgtatgccgatcatctcagaaagggctgtgtagagtagggccctgttctccttaggatgttgcttcttgatttttttttttttttaggggtgggtcagggttgtgacacaccagcccaggtgagagctgctgcgggtcacctcatatttatttatcccttcttgcctgtgaggactgcggcttttcgctgtggctcgtccttaacgtttctgaaccaccttggtgccctgagcaggaagatgtgccacttcctagcaggcgcaaggcctgtgcggaagaaacgccgctccctgccaccagggctgaagatgcgagcccgtcctcatgacgcaggcgccaccctgctgccggagccgggcttcggcagtcttctccactgagggactgggctgggaagtcctgcgtttcagtggagcgtatgagcgtcaagtcctgctttctcagtagccccattgcggggccccaccattcatcctgtctgaaggtcctgggtttggtgtgaccgcttggcggctggtgggtggggttttcaagtgggtgacggcgctctccggcagccggggatggccgtgtccgcactgaccaggcctgtggagagtgctcggcctaaccttagaacacatttgtaactgaatacagtgttttcaatttgtacagaatagttagaatattctattaaagtggtgaaacattga

SEQ ID NO: 445810 - DNA, 2692 bp, Homo sapiens
ggcacgagcttgctcgcggagagaggagctaggagcctcggccaatgggagccggcgttgttggaggccacggcggcgcagccccaaagcgagcgaagctagggtcgccgccactgccgcaggaggcgtgagggaaaagtgttttaggcttccagagtagaaatctgatattacttcgtttgattcttcgaccactatggtgataggaagtagctgatctctgcaggaaactgctgttacctggcctcagctgaatttttgtgggacctcctgagagacgaggtttccccatgttgcccaggctggtctgaaactcctgagcttcaggtgatctgtgataggggggataaaaacattcagatggcagatcacagtttttcagatggggttccttcagattccgtggaagctgctaaaaatgcaagtaacacagaaaagctcacagatcaggtgatgcagaatcctcgagttctggcagctttacaggagcgacttgacaatgtccctcacaccccttccagctacatcgaaactttacctaaagcagtaaaaagaagaattaatgcattgaaacaacttcaggtgagatgtgctcacatagaagccaagttctatgaagaggtacatgacttggaaagaaagtatgcagcgctataccagcctctctttgacaagagaagagaatttatcaccggcgatgttgaaccaacagatgcggaatcggaatggcacagtgaaaatgaagaggaagagaaattggctggagacatgaaaagtaaagtagtcgtcacagaaaaagcagcggcaacggctgaagagccagatcccaaaggaattccagagttctggtttaccatcttcagaaatgtggacatgctgagtgaattagtccaggaatatgatgaaccaatcttgaaacacctgcaggatattaaagtgaaattttctgaccctggacagcctatgtcttttgtgttagagttccactttgaacccaacgactactttaccaactcagtcctgacaaaaacctacaagatgaaatcagaaccagataaggctgatcccttttcctttgaaggtcctgagattgtggactgtgacgggtgtactattgactggaagaaaggaaagaatgttactgtcaaaaccatcaagaaaaagcagaagcataagggtcgaggcactgttagaacaattacgaaacaagtacccaatgagtcctttttcaacttcttcaatccattgaaagcatccggggatggagaatcactggatgaagattctgaattcacattagcctctgattttgaaattggacactttttccgtgagcggatagtcccgcgggctgtgctgtacttcactggggaggccatagaagatgatgacaattttgaagaaggtgaagaaggagaagaggaggaattagaaggtgacgaggagggagaagacgaggatgatgcggaaattaaccccaagaaggaacccagccagccggcggaatgcaagcagcagtaggaagcggaggcgggtgcctggcagaccggctgtcgggactccaggcctgtgggcggggcctcggtccttgccgcagcacaatcccgtggacagagcttactccatctaactcgttttcaagtgcatgattttcactttcacttttcctttttccttattattttgcttaacttgtacagtggcaactgaaatgcatttcagaaataggaggtttcgtccagcaccctctgcagccttggtgcctgtagctctggacttccctgggcctttccctgtgggagggccctgtagaccacatcagggtggggtgggggtcacttggcaaaaagggccgaggtctggtgatgtggttcccaggatctggaacctctcccacccctcctgcagttggactgaattcttccctttcatccgaagaaacccacttgctgtttccagccgctgaatctgctgagtgtgcagcctgcatcacctgctgtatgccgatcatctcagaaagggctgtgtagagtagggccctgttctccttaggatgttgcttcttgatttttttttttttttaggggtgggtcagggttgtgacacaccagcccaggtgagagctgctgcgggtcacctcatatttatttatcccttcttgcctgtgaggactgcggcttttcgctgtggctcgtccttaacgtttctgaaccaccttggtgccctgagcaggaagatgtgccacttcctagcaggcgcaaggcctgtgcggaagaaacgccgctccctgccaccagggctgaagatgcgagcccgtcctcatgacgcaggcgccaccctgctgccggagccgggcttcggcagtcttctccactgagggactgggctgggaagtcctgcgtttcagtggagcgtatgagcgtcaagtcctgctttctcagtagccccattgcggggccccaccattcatcctgtctgaaggtcctgggtttggtgtgaccgcttggcggctggtgggtggggttttcaagtgggtgacggcgctctccggcagccggggatggccgtgtccgcactgaccaggcctgtggagagtgctcggcctaaccttagaacacatttgtaactgaatacagtgttttcaatttgtacagaatagttagaatattctattaaagtggtgaaacattga

SEQ ID NO: 445811 - DNA, 2567 bp, Homo sapiens
ggcacgagcttgctcgcggagagaggagctaggagcctcggccaatgggagccggcgttgttggaggccacggcggcgcagccccaaagcgagcgaagctagggtcgccgccactgccgcaggaggcgtgaggggataaaaacattcagatggcagatcacagtttttcagatggggttccttcagattccgtggaagctgctaaaaatgcaagtaacacagaaaagctcacagatcaggtgatgcagaatcctcgagttctggcagctttacaggagcgacttgacaatgtccctcacaccccttccagctacatcgaaactttacctaaagcagtaaaaagaagaattaatgcattgaaacaacttcaggtgagatgtgctcacatagaagccaagttctatgaagaggtacatgacttggaaagaaagtatgcagcgctataccagcctctctttgacaagagaagagaatttatcaccggcgatgttgaaccaacagatgcggaatcggaatggcacagtgaaaatgaagaggaagagaaattggctggagacatgaaaagtaaagtagtcgtcacagaaaaagcagcggcaacggctgaagagccagatcccaaaggaattccagagttctggtttaccatcttcagaaatgtggacatgctgagtgaattagtccaggaatatgatgaaccaatcttgaaacacctgcaggatattaaagtgaaattttctgaccctggacagcctatgtcttttgtgttagagttccactttgaacccaacgactactttaccaactcagtcctgacaaaaacctacaagatgaaatcagaaccagataaggctgatcccttttcctttgaaggtcctgagattgtggactgtgacgggtgtactattgactggaagaaaggaaagaatgttactgtcaaaaccatcaagaaaaagcagaagcataagggtcgaggcactgttagaacaattacgaaacaagtacccaatgagtcctttttcaacttcttcaatccattgaaagcatccggggatggagaatcactggatgaagattctgaattcacattagcctctgattttgaaattggacactttttccgtgagcggatagtcccgcgggctgtgctgtacttcactggggaggccatagaagatgatgacaattttgaagaaggtgaagaaggagaagaggaggaattagaaggtgacgaggagggagaagacgaggatgatgcggaaattaaccccaagactcctcagtagagcaacttgactttccaagtgtttcattcttttaaggtgtaatttttgtctgttaatcattcatacgtttctagaaggaacccagccagccggcggaatgcaagcagcagtaggaagcggaggcgggtgcctggcagaccggctgtcgggactccaggcctgtgggcggggcctcggtccttgccgcagcacaatcccgtggacagagcttactccatctaactcgttttcaagtgcatgattttcactttcacttttcctttttccttattattttgcttaacttgtacagtggcaactgaaatgcatttcagaaataggaggtttcgtccagcaccctctgcagccttggtgcctgtagctctggacttccctgggcctttccctgtgggagggccctgtagaccacatcagggtggggtgggggtcacttggcaaaaagggccgaggtctggtgatgtggttcccaggatctggaacctctcccacccctcctgcagttggactgaattcttccctttcatccgaagaaacccacttgctgtttccagccgctgaatctgctgagtgtgcagcctgcatcacctgctgtatgccgatcatctcagaaagggctgtgtagagtagggccctgttctccttaggatgttgcttcttgatttttttttttttttaggggtgggtcagggttgtgacacaccagcccaggtgagagctgctgcgggtcacctcatatttatttatcccttcttgcctgtgaggactgcggcttttcgctgtggctcgtccttaacgtttctgaaccaccttggtgccctgagcaggaagatgtgccacttcctagcaggcgcaaggcctgtgcggaagaaacgccgctccctgccaccagggctgaagatgcgagcccgtcctcatgacgcaggcgccaccctgctgccggagccgggcttcggcagtcttctccactgagggactgggctgggaagtcctgcgtttcagtggagcgtatgagcgtcaagtcctgctttctcagtagccccattgcggggccccaccattcatcctgtctgaaggtcctgggtttggtgtgaccgcttggcggctggtgggtggggttttcaagtgggtgacggcgctctccggcagccggggatggccgtgtccgcactgaccaggcctgtggagagtgctcggcctaaccttagaacacatttgtaactgaatacagtgttttcaatttgtacagaatagttagaatattctattaaagtggtgaaacattga

SEQ ID NO: 445812 - DNA, 2660 bp, Homo sapiens
ggcacgagcttgctcgcggagagaggagctaggagcctcggccaatgggagccggcgttgttggaggccacggcggcgcagccccaaagcgagcgaagctagggtcgccgccactgccgcaggaggcgtgagggaaaagtgttttaggcttccagagtagaaatctgatattacttcgtttgattcttcgaccactatggtgataggaagtagctgatctctgcaggaaactgctgttacctggcctcagctgaatttttgtgggacctcctgaggggataaaaacattcagatggcagatcacagtttttcagatggggttccttcagattccgtggaagctgctaaaaatgcaagtaacacagaaaagctcacagatcaggtgatgcagaatcctcgagttctggcagctttacaggagcgacttgacaatgtccctcacaccccttccagctacatcgaaacgcatgaggatgttgtatttcttactcccttttttagtttacctaaagcagtaaaaagaagaattaatgcattgaaacaacttcaggtgagatgtgctcacatagaagccaagttctatgaagaggtacatgacttggaaagaaagtatgcagcgctataccagcctctctttgacaagagaagagaatttatcaccggcgatgttgaaccaacagatgcggaatcggaatggcacagtgaaaatgaagaggaagagaaattggctggagacatgaaaagtaaagtagtcgtcacagaaaaagcagcggcaacggctgaagagccagatcccaaaggaattccagagttctggtttaccatcttcagaaatgtggacatgctgagtgaattagtccaggaatatgatgaaccaatcttgaaacacctgcaggatattaaagtgaaattttctgaccctggacagcctatgtcttttgtgttagagttccactttgaacccaacgactactttaccaactcagtcctgacaaaaacctacaagatgaaatcagaaccagataaggctgatcccttttcctttgaaggtcctgagattgtggactgtgacgggtgtactattgactggaagaaaggaaagaatgttactgtcaaaaccatcaagaaaaagcagaagcataagggtcgaggcactgttagaacaattacgaaacaagtacccaatgagtcctttttcaacttcttcaatccattgaaagcatccggggatggagaatcactggatgaagattctgaattcacattagcctctgattttgaaattggacactttttccgtgagcggatagtcccgcgggctgtgctgtacttcactggggaggccatagaagatgatgacaattttgaagaaggtgaagaaggagaagaggaggaattagaaggtgacgaggagggagaagacgaggatgatgcggaaattaaccccaagaaggaacccagccagccggcggaatgcaagcagcagtaggaagcggaggcgggtgcctggcagaccggctgtcgggactccaggcctgtgggcggggcctcggtccttgccgcagcacaatcccgtggacagagcttactccatctaactcgttttcaagtgcatgattttcactttcacttttcctttttccttattattttgcttaacttgtacagtggcaactgaaatgcatttcagaaataggaggtttcgtccagcaccctctgcagccttggtgcctgtagctctggacttccctgggcctttccctgtgggagggccctgtagaccacatcagggtggggtgggggtcacttggcaaaaagggccgaggtctggtgatgtggttcccaggatctggaacctctcccacccctcctgcagttggactgaattcttccctttcatccgaagaaacccacttgctgtttccagccgctgaatctgctgagtgtgcagcctgcatcacctgctgtatgccgatcatctcagaaagggctgtgtagagtagggccctgttctccttaggatgttgcttcttgatttttttttttttttaggggtgggtcagggttgtgacacaccagcccaggtgagagctgctgcgggtcacctcatatttatttatcccttcttgcctgtgaggactgcggcttttcgctgtggctcgtccttaacgtttctgaaccaccttggtgccctgagcaggaagatgtgccacttcctagcaggcgcaaggcctgtgcggaagaaacgccgctccctgccaccagggctgaagatgcgagcccgtcctcatgacgcaggcgccaccctgctgccggagccgggcttcggcagtcttctccactgagggactgggctgggaagtcctgcgtttcagtggagcgtatgagcgtcaagtcctgctttctcagtagccccattgcggggccccaccattcatcctgtctgaaggtcctgggtttggtgtgaccgcttggcggctggtgggtggggttttcaagtgggtgacggcgctctccggcagccggggatggccgtgtccgcactgaccaggcctgtggagagtgctcggcctaaccttagaacacatttgtaactgaatacagtgttttcaatttgtacagaatagttagaatattctattaaagtggtgaaacattga

SEQ ID NO: 445813 - DNA, 1522 bp, Homo sapiens
ctgatagaggactcgcaggtaacaacacagcgaaacgaaagatcagagtggtcctttttcaacttcttcaatccattgaaagcatccggggatggagaatcactggatgaagattctgaattcacattagcctctgattttgaaattggacactttttccgtgagcggatagtcccgcgggctgtgctgtacttcactggggaggccatagaagatgatgacaattttgaagaaggtgaagaaggagaagaggaggaattagaaggtgacgaggagggagaagacgaggatgatgcggaaattaaccccaagaaggaacccagccagccggcggaatgcaagcagcagtaggaagcggaggcgggtgcctggcagaccggctgtcgggactccaggcctgtgggcggggcctcggtccttgccgcagcacaatcccgtggacagagcttactccatctaactcgttttcaagtgcatgattttcactttcacttttcctttttccttattattttgcttaacttgtacagtggcaactgaaatgcatttcagaaataggaggtttcgtccagcaccctctgcagccttggtgcctgtagctctggacttccctgggcctttccctgtgggagggccctgtagaccacatcagggtggggtgggggtcacttggcaaaaagggccgaggtctggtgatgtggttcccaggatctggaacctctcccacccctcctgcagttggactgaattcttccctttcatccgaagaaacccacttgctgtttccagccgctgaatctgctgagtgtgcagcctgcatcacctgctgtatgccgatcatctcagaaagggctgtgtagagtagggccctgttctccttaggatgttgcttcttgatttttttttttttttaggggtgggtcagggttgtgacacaccagcccaggtgagagctgctgcgggtcacctcatatttatttatcccttcttgcctgtgaggactgcggcttttcgctgtggctcgtccttaacgtttctgaaccaccttggtgccctgagcaggaagatgtgccacttcctagcaggcgcaaggcctgtgcggaagaaacgccgctccctgccaccagggctgaagatgcgagcccgtcctcatgacgcaggcgccaccctgctgccggagccgggcttcggcagtcttctccactgagggactgggctgggaagtcctgcgtttcagtggagcgtatgagcgtcaagtcctgctttctcagtagccccattgcggggccccaccattcatcctgtctgaaggtcctgggtttggtgtgaccgcttggcggctggtgggtggggttttcaagtgggtgacggcgctctccggcagccggggatggccgtgtccgcactgaccaggcctgtggagagtgctcggcctaaccttagaacacatttgtaactgaatacagtgttttcaatttgtacagaatagttagaatattctattaaagtggtgaaacattga

SEQ ID NO: 445814 - DNA, 1522 bp, Homo sapiens
tgtatttcctccactggaataggcgtccgggggcatggagaatcactggatgatcatcttgatttcgacgactgcaggcacgtctgatttagaccagtcgggacagcgttctcacccggaagtgaatacgtcccagcctagctggtcggctgtattctccgcgtgggggcagtgccgactacgagacatgagtgtacgaaattgtcgaacaacagtgaagaatgagaactaggaggaatttacgtccccgtgactcaggtatgggacaatgacagtaagatgattgcaggagataattatagcgcgcaaggaatggatgccaaccaagcgttggaatgcaagcagcagtaggaagcggaggcgggtgcctggcagaccggctgtcgggactccaggcctgtgggcggggcctcggtccttgccgcagcacaatcccgtggacagagcttactccatctaactcgttttcaagtgcatgattttcactttcacttttcctttttccttattattttgcttaacttgtacagtggcaactgaaatgcatttcagaaataggaggtttcgtccagcaccctctgcagccttggtgcctgtagctctggacttccctgggcctttccctgtgggagggccctgtagaccacatcagggtggggtgggggtcacttggcaaaaagggccgaggtctggtgatgtggttcccaggatctggaacctctcccacccctcctgcagttggactgaattcttccctttcatccgaagaaacccacttgctgtttccagccgctgaatctgctgagtgtgcagcctgcatcacctgctgtatgccgatcatctcagaaagggctgtgtagagtagggccctgttctccttaggatgttgcttcttgatttttttttttttttaggggtgggtcagggttgtgacacaccagcccaggtgagagctgctgcgggtcacctcatatttatttatcccttcttgcctgtgaggactgcggcttttcgctgtggctcgtccttaacgtttctgaaccaccttggtgccctgagcaggaagatgtgccacttcctagcaggcgcaaggcctgtgcggaagaaacgccgctccctgccaccagggctgaagatgcgagcccgtcctcatgacgcaggcgccaccctgctgccggagccgggcttcggcagtcttctccactgagggactgggctgggaagtcctgcgtttcagtggagcgtatgagcgtcaagtcctgctttctcagtagccccattgcggggccccaccattcatcctgtctgaaggtcctgggtttggtgtgaccgcttggcggctggtgggtggggttttcaagtgggtgacggcgctctccggcagccggggatggccgtgtccgcactgaccaggcctgtggagagtgctcggcctaaccttagaacacatttgtaactgaatacagtgttttcaatttgtacagaatagttagaatattctattaaagtggtgaaacattga

SEQ ID NO: 445815 - DNA, 1239 bp, Homo sapiens
ggcacgagcttgctcgcggagagaggagctaggagcctcggccaatgggagccggcgttgttggaggccacggcggcgcagccccaaagcgagcgaagctagggtcgccgccactgccgcaggaggcgtgaggggataaaaacattcagatggcagatcacagtttttcagatggggttccttcagattccgtggaagctgctaaaaatgcaagtaacacagaaaagctcacagatcaggtgatgcagaatcctcgagttctggcagctttacaggagcgacttgacaatgtccctcacaccccttccagctacatcgaaactttacctaaagcagtaaaaagaagaattaatgcattgaaacaacttcaggtgagatgtgctcacatagaagccaagttctatgaagaggtacatgacttggaaagaaagtatgcagcgctataccagcctctctttgacaagagaagagaatttatcaccggcgatgttgaaccaacagatgcggaatcggaatggcacagtgaaaatgaagaggaagagaaattggctggagacatgaaaagtaaagtagtcgtcacagaaaaagcagcggcaacggctgaagagccagatcccaaaggaattccagagttctggtttaccatcttcagaaatgtggacatgctgagtgaattagtccaggaatatgatgaaccaatcttgaaacacctgcaggatattaaagtgaaattttctgaccctggacagcctatgtcttttgtgttagagttccactttgaacccaacgactactttaccaactcagtcctgacaaaaacctacaagatgaaatcagaaccagataaggctgatcccttttcctttgaaggtcctgagattgtggactgtgacgggtgtactattgactggaagaaaggaaagaatgttactgtcaaaaccatcaagaaaaagcagaagcataagggtcgaggcactgttagaacaattacgaaacaagtacccaatgagtcctttttcaacttcttcaatccattgaaagcatccggggatggagaatcactggatgaagattctgaattcacattagcctctgattttgaaattggacactttttccgtgagcggatagtcccgcgggctgtgctgtacttcactggggaggccatagaagatgatgacaattttgaagaaggtgatagtgttcaaagcaagcccgagccgcctggatgaccgctag

SEQ ID NO: 445816 - DNA, 1099 bp, Homo sapiens
ggcacgagcttgctcgcggagagaggagctaggagcctcggccaatgggagccggcgttgttggaggccacggcggcgcagccccaaagcgagcgaagctagggtcgccgccactgccgcaggaggcgtgaggggataaaaacattcagatggcagatcacagtttttcagatggggttccttcagattccgtggaagctgctaaaaatgcaagtaacacagaaaagctcacagatcaggtgatgcagaatcctcgagttctggcagctttacaggagcgacttgacaatgtccctcacaccccttccagctacatcgaaactttacctaaagcagtaaaaagaagaattaatgcattgaaacaacttcaggtgagatgtgctcacatagaagccaagttctatgaagaggtacatgacttggaaagaaagtatgcagcgctataccagcctctctttgacaagagaagagaatttatcaccggcgatgttgaaccaacagatgcggaatcggaatggcacagtgaaaatgaagaggaagagaaattggctggagacatgaaaagtaaagtagtcgtcacagaaaaagcagcggcaacggctgaagagccagatcccaaaggaattccagagttctggtttaccatcttcagaaatgtggacatgctgagtgaattagtccaggaatatgatgaaccaatcttgaaacacctgcaggatattaaagtgaaattttctgaccctggacagcctatgtcttttgtgttagagttccactttgaacccaacgactactttaccaactcagtcctgacaaaaacctacaagatgaaatcagaaccagataaggctgatcccttttcctttgaaggtcctgagattgtggactgtgacgggtgtactattgactggaagaaaggaaagaatgttactgtcaaaaccatcaagaaaaagcagaagcataagggtcgaggcactgttagaacaattacgaaacaagtacccaatgagtcctttttcaacttcttcaatccattgaaaggcaagtctgttggttgttaatattcattatgttcttatataaaataattttggtcacc

SEQ ID NO: 445817 - DNA, 1964 bp, Homo sapiens
ggcacgagcttgctcgcggagagaggagctaggagcctcggccaatgggagccggcgttgttggaggccacggcggcgcagccccaaagcgagcgaagctagggtcgccgccactgccgcaggaggcgtgaggggataaaaacattcagatggcagatcacagtttttcagatggggttccttcagattccgtggaagctgctaaaaatgcaagtaacacagaaaagctcacagatcaggtgatgcagaatcctcgagttctggcagctttacaggagcgacttgacaatgtccctcacaccccttccagctacatcgaaactttacctaaagcagtaaaaagaagaattaatgcattgaaacaacttcaggtgagatgtgctcacatagaagccaagttctatgaagaggtacatgacttggaaagaaagtatgcagcgctataccagcctctctttgacaagagaagagaatttatcaccggcgatgttgaaccaacagatgcggaatcggaatggcacagtgaaaatgaagaggaagagaaattggctggagacatgaaaagtaaagtagtcgtcacagaaaaagcagcggcaacggctgaagagccagatcccaaaggaattccagagttctggtttaccatcttcagaaatgtggacatgctgagtgaattagtccaggaatatgatgaaccaatcttgaaacacctgcaggatattaaagtgaaattttctgaccctggacagcctatgtcttttgtgttagagttccactttgaacccaacgactactttaccaactcagtcctgacaaaaacctacaagatgaaatcagaaccagataaggctgatcccttttcctttgaaggtcctgagattgtggactgtgacggggtgtactattgactggagaaacgcacgaatgttcctgtccaaccatcagaaaagccgaacctatggtccagcctcgtgacactcgcaacagtcccgaggtctcttcatcttaacctgaaacgggggaaacacggcgaaattatcctaccgctgaagaagccccacagaaaccccgacgcatgtggacgcacaaaaaagtaaggagcacactaaatgcgagaatccgaaatgtgatggagtcaaactctaatcgatgactaaagccaaaaacaccaccgacacaacaacaagccaccgctcacacgacagcaacaacccaccaacacacaacacaacgaacaacaacaaacagatgctaacaaccacacccccacacacaccacacaaccagacaaccagaagaacgaaggggagagcacaagggacacggagcagacaaccggcgaggcgcacagcggcggcgcacgaggaagagaaaaagaccagagcagacgacagacacagcaacagcgagcagaaagaaagacgacgaagggaggaaggcagcaccgggaaaaagaagagaggaaggacagaagacagagaagaggagaaaagaggaaggacacgaggggggaagggcagaccaggaaggcgacgcacacaccgaacgagacgcaggtcgcccacgagcaaggagacaccggcagacgaaagggcaggggcaccgacaacaccgcgccgaacgacaacgcaaagccacaacagaagaccgagcgagaccacacaagacaaacacaaccaaggggaggcggcggcaacaaagcagcggggcaaggaggaaaaaaggcgagagagaggcgaacgaagggccagaaggaacagacaagcaaaacgcgcgagaagaacaaagaagagaagaggcacagacacaaggacacacggacgggaggcacgggagcagacgagagagagacacgaaagagcgaaaaagacaacacgagggacagaggaaagcagaaacgagaacaaagcaggacgaggaaagacaacaagaccagggcaaacaaaagagcagagaggacagcc

SEQ ID NO: 445818 - DNA, 1151 bp, Homo sapiens
ggccacaaagcagcccccgagaccacgtggcctccgagcagctcagggcgcccttgaaagttcttggatctgcgggttatggccggtcccttgcagggcggtggggcccgggccctggacctactccggggcctgccgcgtgtgagcctggccaacttaaagccgaatcccggctccaagaaaccggagagaagaccaagaggtcggagaagaggtagaaaatgtggcagaggccataaaggagaaaggcaaagaggaacccggccccgcttgggctttgagggaggccagactccattttacatccgaatcccaaaatacgggtttaacgaaggacatagtttcagacgccagtataagcctttgagtctcaatagactgcagtatcttattgatttgggtcgtgttgatcctagtcaacctattgacttaacccagcttgtcaatgggagaggtgtgaccatccagccacttaaaagggattatggtgtccagctggttgaggagggtgctgacacctttacggcaaaagttaatattgaagtacagttggcttcagaactagctattgctgccattgaaaaaaatggtggtgttgttactacagccttctatgatccaagaagtctggacattgtatgcaaacctgttccattctttcttcgtggacaacccattccaaaaagaatgcttccaccagaagaactggtaccatattacactgatgcaaagaaccgtgggtacctggcggatcctgccaaatttcctgaagcacgacttgaactcgccaggaagtatggttatatcttacctgatatcactaaagatgaactcttcaaaatgctctgtactaggaaggatccaaggcagattttctttggtcttgctccaggatgggtggtgaatatggccgataagaaaatcctaaaacctacagatgaaaatctccttaagtattatacctcatgaattcccgtccaaggaagcagagttgttaaagagtactggaataggggctgaaggatctatattcccttattgcattttccttatgtataattttccagatggtgatgttacttttcagtgtactcatatgtctcattttcatctaaaattaaatggcaggaaacaaggactgcatagagaaa

SEQ ID NO: 445819 - DNA, 1192 bp, Homo sapiens
gaagaaagttagatttacgccgatgaatatgatagtgaaatggattcggacgcgtgggtcgacccacgtggcctccgagcagctcagggcgcccttgaaagttcttggatctgcgggttatggccggtcccttgcagggcggtggggcccgggccctggacctactccggggcctgccgcgtgtgagcctggccaacttaaagccgaatcccggctccaagaaaccggagagaagaccaagaggtcggagaagaggtagaaaatgtggcagaggccataaaggagaaaggcaaagaggaacccggccccgcttgggctttgagggaggccagactccattttacatccgaatcccaaaatacgggtttaacgaaggacatagtttcagacgccagtataagcctttgagtctcaatagactgcagtatcttattgatttgggtcgtgttgatcctagtcaacctattgacttaacccagcttgtcaatgggagaggtgtgaccatccagccacttaaaagggattatggtgtccagctggttgaggagggtgctgacacctttacggcaaaagttaatattgaagtacagttggcttcagaactagctattgctgccattgaaaaaaatggtggtgttgttactacagccttctatgatccaagaagtctggacattgtatgcaaacctgttccattctttcttcgtggacaacccattccaaaaagaatgcttccaccagaagaactggtaccatattacactgatgcaaagaaccgtgggtacctggcggatcctgccaaatttcctgaagcacgacttgaactcgccaggaagtatggttatatcttacctgatatcactaaagatgaactcttcaaaatgctctgtactaggaaggatccaaggcagattttctttggtcttgctccaggatgggtggtgaatatggccgataagaaaatcctaaaacctacagatgaaaatctccttaagtattatacctcatgaattcccgtccaaggaagcagagttgttaaagagtactggaataggggctgaaggatctatattcccttattgcattttccttatgtataattttccagatggtgatgttacttttcagtgtactcatatgtctcattttcatctaaaattaaatggcaggaaacaaggactgcatagagaaa

SEQ ID NO: 445820 - DNA, 877 bp, Homo sapiens
aggtacttacaggatcttacctctacccagatccgaatcttaaatacgggtttaacgaaggacatagtttcagacgccagtataagcctttgagtctcaatagactgcagtatcttattgatttgggtcgtgttgatcctagtcaacctattgacttaacccagcttgtcaatgggagaggtgtgaccatccagccacttaaaagggattatggtgtccagctggttgaggagggtgctgacacctttacggcaaaagttaatattgaagtacagttggcttcagaactagctattgctgccattgaaaaaaatggtggtgttgttactacagccttctatgatccaagaagtctggacattgtatgcaaacctgttccattctttcttcgtggacaacccattccaaaaagaatgcttccaccagaagaactggtaccatattacactgatgcaaagaaccgtgggtacctggcggatcctgccaaatttcctgaagcacgacttgaactcgccaggaagtatggttatatcttacctgatatcactaaagatgaactcttcaaaatgctctgtactaggaaggatccaaggcagattttctttggtcttgctccaggatgggtggtgaatatggccgataagaaaatcctaaaacctacagatgaaaatctccttaagtattatacctcatgaattcccgtccaaggaagcagagttgttaaagagtactggaataggggctgaaggatctatattcccttattgcattttccttatgtataattttccagatggtgatgttacttttcagtgtactcatatgtctcattttcatctaaaattaaatggcaggaaacaaggactgcatagagaaa

SEQ ID NO: 445821 - DNA, 616 bp, Homo sapiens
gaacactgccgcaataaacatacgtgtgcatgtgtctttatagtagaatgatttataatccttgtgtatatacccagtaatgggattgctgggtcaaatggtatttctcattctagagccttgaggaattgccacatgtcttccattgttgtgtcttttaattgggggcatttagcccatttacatttaaggttaatattgttatgtgtgaactggatcctgccaaatttcctgaagcacgacttgaactcgccaggaagtatggttatatcttacctgatatcactaaagatgaactcttcaaaatgctctgtactaggaaggatccaaggcagattttctttggtcttgctccaggatgggtggtgaatatggccgataagaaaatcctaaaacctacagatgaaaatctccttaagtattatacctcatgaattcccgtccaaggaagcagagttgttaaagagtactggaataggggctgaaggatctatattcccttattgcattttccttatgtataattttccagatggtgatgttacttttcagtgtactcatatgtctcattttcatctaaaattaaatggcaggaaacaaggactgcatagagaaa

SEQ ID NO: 445822 - DNA, 746 bp, Homo sapiens
catgaggcagaggttgcagtgagccgagatggtgccattgtactccagtctgggcaacaagagtgaaactgcgtctcaaaaaaaaaataataaaaattaataatcaagagaaactctgtaacatctctatggtacagagttacatctctatgttagagttacatctctaggtatgtctatgagctaatatttgcatctcactttttaaatttaaattttcttttagacattgtatgcaaacctgttccattctttcttcgtggacaacccattccaaaaagaatgcttccaccagaagaactggtaccatattacactgatgcaaagaaccgtgggtacctggcggatcctgccaaatttcctgaagcacgacttgaactcgccaggaagtatggttatatcttacctgatatcactaaagatgaactcttcaaaatgctctgtactaggaaggatccaaggcagattttctttggtcttgctccaggatgggtggtgaatatggccgataagaaaatcctaaaacctacagatgaaaatctccttaagtattatacctcatgaattcccgtccaaggaagcagagttgttaaagagtactggaataggggctgaaggatctatattcccttattgcattttccttatgtataattttccagatggtgatgttacttttcagtgtactcatatgtctcattttcatctaaaattaaatggcaggaaacaaggactgcatagagaaa

SEQ ID NO: 445823 - DNA, 1229 bp, Homo sapiens
ggccacaaagcagcccccgagaccacgtggcctccgagcagctcagggcgcccttgaaagttcttggatctgcgggttatggccggtcccttgcagggcggtggggcccgggccctggacctactccggggcctgccgcgtgtgagcctggccaacttaaagccgaatcccggctccaagaaaccggagagaagaccaagaggtcggagaagaggtagaaaatgtggcagaggccataaaggagaaaggcaaagaggaacccggccccgcttgggctttgagggaggccagactccattttacatccgaatcccaaaatacgggtttaacgaaggacatagtttcagacgccagtataagcctttgagtctcaatagactgcagtatcttattgatttgggtcgtgttgatcctagtcaacctattgacttaacccagcttgtcaatgggagaggtgtgaccatccagccacttaaaagggattatggtgtccagctggttgaggagggtgctgacacctttacggcaaaagttaatattgaagtacagttggcttcagaactagctattgctgccattgaaaaaaatggtggtgttgttactacagccttctatgatccaagaagtctggacattgtatgcaaacctgttccattctttcttcgtggacaacccattccaaaaagaatgcttccaccagaagaactggtaccatattacactgatgcaaagaaccgtgggtacctggcggatcctgccaaatttcctgaagcacgacttgaactcgccaggaagtatggttatatcttacctgatatcactaaagatgaactcttcaaaatgctctgtactaggaaggatccaaggcagattttctttggtcttgctccaggatgggtggtgaatatggccgataagaaaatcctaaaacctacagatgaaaatctccttaagtattatacctcatgaattcccgtccaaggaagcagagttgttaaagagtactggaataggggctgaaggatctatattcccttattgcattttccttatgtataattttccagatggtgatgttacttttcagtgtactcatatgtctcattttcatctaaaattaaatggcaggaaacaaggactgcatagagaaaaaaaaaaaaggggggggaaaaatccggagggccagttaggggacccggtttggaaaggggccaaagggggattaaaga

SEQ ID NO: 445824 - DNA, 1754 bp, Homo sapiens
cggacgcgtgggtcgcccacgcgtccgaaggaataaaaacttggcagagattggcaaacgcaggtcttttatagctgcaccatgccaaataatcaccaacacttctacactgctgaaaaattaccaagacaacaacaaaatgttagttttagctttggaaaatgaaaaatccaaagtgaaagaagcccaagatatcatcctacagctgagaaaagaatgttactatctcacatgtcagctatatgcattgaaaggaaaacttacatcacaacaaacagtagaacctgctcagaaccaggaaatatgttcctctggaatggaccccaatagtgatgacagctccagaaatttatttgtgaaggatttaccgcaaattcctcttgaagaaactgaacttccaggacaaggagaatcatttcaaatagaagatcagatacctactattcctcaagacacactgggagttgattttgattcaggtgaagctaagtctactgataatgtcttacctagaactgtatctgttcgtagcagtttaaagaaacattgtaacagtatatgtcagtttgatagcttggatgattttgaaaccagtcatttggcagggaagtcttttgaattcgaaagagttggatttttagacccactagtaaacatgcacatacctgaaaatgtacaacacaatgcttgtcaatggagcaaggaccaagttaacttatcaccaaagctgattcagccaggaacgtttactaaaacaaaagaagacattttagaatctaaatctgaacaaactaaaagtaagcaaagagatacacaagaaagaaaaagagaagagaaaagaaaagctaacaggagaaaatcaaaacgtatgtcaaaatataaagagaataaaagcgaaaataaaaaaactgttccccaaaaaaaaatgcacaaatctgtcagttccaatgatgcttacaattttaatttggaagagggtgttcatcttactcctttccgacaaaaagtgagcaatgactctaatagagaagaaaacaacgagtctgaagtgagcctctgtgaatcaagtggttcaggagatgattccgatgacctctatttgcccacttgcaagtacattcagaatcccacgagcaattcagatagaccagtcaccaggcctctagctaaaagagcactgaaatacacagatgaaaaagagacggagggttctaagccaacaaaaactcctaccactacaccacctgaaactcagcagtcacctcatcttagcctgaaggatatcaccaatgtctccttgtatcctgttgtgaaaatcagaagactttctctttctccaaaaaagaataaagcaagcccagcagtggctctgcctaaacgtaggtgcacagccagcgtgaactataaggagcccaccctcgcttcgaaactgagaagaggggacccttttacagatttgtgttttttgaattctcctattttcaagcagaaaaaggatttgagacgttctaaaaaaagtatgaaacaaatacaatgaaggttttgttggatattgtttaaattcaatctacacctctttctgttgcttcaggagaggatctgtaagagtacacaaacagagtgagccattgccatagaatattctcttgacaggaccctagctcataaacatttcttcagaactatacttcaaatgggatgctttgtattaaaactttaataaatttaatttattttttcttttgaatataaat

SEQ ID NO: 445825 - DNA, 4116 bp, Homo sapiens
  misc_feature (3452)..(3452): n is a, c, g, or t
  misc_feature (3539)..(3539): n is a, c, g, or t
gatttcgaatgtggcggcggtagttccaggcgacggcggacggtggtacggtcctggagggcccagtgcgcggggctagccgtggctggagagcttcgaagagccttgaaatgtgaggaggaggaagatagctgttgcagaagtagtggccaaggtatcgttctggacgcgcctgcggcaggagggtcgccgcgtccacttccgccagccccacctccccccggccttcctggagtccctgaaagaggaagaagtaggttttaaggcaaaagatggccaaggaaagatgcctgaaaaagtcctttcaagatagtcttgaagacataaagaagcgaatgaaagagaaaaggaataaaaacttggcagagattggcaaacgcaggtcttttatagctgcaccatgccaaataatcaccaacacttctacactgctgaaaaattaccaagacaacaacaaaatgttagttttagctttggaaaatgaaaaatccaaagtgaaagaagcccaagatatcatcctacagctgagaaaagaatgttactatctcacatgtcagctatatgcattgaaaggaaaacttacatcacaacaaacagtagaacctgctcagaaccaggaaatatgttcctctggaatggaccccaatagtgatgacagctccagaaatttatttgtgaaggatttaccgcaaattcctcttgaagaaactgaacttccaggacaaggagaatcatttcaaatagaagatcagatacctactattcctcaagacacactgggagttgattttgattcaggtgaagctaagtctactgataatgtcttacctagaactgtatctgttcgtagcagtttaaagaaacattgtaacagtatatgtcagtttgatagcttggatgattttgaaaccagtcatttggcagggaagtcttttgaattcgaaagagttggatttttagacccactagtaaacatgcacatacctgaaaatgtacaacacaatgcttgtcaatggagcaaggaccaagttaacttatcaccaaagctgattcagccaggaacgtttactaaaacaaaagaagacattttagaatctaaatctgaacaaactaaaagtaagcaaagagatacacaagaaagaaaaagagaagagaaaagaaaagctaacaggagaaaatcaaaacgtatgtcaaaatataaagagaataaaagcgaaaataaaaaaactgttccccaaaaaaaaatgcacaaatctgtcagttccaatgatgcttacaattttaatttggaagagggtgttcatcttactcctttccgacaaaaagtgagcaatgactctaatagagaagaaaacaacgagtctgaagtgagcctctgtgaatcaagtggttcaggagatgattccgatgacctctatttgcccacttgcaagtacattcagaatcccacgagcaattcagatagaccagtcaccaggcctctagctaaaagagcactgaaatacacagatgaaaaagagacggagggttctaagccaacaaaaactcctaccactacaccacctgaaactcagcagtcacctcatcttagcctgaaggatatcaccaatgtctccttgtatcctgttgtgaaaatcagaagactttctctttctccaaaaaagaataaagcaagcccagcagtggctctgcctaaacgtaggtgcacagccagcgtgaactataaggagcccaccctcgcttcgaaactgagaagaggggacccttttacagatttgtgttttttgaattctcctattttcaagcagaaaaaggatttgagacgttctaaaaaaagtatgaaacaaatacaatgaaggttttgttggatattgtttaaattcaatctacacctctttctgttgcttcaggagaggatctgtaagagtacacaaacagagtgagccattgccatagaatattctcttgacaggaccctagctcataaacatttcttcagaactatacttcaaatgggatgctttgtattaaaactttaataaatttaatttattttttcttttgaatataaataactgagcttaagcattatcatcatatcgatttcttatgctgcctaaacctcttaattttagtcgaaatatatctttttttttttttggaggcggaatttcattcttgttgcccaggctggagtgcaatggcacgatctcagcttaccgcaacctccgcctcccaggttcaagcgattctcctgcctcagactcccgagtagctgggactacaggcatgtgccactacgcccggctaattttgtatttttagtagagacagggtttctccatgttggtcaggttgctctcaaactcccaacctcaggtgatctgcccacctcggcctcccaaagtgctgggattactgagccactgtgcccagcccaaaatgtatcttatacaaacattgtagaaatgaataatgattactcaaataagatcttttaattataagcttctggcatctctatttttcccttaagtaggggatactaaagtgaatgattttctaagaggatcttttgaaactctttagtacaatatttgagtaaaataaattattgtggatcttttgaaactctgtgtagtattcgagtaaaataaatatttgacatttacagtagggtacaccctaagttgtttatgaattccttataccactgttatatttaatttttcagataaaatatgtatgggaaaatgactagagaaattgattcttttttaggctcagggacaagataagtgactaattgtgaaccccaagctctaattgtatgttcagagtgatgtctccataaaattacaaatgtcatgtactttcagggtagctccttatttagtcagaaatctcagagattaaatgtgtgaatatttagggtttttgcatatttttgaccaaccaatgaaagcgaattagttcagtttagaaagtttgatgtctatacttgtatatacctctttaaattttagaactttgtaggttattcatttttaaagagcaataaagtttgtataagatagtgattgctttccttctattctttaaatatcaaaaatagagtatctctctgtcttcactattctcatccttggacatttcctctcccctccccttggtattctcttttttgaggggggggtgttctaggtgagttaatccttagtattttcagtagtcattgctataaaactctcagcttcccctccatactttcaacctaacacttctctctcccaacttatctctgtgtaatctcccagttcatgattaacaaattataattttattgagggactgttctaatcctgatatctcagattttcttggctgttatctccctatctttctgtattctatgtcagtcagagccaaaatccttttcatcatcccaaatntttctatccgccacatcactgattcatacaccctagtcttccatcacagtctcttaatttttaagttttttttttcttactactccnttcatacttattctttaatttcatggaaacactagagtagctatcttaaactaagactacagaccattaaaaagtcagtttctcagccaggcacgagaaactactaacacctgtaatcccagcactttgggaggccaaggcgggcagatcacgagaggtcaaggagatcgagaccatcctggctaatacggtgaggccccgtctccactaaaaatagaaaaaattagccaggcgcctgtagtcccagctacttgggaggctgaggcaggagaacggcgtgaacccgggaggcggagcttgcagtgagccgagatggtgccactgcactccagcctgggtgacagagcgagactccatctcaaaaaaaaaaaaaaaacagtttctcagtccatgtaaccacctttcaaatgatcagtagccacatgtggctagtggttaccatattagacaattgaggaaatattgaacatttccatcatcacagaaagtacggttggactatgggccaaatctagcacaccacctgcttctgggtggtcttcaacctaagaatagtttttacgtttttaaatagttg

SEQ ID NO: 445826 - DNA, 4005 bp, Homo sapiens
  misc_feature (3341)..(3341): n is a, c, g, or t
  misc_feature (3428)..(3428): n is a, c, g, or t
gatttcgaatgtggcggcggtagttccaggcgacggcggacggtggtacggtcctggagggcccagtgcgcggggctagccgtggctggagagcttcgaagagccttgaaatgtgaggaggaggaagatagctgttgcagaagtagtggccaaggcaaaagatggccaaggaaagatgcctgaaaaagtcctttcaagatagtcttgaagacataaagaagcgaatgaaagagaaaaggaataaaaacttggcagagattggcaaacgcaggtcttttatagctgcaccatgccaaataatcaccaacacttctacactgctgaaaaattaccaagacaacaacaaaatgttagttttagctttggaaaatgaaaaatccaaagtgaaagaagcccaagatatcatcctacagctgagaaaagaatgttactatctcacatgtcagctatatgcattgaaaggaaaacttacatcacaacaaacagtagaacctgctcagaaccaggaaatatgttcctctggaatggaccccaatagtgatgacagctccagaaatttatttgtgaaggatttaccgcaaattcctcttgaagaaactgaacttccaggacaaggagaatcatttcaaatagaagatcagatacctactattcctcaagacacactgggagttgattttgattcaggtgaagctaagtctactgataatgtcttacctagaactgtatctgttcgtagcagtttaaagaaacattgtaacagtatatgtcagtttgatagcttggatgattttgaaaccagtcatttggcagggaagtcttttgaattcgaaagagttggatttttagacccactagtaaacatgcacatacctgaaaatgtacaacacaatgcttgtcaatggagcaaggaccaagttaacttatcaccaaagctgattcagccaggaacgtttactaaaacaaaagaagacattttagaatctaaatctgaacaaactaaaagtaagcaaagagatacacaagaaagaaaaagagaagagaaaagaaaagctaacaggagaaaatcaaaacgtatgtcaaaatataaagagaataaaagcgaaaataaaaaaactgttccccaaaaaaaaatgcacaaatctgtcagttccaatgatgcttacaattttaatttggaagagggtgttcatcttactcctttccgacaaaaagtgagcaatgactctaatagagaagaaaacaacgagtctgaagtgagcctctgtgaatcaagtggttcaggagatgattccgatgacctctatttgcccacttgcaagtacattcagaatcccacgagcaattcagatagaccagtcaccaggcctctagctaaaagagcactgaaatacacagatgaaaaagagacggagggttctaagccaacaaaaactcctaccactacaccacctgaaactcagcagtcacctcatcttagcctgaaggatatcaccaatgtctccttgtatcctgttgtgaaaatcagaagactttctctttctccaaaaaagaataaagcaagcccagcagtggctctgcctaaacgtaggtgcacagccagcgtgaactataaggagcccaccctcgcttcgaaactgagaagaggggacccttttacagatttgtgttttttgaattctcctattttcaagcagaaaaaggatttgagacgttctaaaaaaagtatgaaacaaatacaatgaaggttttgttggatattgtttaaattcaatctacacctctttctgttgcttcaggagaggatctgtaagagtacacaaacagagtgagccattgccatagaatattctcttgacaggaccctagctcataaacatttcttcagaactatacttcaaatgggatgctttgtattaaaactttaataaatttaatttattttttcttttgaatataaataactgagcttaagcattatcatcatatcgatttcttatgctgcctaaacctcttaattttagtcgaaatatatctttttttttttttggaggcggaatttcattcttgttgcccaggctggagtgcaatggcacgatctcagcttaccgcaacctccgcctcccaggttcaagcgattctcctgcctcagactcccgagtagctgggactacaggcatgtgccactacgcccggctaattttgtatttttagtagagacagggtttctccatgttggtcaggttgctctcaaactcccaacctcaggtgatctgcccacctcggcctcccaaagtgctgggattactgagccactgtgcccagcccaaaatgtatcttatacaaacattgtagaaatgaataatgattactcaaataagatcttttaattataagcttctggcatctctatttttcccttaagtaggggatactaaagtgaatgattttctaagaggatcttttgaaactctttagtacaatatttgagtaaaataaattattgtggatcttttgaaactctgtgtagtattcgagtaaaataaatatttgacatttacagtagggtacaccctaagttgtttatgaattccttataccactgttatatttaatttttcagataaaatatgtatgggaaaatgactagagaaattgattcttttttaggctcagggacaagataagtgactaattgtgaaccccaagctctaattgtatgttcagagtgatgtctccataaaattacaaatgtcatgtactttcagggtagctccttatttagtcagaaatctcagagattaaatgtgtgaatatttagggtttttgcatatttttgaccaaccaatgaaagcgaattagttcagtttagaaagtttgatgtctatacttgtatatacctctttaaattttagaactttgtaggttattcatttttaaagagcaataaagtttgtataagatagtgattgctttccttctattctttaaatatcaaaaatagagtatctctctgtcttcactattctcatccttggacatttcctctcccctccccttggtattctcttttttgaggggggggtgttctaggtgagttaatccttagtattttcagtagtcattgctataaaactctcagcttcccctccatactttcaacctaacacttctctctcccaacttatctctgtgtaatctcccagttcatgattaacaaattataattttattgagggactgttctaatcctgatatctcagattttcttggctgttatctccctatctttctgtattctatgtcagtcagagccaaaatccttttcatcatcccaaatntttctatccgccacatcactgattcatacaccctagtcttccatcacagtctcttaatttttaagttttttttttcttactactccnttcatacttattctttaatttcatggaaacactagagtagctatcttaaactaagactacagaccattaaaaagtcagtttctcagccaggcacgagaaactactaacacctgtaatcccagcactttgggaggccaaggcgggcagatcacgagaggtcaaggagatcgagaccatcctggctaatacggtgaggccccgtctccactaaaaatagaaaaaattagccaggcgcctgtagtcccagctacttgggaggctgaggcaggagaacggcgtgaacccgggaggcggagcttgcagtgagccgagatggtgccactgcactccagcctgggtgacagagcgagactccatctcaaaaaaaaaaaaaaaacagtttctcagtccatgtaaccacctttcaaatgatcagtagccacatgtggctagtggttaccatattagacaattgaggaaatattgaacatttccatcatcacagaaagtacggttggactatgggccaaatctagcacaccacctgcttctgggtggtcttcaacctaagaatagtttttacgtttttaaatagttg

SEQ ID NO: 445827 - DNA, 3870 bp, Homo sapiens
  misc_feature (3206)..(3206): n is a, c, g, or t
  misc_feature (3293)..(3293): n is a, c, g, or t
gatttcgaatgtggcggcggtagttccaggcgacggcggacggtggtacggtcctggagggcccagtgcgcggggctagccgtggctggagagcttcgaagagccttgaaatgtgaggaggaggaagatagctgttgcagaagtagtggccaaggcaaaagatggccaaggaaagatgcctgaaaaagtcctttcaagatagtcttgaagacataaagaagcgaatgaaagagaaaaggaataaaaacttggcagagattggcaaacgcaggtcttttatagctgcaccatgccaaataatcaccaacacttctacactgctgaaaaattaccaagacaacaacaaaatgttagttttagctttggaaaatgaaaaatccaaagtgaaagaagcccaagatatcatcctacagctgagaaaagaatgttactatctcacatgtcagctatatgcattgaaaggaaaacttacatcacaacaaacagtagaacctgctcagaaccaggaaatatgttcctctggaatggaccccaatagtgatgacagctccagaaatttatttgtgaaggatttaccgcaaattcctcttgaagaaactgaacttccaggacaaggagaatcatttcaaatagaagatcagatacctactattcctcaagacacactgggagttgattttgattcaggtgaagctaagtctactgataatgtcttacctagaactgtatctgttcgtagcagtttaaagaaacattgtaacagtatatgtcagtttgatagcttggatgattttgaaaccagtcatttggcagggaagtcttttgaattcgaaagagttggatttttagacccactagtaaacatgcacatacctgaaaatgtacaacacaatgcttgtcaatggagcaaggaccaagttaacttatcaccaaagctgattcagccaggaacgtttactaaaacaaaagaagacattttagaatctaaatctgaacaaactaaaagtaagcaaagagatacacaagaaagaaaaagagaagagaaaagaaaagctaacaggagaaaatcaaaacgtatgtcaaaatataaagagaataaaagcgaaaataaaaaaactgttccccaaaaaaaaatgcacaaatctgtcagttccaatgatgcttacaattttaatttggaagagggtgttcatcttactcctttccgacaaaaagtgagcaatgactctaatagagaagaaaacaacgagtctgaagtgagcctctgtgaatcaagtggttcaggagatgattccgatgacctctatttgcccacttgcaagtacattcagaatcccacgagcaattcagatagaccagtcaccaggcctctagctaaaagagcactgaaatacacagatgaaaaagagacggagggttctaagccaacaaaaactcctaccactacaccacctgaaactcagcagtcacctcatcttagcctgaaggatatcaccaatgtctccttgtatcctgttgtgaaaatcagaagactttctctttctccaaaaaagaataaagcaagcccagcagtggctctgcctaaacgtaggtgcacagccagcgtgaactataaggagcccaccctcgcttcgaaactgagaagaggggacccttttacagatttgtgttttttgaattctcctattttcaagcagaaaaaggatttgagacgttctaaaaaaagtatgaaacaaatacaatgaaggttttgttggatattgtttaaattcaatctacacctctttctgttgcttcaggagaggatctgtaagagtacacaaacagagtgagccattgccatagaatattctcttgacaggaccctagctcataaacatttcttcagaactatacttcaaatgggatgctttgtattaaaactttaataaatttaatttattttttcttttgaatataaataactgagcttaagcattatcatcatatcgatttcttatgctgcctaaacctcttaattttagtcgaaatatatctttttttttttttggaggcggaatttcattcttgttgcccaggctggagtgcaatggcacgatctcagcttaccgcaacctccgcctcccaggttcaagcgattctcctgcctcagactcccgagtagtgggattactgagccactgtgcccagcccaaaatgtatcttatacaaacattgtagaaatgaataatgattactcaaataagatcttttaattataagcttctggcatctctatttttcccttaagtaggggatactaaagtgaatgattttctaagaggatcttttgaaactctttagtacaatatttgagtaaaataaattattgtggatcttttgaaactctgtgtagtattcgagtaaaataaatatttgacatttacagtagggtacaccctaagttgtttatgaattccttataccactgttatatttaatttttcagataaaatatgtatgggaaaatgactagagaaattgattcttttttaggctcagggacaagataagtgactaattgtgaaccccaagctctaattgtatgttcagagtgatgtctccataaaattacaaatgtcatgtactttcagggtagctccttatttagtcagaaatctcagagattaaatgtgtgaatatttagggtttttgcatatttttgaccaaccaatgaaagcgaattagttcagtttagaaagtttgatgtctatacttgtatatacctctttaaattttagaactttgtaggttattcatttttaaagagcaataaagtttgtataagatagtgattgctttccttctattctttaaatatcaaaaatagagtatctctctgtcttcactattctcatccttggacatttcctctcccctccccttggtattctcttttttgaggggggggtgttctaggtgagttaatccttagtattttcagtagtcattgctataaaactctcagcttcccctccatactttcaacctaacacttctctctcccaacttatctctgtgtaatctcccagttcatgattaacaaattataattttattgagggactgttctaatcctgatatctcagattttcttggctgttatctccctatctttctgtattctatgtcagtcagagccaaaatccttttcatcatcccaaatntttctatccgccacatcactgattcatacaccctagtcttccatcacagtctcttaatttttaagttttttttttcttactactccnttcatacttattctttaatttcatggaaacactagagtagctatcttaaactaagactacagaccattaaaaagtcagtttctcagccaggcacgagaaactactaacacctgtaatcccagcactttgggaggccaaggcgggcagatcacgagaggtcaaggagatcgagaccatcctggctaatacggtgaggccccgtctccactaaaaatagaaaaaattagccaggcgcctgtagtcccagctacttgggaggctgaggcaggagaacggcgtgaacccgggaggcggagcttgcagtgagccgagatggtgccactgcactccagcctgggtgacagagcgagactccatctcaaaaaaaaaaaaaaaacagtttctcagtccatgtaaccacctttcaaatgatcagtagccacatgtggctagtggttaccatattagacaattgaggaaatattgaacatttccatcatcacagaaagtacggttggactatgggccaaatctagcacaccacctgcttctgggtggtcttcaacctaagaatagtttttacgtttttaaatagttg

SEQ ID NO: 445828 - DNA, 529 bp, Homo sapiens
ggttcagcctgttttctcctaaagaggtttgtttaatgtcagatgataattgtacagatatgtttgggatttcccgtatgataggttggaagcgaagtggaagcactgaacctccaggtgacatctctgtttaaggagcttcaagaggctcatacaaaactcagcgaagctgagctaatgaagaagagacttcaagaaaagtaagaatgagagagcaattttatcctcctttgaaatatacatttttacaaagtatactactatataaaaacatagttttttaactatgttatgactaaaagaaaaatagacacctaattaaaatataaattcagaatatactaatgttccagttaatgtgtgagcatgaaatacttgtaagatggggggttggggactggagaactttaattctgccatttaggggcatttgttaaatgtacgagcctgggtaagatctctacagtaaagctgtgagctagttttcctgttactgacttaagctgatgacattgatgtgagtaagcat

SEQ ID NO: 445829 - DNA, 405 bp, Homo sapiens
tactactactaaattcgcggccgcgtcgacggtacaagtaaaaactgtgtgtatctcaaggaagtagcataatgatatttagcccattcaaaaggaaaaagaggctgggcgtggtggctcatgcctgtcattccatcactttgggaggccgaggcagaaggattgcttgagtacaggagttcaagaccagcctgggcaagatggcaagacctgatctctacaaaaaattaaaaaaaaaaaaaaaaaagctgggcgtggtggtgcacgcctctggtcctagctactggggatgctgaggttggaggattgcgtgagcctgggaagttggagctgcagtgagccatgatcgtgccactgcactttagcctggatgacagagagagaccctgactcaaaaaaaaaaaa

SEQ ID NO: 445830 - DNA, 3703 bp, Homo sapiens
atgggatgggcggggccgggaaattccccggcgcgggcagggagcggctggctgtcagctgagccgcgctgggcggggtcgccaggccgcgcatcagccctaggcaccccagtcccggctgccccctccgtgggcggggtcgccaggccgcgcatcagccctaggcaccccagtcccggctgccccctccgccaccgccgccgcccgccggcaggttccctggtcagcgtcccatcccggtcgggagttctctccaggcggcacgatgccgaggaaacagtgaccctgagcgaagccaagccgggcggcaggaacttctgcaatgtcccatcaacctctcagctgcctcactgaaaaggaggacagccccagtgaaagcacaggaaatggacccccccacctggcccacccaaacctggacacgtttaccccggaggagctgctgcagcagatgaaagagctcctgaccgagaaccaccagctgaaagaagccatgaagctaaataatcaagccatgaaagggagatttgaggagctttcggcctggacagagaaacagaaggaagaacgccagttttttgagatacagagcaaagaagcaaaagagcgtctaatggccttgagtcatgagaatgagaaattgaaggaagagcttggaaaactaaaagggaaatcagaaaggtcatctgaggaccccactgatgactccaggcttcccagggccgaagcggagcaggaaaaggaccagctcaggacccaggtggtgaggctacaagcagagaaggcagacctgttgggcatcgtgtctgaactgcagctcaagctgaactccagcggctcctcagaagattcctttgttgaaattaggatggctgaaggagaagcagaagggtcagtaaaagaaatcaagcatagtcctgggcccacgagaacagtctccactggcacggcattgtctaaatataggagcagatctgcagatggggccaagaattacttcgaacatgaggagttaactgtgagccagctcctgctgtgcctaagggaagggaatcagaaggtggagagacttgaagttgcactcaaggaggccaaagaaagagtttcagattttgaaaagaaaacaagtaatcgttctgagattgaaacccagacagaggggagcacagagaaagagaatgatgaagagaaaggcccggagactgttggaagcgaagtggaagcactgaacctccaggtgacatctctgtttaaggagcttcaagaggctcatacaaaactcagcgaagctgagctaatgaagaagagacttcaagaaaagtgtcaggcccttgaaaggaaaaattctgcaattccatcagagttgaatgaaaagcaagagcttgtttatactaacaaaaagttagagctacaagtggaaagcatgctatcagaaatcaaaatggaacaggctaaaacagaggatgaaaagtccaaattaactgtgctacagatgacacacaacaagcttcttcaagaacataataatgcattgaaaacaattgaggaactaacaagaaaagagtcagaaaaagtggacagggcagtgctgaaggaactgagtgaaaaactggaactggcagagaaggctctggcttccaaacagctgcaaatggatgaaatgaagcaaaccattgccaagcaggaagaggacctggaaaccatgaccatcctcagggctcagatggaagtttactgttctgattttcatgctgaaagagcagcgagagagaaaattcatgaggaaaaggagcaactggcattgcagctggcagttctgctgaaagagaatgatgctttcgaagacggaggcaggcagtccttgatggagatgcagagtcgtcatggggcgagaacaagtgactctgaccagcaggcttaccttgttcaaagaggagctgaggacagggactggcggcaacagcggaatattccgattcattcctgccccaagtgtggagaggttctgcctgacatagacacgttacagattcacgtgatggattgcatcatttaagtgttgatgtatcacctccccaaaactgttggtaaatgtcagattttttcctccaagagttgtgcttttgtgttatttgttttcactcaaatattttgcctcattattcttgttttaaaagaaagaaaacaggccgggcacagtggctcatgcctgtaatcccagcactttgggaggtcgaggtgggtggatcacttggggtcagggtttgagaccagcctggccaacatggcggaaccctgtctctaccaaaattacaaaaattagccgagcatggtggcgcatgcctgtagtcgcagctactcgcgaggttgaggcaggagaattgcttgaacccaggaagtggcagttgcagtgagccgagacgacaccactgcactccagcctgggtgacagagggagactctgtctcgaaagaaagaaagaaaaaaaggaaggaaggagaaggaaggaaggagaagaaaaggtacctgttctacgtagaacacctttggtggagttccatcaactcgcaaagtagaatccttacctactactcttctgataataattttaatattttttatgtttggttgatgcgagcagctgcactgctcatgcagttagctagcatgtgacatcatgtgacaaagttcatgtaattagatggaagaaacctcactgattaattttaagaaccttttagggatgcaggaacaatgaagtggccacagtatgtgctgtttttgaagcatttttaaaaacgaattgtagttgtttttcttcatttaaaatggatctgttggaggttatgtgtgtatgttgtagttttattgcagccacaataattttaccaaagttttcacataggcagttagcctttacttaatatcaagacaagtgaaaaaatattggcatcgatgaaaccgataacattggcctcattggatttctttacccattcacagtgtaaagaagttaccttcatgctttcattgtacctgcaggcctgtgggcttgtacagtagataattaatttctaaaaagaacagctgcctattttcttcctaggttaggttatatcttcataatcacaagaattagtgatggcaaaataaaattttgcttatgaatcttttacattgtttatatatgattaatatcatcatatatattttctgtattaagctcatttggcttcatttaagctgtatacttagtcatatatctttcattagttctatggatatgagcagatccctttactggagcccagtatgtgctgtgtgagttagaagtcattcttgctgagaaggtgaataggtagggatttgccttgttttgtaagtctacaatttgccaagagtaaataacactggaccagctgtaaaagtaaacagtgtgtttatgcattgagatactaaagcatttaagaaaaaattaaaagatctcttttgtttaaaggtctacacaacacaccaccaaacgagacgcaatacaacatccacagatgtgaacacacccaaaaaaaacaattcccacaggagagagcgcgcgcaaaggggcaggaacacacagaggggggccgcgcacacgttgtggccccacaagaggggaaaaatgaaagcggaaacaggcaacagtatcctcgtagaaagtttccgccaa

SEQ ID NO: 445831 - DNA, 3642 bp, Homo sapiens
atgggatgggcggggccgggaaattccccggcgcgggcagggagcggctggctgtcagctgagccgcgctgggcggggtcgccaggccgcgcatcagccctaggcaccccagtcccggctgccccctccgccaccgccgccgcccgccggcaggttccctggtcagcgtcccatcccggtcgggagttctctccaggcggcacgatgccgaggaaacagtgaccctgagcgaagccaagccgggcggcaggaacttctgcaatgtcccatcaacctctcagctgcctcactgaaaaggaggacagccccagtgaaagcacaggaaatggacccccccacctggcccacccaaacctggacacgtttaccccggaggagctgctgcagcagatgaaagagctcctgaccgagaaccaccagctgaaagaagccatgaagctaaataatcaagccatgaaagggagatttgaggagctttcggcctggacagagaaacagaaggaagaacgccagttttttgagatacagagcaaagaagcaaaagagcgtctaatggccttgagtcatgagaatgagaaattgaaggaagagcttggaaaactaaaagggaaatcagaaaggtcatctgaggaccccactgatgactccaggcttcccagggccgaagcggagcaggaaaaggaccagctcaggacccaggtggtgaggctacaagcagagaaggcagacctgttgggcatcgtgtctgaactgcagctcaagctgaactccagcggctcctcagaagattcctttgttgaaattaggatggctgaaggagaagcagaagggtcagtaaaagaaatcaagcatagtcctgggcccacgagaacagtctccactggcacggcattgtctaaatataggagcagatctgcagatggggccaagaattacttcgaacatgaggagttaactgtgagccagctcctgctgtgcctaagggaagggaatcagaaggtggagagacttgaagttgcactcaaggaggccaaagaaagagtttcagattttgaaaagaaaacaagtaatcgttctgagattgaaacccagacagaggggagcacagagaaagagaatgatgaagagaaaggcccggagactgttggaagcgaagtggaagcactgaacctccaggtgacatctctgtttaaggagcttcaagaggctcatacaaaactcagcgaagctgagctaatgaagaagagacttcaagaaaagtgtcaggcccttgaaaggaaaaattctgcaattccatcagagttgaatgaaaagcaagagcttgtttatactaacaaaaagttagagctacaagtggaaagcatgctatcagaaatcaaaatggaacaggctaaaacagaggatgaaaagtccaaattaactgtgctacagatgacacacaacaagcttcttcaagaacataataatgcattgaaaacaattgaggaactaacaagaaaagagtcagaaaaagtggacagggcagtgctgaaggaactgagtgaaaaactggaactggcagagaaggctctggcttccaaacagctgcaaatggatgaaatgaagcaaaccattgccaagcaggaagaggacctggaaaccatgaccatcctcagggctcagatggaagtttactgttctgattttcatgctgaaagagcagcgagagagaaaattcatgaggaaaaggagcaactggcattgcagctggcagttctgctgaaagagaatgatgctttcgaagacggaggcaggcagtccttgatggagatgcagagtcgtcatggggcgagaacaagtgactctgaccagcaggcttaccttgttcaaagaggagctgaggacagggactggcggcaacagcggaatattccgattcattcctgccccaagtgtggagaggttctgcctgacatagacacgttacagattcacgtgatggattgcatcatttaagtgttgatgtatcacctccccaaaactgttggtaaatgtcagattttttcctccaagagttgtgcttttgtgttatttgttttcactcaaatattttgcctcattattcttgttttaaaagaaagaaaacaggccgggcacagtggctcatgcctgtaatcccagcactttgggaggtcgaggtgggtggatcacttggggtcagggtttgagaccagcctggccaacatggcggaaccctgtctctaccaaaattacaaaaattagccgagcatggtggcgcatgcctgtagtcgcagctactcgcgaggttgaggcaggagaattgcttgaacccaggaagtggcagttgcagtgagccgagacgacaccactgcactccagcctgggtgacagagggagactctgtctcgaaagaaagaaagaaaaaaaggaaggaaggagaaggaaggaaggagaagaaaaggtacctgttctacgtagaacacctttggtggagttccatcaactcgcaaagtagaatccttacctactactcttctgataataattttaatattttttatgtttggttgatgcgagcagctgcactgctcatgcagttagctagcatgtgacatcatgtgacaaagttcatgtaattagatggaagaaacctcactgattaattttaagaaccttttagggatgcaggaacaatgaagtggccacagtatgtgctgtttttgaagcatttttaaaaacgaattgtagttgtttttcttcatttaaaatggatctgttggaggttatgtgtgtatgttgtagttttattgcagccacaataattttaccaaagttttcacataggcagttagcctttacttaatatcaagacaagtgaaaaaatattggcatcgatgaaaccgataacattggcctcattggatttctttacccattcacagtgtaaagaagttaccttcatgctttcattgtacctgcaggcctgtgggcttgtacagtagataattaatttctaaaaagaacagctgcctattttcttcctaggttaggttatatcttcataatcacaagaattagtgatggcaaaataaaattttgcttatgaatcttttacattgtttatatatgattaatatcatcatatatattttctgtattaagctcatttggcttcatttaagctgtatacttagtcatatatctttcattagttctatggatatgagcagatccctttactggagcccagtatgtgctgtgtgagttagaagtcattcttgctgagaaggtgaataggtagggatttgccttgttttgtaagtctacaatttgccaagagtaaataacactggaccagctgtaaaagtaaacagtgtgtttatgcattgagatactaaagcatttaagaaaaaattaaaagatctcttttgtttaaaggtctacacaacacaccaccaaacgagacgcaatacaacatccacagatgtgaacacacccaaaaaaaacaattcccacaggagagagcgcgcgcaaaggggcaggaacacacagaggggggccgcgcacacgttgtggccccacaagaggggaaaaatgaaagcggaaacaggcaacagtatcctcgtagaaagtttccgccaa

SEQ ID NO: 445832 - DNA, 3470 bp, Homo sapiens
atgggatgggcggggccgggaaattccccggcgcgggcagggagcggctggctgtcagctgagccgcgctgggcggggtcgccaggccgcgcatcagccctaggcaccccagtcccggctgccccctccgtgggcggggtcgccaggccgcgcatcagccctaggcaccccagtcccggctgccccctccgccaccgccgccgcccgccggcaggttccctggtcagcgtcccatcccggtcgggagttctctccaggcggcacgatgccgaggaaacagtgaccctgagcgaagccaagccgggcggcaggaacttctgcaatgtcccatcaacctctcagctgcctcactgaaaaggaggacagccccagtgaaagcacaggaaatggacccccccacctggcccacccaaacctggacacgtttaccccggaggagctgctgcagcagatgaaagagctcctgaccgagaaccaccagctgaaagaagccatgaagctaaataatcaagccatgaaagggagatttgaggagctttcggcctggacagagaaacagaaggaagaacgccagttttttgagatacagagcaaagaagcaaaagagcgtctaatggccttgagtcatgagaatgagaaattgaaggaagagcttggaaaactaaaagggaaatcagaaaggtcatctgaggaccccactgatgactccaggcttcccagggccgaagcggagcaggaaaaggaccagctcaggacccaggtggtgaggctacaagcagagaaggcagacctgttgggcatcgtgtctgaactgcagctcaagctgaactccagcggctcctcagaagattcctttgttgaaattaggatggctgaaggagaagcagaagggtcagtaaaagaaatcaagcatagtcctgggcccacgagaacagtctccactggcacggcattgtctaaatataggagcagatctgcagatggggccaagaattacttcgaacatgaggagttaactgtgagccagctcctgctgtgcctaagggaagggaatcagaaggtggagagacttgaagttgcactcaaggaggccaaagaaagagtttcagattttgaaaagaaaacaagtaatcgttctgagattgaaacccagacagaggggagcacagagaaagagaatgatgaagagaaaggcccggagactgttggaagcgaagtggaagcactgaacctccaggtgacatctctgtttaaggagcttcaagaggctcatacaaaactcagcgaagctgagctaatgaagaagagacttcaagaaaagtgtcaggcccttgaaaggaaaaattctgcaattccatcagagttgaatgaaaagcaagagcttgtttatactaacaaaaagttagagctacaagtggaaagcatgctatcagaaatcaaaatggaacaggctaaaacagaggatgaaaagtccaaattaactgtgctacagatgacacacaacaagcttcttcaagaacataataatgcattgaaaacaattgaggaactaacaagaaaagagtcagaaaaagtggacagggcagtgctgaaggaactgagtgaaaaactggaactggcagagaaggctctggcttccaaacagctgcaaatggatgaaatgaagcaaaccattgccaagcaggaagaggacctggaaaccatgaccatcctcagggctcagatggaagtttactgttctgattttcatgctgaaagagcagcgagagagaaaattcatgaggaaaaggagcaactggcattgcagctggcagttctgctgaaagagaatgatgctttcgaagacggaggcaggcagtccttgatggagatgcagagtcgtcatggggcgagaacaagtgactctgaccagcaggcttaccttgttcaaagaggagctgaggacagggactggcggcaacagcggaatattccgattcattcctgccccaagtgtggagaggttctgcctgacatagacacgttacagattcacgtgatggattgcatcatttaagtgttgatgtatcacctccccaaaactgttggtaaatgtcagattttttcctccaagagttgtgcttttgtgttatttgttttcactcaaatattttgcctcattattcttgttttaaaagaaagaaaacaggccgggcacagtggctcatgcctgtaatcccagcactttgggaggtcgaggtgggtggatcacttggggtcagggtttgagaccagcctggccaacatggcggaaccctgtctctaccaaaattacaaaaattagccgagcatggtggcgcatgcctgtagtcgcagctactcgcgaggttgaggcaggagaattgcttgaacccaggaagtggcagttgcagtgagccgagacgacaccactgcactccagcctgggtgacagagggagactctgtctcgaaagaaagaaagaaaaaaaggaaggaaggagaaggaaggaaggagaagaaaaggtacctgttctacgtagaacacctttggtggagttccatcaactcgcaaagtagaatccttacctactactcttctgataataattttaatattttttatgtttggttgatgcgagcagctgcactgctcatgcagttagctagcatgtgacatcatgtgacaaagttcatgtaattagatggaagaaacctcactgattaattttaagaaccttttagggatgcaggaacaatgaagtggccacagtatgtgctgtttttgaagcatttttaaaaacgaattgtagttgtttttcttcatttaaaatggatctgttggaggttatgtgtgtatgttgtagttttattgcagccacaataattttaccaaagttttcacataggcagttagcctttacttaatatcaagacaagtgaaaaaatattggcatcgatgaaaccgataacattggcctcattggatttctttacccattcacagtgtaaagaagttaccttcatgctttcattgtacctgcaggcctgtgggcttgtacagtagataattaatttctaaaaagaacagctgcctattttcttcctaggttaggttatatcttcataatcacaagaattagtgatggcaaaataaaattttgcttatgaatcttttacattgtttatatatgattaatatcatcatatatattttctgtattaagctcatttggcttcatttaagctgtatacttagtcatatatctttcattagttctatggatatgagcagatccctttactggagcccagtatgtgctgtgtgagttagaagtcattcttgctgagaaggtgaataggtagggatttgccttgttttgtaagtctacaatttgccaagagtaaataacactggaccagctgtaaaagtaaacagtgtgtttatgcattgagatactaaagcatttaaga

SEQ ID NO: 445833 - DNA, 3624 bp, Homo sapiens
atgggatgggcggggccgggaaattccccggcgcgggcagggagcggctggctgtcagctgagccgcgctgggcggggtcgccaggccgcgcatcagccctaggcaccccagtcccggctgccccctccgccaccgccgccgcccgccggcaggttccctggtcagcgtcccatcccggtcgggagttctctccaggcggcacgatgccgaggaaacagtgaccctgagcgaagccaagccgggcggcaggaacttctgcaatgtcccatcaacctctcagctgcctcactgaaaaggaggacagccccagtgaaagcacaggaaatggacccccccacctggcccacccaaacctggacacgtttaccccggaggagctgctgcagcagatgaaagagctcctgaccgagaaccaccagctgaaagaagccatgaagctaaataatcaagccatgaaagggagatttgaggagctttcggcctggacagagaaacagaaggaagaacgccagttttttgagatacagagcaaagaagcaaaagagcgtctaatggccttgagtcatgagaatgagaaattgaaggaagagcttggaaaactaaaagggaaatcagaaaggtcatctgaggaccccactgatgactccaggcttcccagggccgaagcggagcaggaaaaggaccagctcaggacccaggtggtgaggctacaagcagagaaggcagacctgttgggcatcgtgtctgaactgcagctcaagctgaactccagcggctcctcagaagattcctttgttgaaattaggatggctgaaggagaagcagaagggtcagtaaaagaaatcaagcatagtcctgggcccacgagaacagtctccactggcacgagcagatctgcagatggggccaagaattacttcgaacatgaggagttaactgtgagccagctcctgctgtgcctaagggaagggaatcagaaggtggagagacttgaagttgcactcaaggaggccaaagaaagagtttcagattttgaaaagaaaacaagtaatcgttctgagattgaaacccagacagaggggagcacagagaaagagaatgatgaagagaaaggcccggagactgttggaagcgaagtggaagcactgaacctccaggtgacatctctgtttaaggagcttcaagaggctcatacaaaactcagcgaagctgagctaatgaagaagagacttcaagaaaagtgtcaggcccttgaaaggaaaaattctgcaattccatcagagttgaatgaaaagcaagagcttgtttatactaacaaaaagttagagctacaagtggaaagcatgctatcagaaatcaaaatggaacaggctaaaacagaggatgaaaagtccaaattaactgtgctacagatgacacacaacaagcttcttcaagaacataataatgcattgaaaacaattgaggaactaacaagaaaagagtcagaaaaagtggacagggcagtgctgaaggaactgagtgaaaaactggaactggcagagaaggctctggcttccaaacagctgcaaatggatgaaatgaagcaaaccattgccaagcaggaagaggacctggaaaccatgaccatcctcagggctcagatggaagtttactgttctgattttcatgctgaaagagcagcgagagagaaaattcatgaggaaaaggagcaactggcattgcagctggcagttctgctgaaagagaatgatgctttcgaagacggaggcaggcagtccttgatggagatgcagagtcgtcatggggcgagaacaagtgactctgaccagcaggcttaccttgttcaaagaggagctgaggacagggactggcggcaacagcggaatattccgattcattcctgccccaagtgtggagaggttctgcctgacatagacacgttacagattcacgtgatggattgcatcatttaagtgttgatgtatcacctccccaaaactgttggtaaatgtcagattttttcctccaagagttgtgcttttgtgttatttgttttcactcaaatattttgcctcattattcttgttttaaaagaaagaaaacaggccgggcacagtggctcatgcctgtaatcccagcactttgggaggtcgaggtgggtggatcacttggggtcagggtttgagaccagcctggccaacatggcggaaccctgtctctaccaaaattacaaaaattagccgagcatggtggcgcatgcctgtagtcgcagctactcgcgaggttgaggcaggagaattgcttgaacccaggaagtggcagttgcagtgagccgagacgacaccactgcactccagcctgggtgacagagggagactctgtctcgaaagaaagaaagaaaaaaaggaaggaaggagaaggaaggaaggagaagaaaaggtacctgttctacgtagaacacctttggtggagttccatcaactcgcaaagtagaatccttacctactactcttctgataataattttaatattttttatgtttggttgatgcgagcagctgcactgctcatgcagttagctagcatgtgacatcatgtgacaaagttcatgtaattagatggaagaaacctcactgattaattttaagaaccttttagggatgcaggaacaatgaagtggccacagtatgtgctgtttttgaagcatttttaaaaacgaattgtagttgtttttcttcatttaaaatggatctgttggaggttatgtgtgtatgttgtagttttattgcagccacaataattttaccaaagttttcacataggcagttagcctttacttaatatcaagacaagtgaaaaaatattggcatcgatgaaaccgataacattggcctcattggatttctttacccattcacagtgtaaagaagttaccttcatgctttcattgtacctgcaggcctgtgggcttgtacagtagataattaatttctaaaaagaacagctgcctattttcttcctaggttaggttatatcttcataatcacaagaattagtgatggcaaaataaaattttgcttatgaatcttttacattgtttatatatgattaatatcatcatatatattttctgtattaagctcatttggcttcatttaagctgtatacttagtcatatatctttcattagttctatggatatgagcagatccctttactggagcccagtatgtgctgtgtgagttagaagtcattcttgctgagaaggtgaataggtagggatttgccttgttttgtaagtctacaatttgccaagagtaaataacactggaccagctgtaaaagtaaacagtgtgtttatgcattgagatactaaagcatttaagaaaaaattaaaagatctcttttgtttaaaggtctacacaacacaccaccaaacgagacgcaatacaacatccacagatgtgaacacacccaaaaaaaacaattcccacaggagagagcgcgcgcaaaggggcaggaacacacagaggggggccgcgcacacgttgtggccccacaagaggggaaaaatgaaagcggaaacaggcaacagtatcctcgtagaaagtttccgccaa

SEQ ID NO: 445834 - DNA, 2895 bp, Homo sapiens
atgggatgggcggggccgggaaattccccggcgcgggcagggagcggctggctgtcagctgagccgcgctgggcggggtcgccaggccgcgcatcagccctaggcaccccagtcccggctgccccctccgtgggcggggtcgccaggccgcgcatcagccctaggcaccccagtcccggctgccccctccgccaccgccgccgcccgccggcaggttccctggtcagcgtcccatcccggtcgggagttctctccaggcggcacgatgccgaggaaacagtgaccctgagcgaagccaagccgggcggcaggaacttctgcaatgtcccatcaacctctcagctgcctcactgaaaaggaggacagccccagtgaaagcacaggaaatggacccccccacctggcccacccaaacctggacacgtttaccccggaggagctgctgcagcagatgaaagagctcctgaccgagaaccaccagctgaaagaagccatgaagctaaataatcaagccatgaaagggagatttgaggagctttcggcctggacagagaaacagaaggaagaacgccagttttttgagatacagagcaaagaagcaaaagagcgtctaatggccttgagtcatgagaatgagaaattgaaggaagagcttggaaaactaaaagggaaatcagaaaggtcatctgaggaccccactgatgactccaggcttcccagggccgaagcggagcaggaaaaggaccagctcaggacccaggtggtgaggctacaagcagagaaggcagacctgttgggcatcgtgtctgaactgcagctcaagctgaactccagcggctcctcagaagattcctttgttgaaattaggatggctgaaggagaagcagaagggtcagtaaaagaaatcaagcatagtcctgggcccacgagaacagtctccactggcacggcattgtctaaatataggagcagatctgcagatggggccaagaattacttcgaacatgaggagttaactgtgagccagctcctgctgtgcctaagggaagggaatcagaaggtggagagacttgaagttgcactcaaggaggccaaagaaagagtttcagattttgaaaagaaaacaagtaatcgttctgagattgaaacccagacagaggggagcacagagaaagagaatgatgaagagaaaggcccggagactgttggaagcgaagtggaagcactgaacctccaggtgacatctctgtttaaggagcttcaagaggctcatacaaaactcagcgaagctgagctaatgaagaagagacttcaagaaaagtgtcaggcccttgaaaggaaaaattctgcaattccatcagagttgaatgaaaagcaagagcttgtttatactaacaaaaagttagagctacaagtggaaagcatgctatcagaaatcaaaatggaacaggctaaaacagaggatgaaaagtccaaattaactgtgctacagatgacacacaacaagcttcttcaagaacataataatgcattgaaaacaattgaggaactaacaagaaaagagtcagaaaaagtggacagggcagtgctgaaggaactgagtgaaaaactggaactggcagagaaggctctggcttccaaacagctgcaaatggatgaaatgaagcaaaccattgccaagcaggaagaggacctggaaaccatgaccatcctcagggctcagatggaagtttactgttctgattttcatgctgaaagagcagcgagagagaaaattcatgaggaaaaggagcaactggcattgcagctggcagttctgctgaaagagaatgatgctttcgaagacggaggcaggcagtccttgatggagatgcagagtcgtcatggggcgagaacaagtgactctgaccagcaggcttaccttgttcaaagaggagctgaggacagggactggcggcaacagcggaatattccgattcattcctgccccaagtgtggagaggttctgcctgacatagacacgttacagattcacgtgatggattgcatcatttaagtgttgatgtatcacctccccaaaactgttggtaaatgtcagattttttcctccaagagttgtgcttttgtgttatttgttttcactcaaatattttgcctcattattcttgttttaaaagaaagaaaacaggccgggcacagtggctcatgcctgtaatcccagcactttgggaggtcgaggtgggtggatcacttggggtcagggtttgagaccagcctggccaacatggcggaaccctgtctctaccaaaattacaaaaattagccgagcatggtggcgcatgcctgtagtcgcagctactcgcgaggttgaggcaggagaattgcttgaacccaggaagtggcagttgcagtgagccgagacgacaccactgcactccagcctgggtgacagagggagactctgtctcgaaagaaagaaagaaaaaaaggaaggaaggagaaggaaggaaggagaagaaaaggtacctgttctacgtagaacacctttggtggagttccatcaactcgcaaagtagaatccttacctactactcttctgataataattttaatattttttatgtttggttgatgcgagcagctgcactgctcatgcagttagctagcatgtgacatcatgtgacaaagttcatgtaattagatggaagaaacctcactgattaattttaagaaccttttagggatgcaggaaacaagaccggtcttgtttcctgcacttcaaaaccaaacctctgctagcttcaaacttctcttctgcagcttcctcacctctcttagccttcacagaattgaagagagttagggccttgctctggattaggcttcggcttaagg

SEQ ID NO: 445835 - DNA, 3558 bp, Homo sapiens
atgggatgggcggggccgggaaattccccggcgcgggcagggagcggctggctgtcagctgagccgcgctgggcggggtcgccaggccgcgcatcagccctaggcaccccagtcccggctgccccctccgccaccgccgccgcccgccggcaggttccctggtcagcgtcccatcccggtcgggagttctctccaggcggcacgatgccgaggaaacagtgaccctgagcgaagccaagccgggcggcaggaacttctgcaatgtcccatcaacctctcagctgcctcactgaaaaggaggacagccccagtgaaagcacaggaaatggacccccccacctggcccacccaaacctggacacgtttaccccggaggagctgctgcagcagatgaaagagctcctgaccgagaaccaccagctgaaagaagccatgaagctaaataatcaagccatgaaagggagatttgaggagctttcggcctggacagagaaacagaaggaagaacgccagttttttgagatacagagcaaagaagcaaaagagcgtctaatggccttgagtcatgagaatgagaaattgaaggaagagcttggaaaactaaaagggaaatcagaaaggtcatctgaggaccccactgatgactccaggcttcccagggccgaagcggagcaggaaaaggaccagctcaggacccaggtggtgaggctacaagcagagaaggcagacctgttgggcatcgtgtctgaactgcagctcaagctgaactccagcggctcctcagaagattcctttgttgaaattaggatggctgaaggagaagcagaagggtcagtaaaagaaatcaagcatagtcctgggcccacgagaacagtctccactggcacgagcagatctgcagatggggccaagaattacttcgaacatgaggagttaactgtgagccagctcctgctgtgcctaagggaagggaatcagaaggtggagagacttgaagttgcactcaaggaggccaaagaaagagagaaagagaatgatgaagagaaaggcccggagactgttggaagcgaagtggaagcactgaacctccaggtgacatctctgtttaaggagcttcaagaggctcatacaaaactcagcgaagctgagctaatgaagaagagacttcaagaaaagtgtcaggcccttgaaaggaaaaattctgcaattccatcagagttgaatgaaaagcaagagcttgtttatactaacaaaaagttagagctacaagtggaaagcatgctatcagaaatcaaaatggaacaggctaaaacagaggatgaaaagtccaaattaactgtgctacagatgacacacaacaagcttcttcaagaacataataatgcattgaaaacaattgaggaactaacaagaaaagagtcagaaaaagtggacagggcagtgctgaaggaactgagtgaaaaactggaactggcagagaaggctctggcttccaaacagctgcaaatggatgaaatgaagcaaaccattgccaagcaggaagaggacctggaaaccatgaccatcctcagggctcagatggaagtttactgttctgattttcatgctgaaagagcagcgagagagaaaattcatgaggaaaaggagcaactggcattgcagctggcagttctgctgaaagagaatgatgctttcgaagacggaggcaggcagtccttgatggagatgcagagtcgtcatggggcgagaacaagtgactctgaccagcaggcttaccttgttcaaagaggagctgaggacagggactggcggcaacagcggaatattccgattcattcctgccccaagtgtggagaggttctgcctgacatagacacgttacagattcacgtgatggattgcatcatttaagtgttgatgtatcacctccccaaaactgttggtaaatgtcagattttttcctccaagagttgtgcttttgtgttatttgttttcactcaaatattttgcctcattattcttgttttaaaagaaagaaaacaggccgggcacagtggctcatgcctgtaatcccagcactttgggaggtcgaggtgggtggatcacttggggtcagggtttgagaccagcctggccaacatggcggaaccctgtctctaccaaaattacaaaaattagccgagcatggtggcgcatgcctgtagtcgcagctactcgcgaggttgaggcaggagaattgcttgaacccaggaagtggcagttgcagtgagccgagacgacaccactgcactccagcctgggtgacagagggagactctgtctcgaaagaaagaaagaaaaaaaggaaggaaggagaaggaaggaaggagaagaaaaggtacctgttctacgtagaacacctttggtggagttccatcaactcgcaaagtagaatccttacctactactcttctgataataattttaatattttttatgtttggttgatgcgagcagctgcactgctcatgcagttagctagcatgtgacatcatgtgacaaagttcatgtaattagatggaagaaacctcactgattaattttaagaaccttttagggatgcaggaacaatgaagtggccacagtatgtgctgtttttgaagcatttttaaaaacgaattgtagttgtttttcttcatttaaaatggatctgttggaggttatgtgtgtatgttgtagttttattgcagccacaataattttaccaaagttttcacataggcagttagcctttacttaatatcaagacaagtgaaaaaatattggcatcgatgaaaccgataacattggcctcattggatttctttacccattcacagtgtaaagaagttaccttcatgctttcattgtacctgcaggcctgtgggcttgtacagtagataattaatttctaaaaagaacagctgcctattttcttcctaggttaggttatatcttcataatcacaagaattagtgatggcaaaataaaattttgcttatgaatcttttacattgtttatatatgattaatatcatcatatatattttctgtattaagctcatttggcttcatttaagctgtatacttagtcatatatctttcattagttctatggatatgagcagatccctttactggagcccagtatgtgctgtgtgagttagaagtcattcttgctgagaaggtgaataggtagggatttgccttgttttgtaagtctacaatttgccaagagtaaataacactggaccagctgtaaaagtaaacagtgtgtttatgcattgagatactaaagcatttaagaaaaaattaaaagatctcttttgtttaaaggtctacacaacacaccaccaaacgagacgcaatacaacatccacagatgtgaacacacccaaaaaaaacaattcccacaggagagagcgcgcgcaaaggggcaggaacacacagaggggggccgcgcacacgttgtggccccacaagaggggaaaaatgaaagcggaaacaggcaacagtatcctcgtagaaagtttccgccaa

SEQ ID NO: 445836 - DNA, 3202 bp, Homo sapiens
gtccagagaggaggcgattcagatatgtggactttttaaacatacatagtctctggaggagtgttgttctctgcgtgtgtgtgtgtgtgtgtgtgtgtgtgtgtgtgtagagttgtaggtatgaggatttggggggcctgcaaagagagttcaggctctcagtggtgtggtgtgaggtacacagtgactgtttggaggacgtgggtgtgtgcattgtaagctggcctctccagagcctcactgagtctccacaccttccctaggaagcatggaggagcttggcactgggggtcccaggaccagctgtgcttgttcactagttgagaattagttggagaatgttctggaaagcagttcctttaagctggtcccagttatattgggttactctcttcttagtctttggaatttttctgatgaaaaccttttaacctttatactgaacagggcattgtctaaatataggagcagatctgcagatggggccaagaattacttcgaacatgaggagttaactgtgagccagctcctgctgtgcctaagggaagggaatcagaaggtggagagacttgaagttgcactcaaggaggccaaagaaagagtttcagattttgaaaagaaaacaagtaatcgttctgagattgaaacccagacagaggggagcacagagaaagagaatgatgaagagaaaggcccggagactgttggaagcgaagtggaagcactgaacctccaggtgacatctctgtttaaggagcttcaagaggctcatacaaaactcagcgaagctgagctaatgaagaagagacttcaagaaaagtgtcaggcccttgaaaggaaaaattctgcaattccatcagagttgaatgaaaagcaagagcttgtttatactaacaaaaagttagagctacaagtggaaagcatgctatcagaaatcaaaatggaacaggctaaaacagaggatgaaaagtccaaattaactgtgctacagatgacacacaacaagcttcttcaagaacataataatgcattgaaaacaattgaggaactaacaagaaaagagtcagaaaaagtggacagggcagtgctgaaggaactgagtgaaaaactggaactggcagagaaggctctggcttccaaacagctgcaaatggatgaaatgaagcaaaccattgccaagcaggaagaggacctggaaaccatgaccatcctcagggctcagatggaagtttactgttctgattttcatgctgaaagagcagcgagagagaaaattcatgaggaaaaggagcaactggcattgcagctggcagttctgctgaaagagaatgatgctttcgaagacggaggcaggcagtccttgatggagatgcagagtcgtcatggggcgagaacaagtgactctgaccagcaggcttaccttgttcaaagaggagctgaggacagggactggcggcaacagcggaatattccgattcattcctgccccaagtgtggagaggttctgcctgacatagacacgttacagattcacgtgatggattgcatcatttaagtgttgatgtatcacctccccaaaactgttggtaaatgtcagattttttcctccaagagttgtgcttttgtgttatttgttttcactcaaatattttgcctcattattcttgttttaaaagaaagaaaacaggccgggcacagtggctcatgcctgtaatcccagcactttgggaggtcgaggtgggtggatcacttggggtcagggtttgagaccagcctggccaacatggcggaaccctgtctctaccaaaattacaaaaattagccgagcatggtggcgcatgcctgtagtcgcagctactcgcgaggttgaggcaggagaattgcttgaacccaggaagtggcagttgcagtgagccgagacgacaccactgcactccagcctgggtgacagagggagactctgtctcgaaagaaagaaagaaaaaaaggaaggaaggagaaggaaggaaggagaagaaaaggtacctgttctacgtagaacacctttggtggagttccatcaactcgcaaagtagaatccttacctactactcttctgataataattttaatattttttatgtttggttgatgcgagcagctgcactgctcatgcagttagctagcatgtgacatcatgtgacaaagttcatgtaattagatggaagaaacctcactgattaattttaagaaccttttagggatgcaggaacaatgaagtggccacagtatgtgctgtttttgaagcatttttaaaaacgaattgtagttgtttttcttcatttaaaatggatctgttggaggttatgtgtgtatgttgtagttttattgcagccacaataattttaccaaagttttcacataggcagttagcctttacttaatatcaagacaagtgaaaaaatattggcatcgatgaaaccgataacattggcctcattggatttctttacccattcacagtgtaaagaagttaccttcatgctttcattgtacctgcaggcctgtgggcttgtacagtagataattaatttctaaaaagaacagctgcctattttcttcctaggttaggttatatcttcataatcacaagaattagtgatggcaaaataaaattttgcttatgaatcttttacattgtttatatatgattaatatcatcatatatattttctgtattaagctcatttggcttcatttaagctgtatacttagtcatatatctttcattagttctatggatatgagcagatccctttactggagcccagtatgtgctgtgtgagttagaagtcattcttgctgagaaggtgaataggtagggatttgccttgttttgtaagtctacaatttgccaagagtaaataacactggaccagctgtaaaagtaaacagtgtgtttatgcattgagatactaaagcatttaagaaaaaattaaaagatctcttttgtttaaaggtctacacaacacaccaccaaacgagacgcaatacaacatccacagatgtgaacacacccaaaaaaaacaattcccacaggagagagcgcgcgcaaaggggcaggaacacacagaggggggccgcgcacacgttgtggccccacaagaggggaaaaatgaaagcggaaacaggcaacagtatcctcgtagaaagtttccgccaa

SEQ ID NO: 445837 - DNA, 1785 bp, Homo sapiens
atgggatgggcggggccgggaaattccccggcgcgggcagggagcggctggctgtcagctgagccgcgctgggcggggtcgccaggccgcgcatcagccctaggcaccccagtcccggctgccccctccgtgggcggggtcgccaggccgcgcatcagccctaggcaccccagtcccggctgccccctccgccaccgccgccgcccgccggcaggttccctggtcagcgtcccatcccggtcgggagttctctccaggcggcacgatgccgaggaaacagtgaccctgagcgaagccaagccgggcggcaggaacttctgcaatgtcccatcaacctctcagctgcctcactgaaaaggaggacagccccagtgaaagcacaggaaatggacccccccacctggcccacccaaacctggacacgtttaccccggaggagctgctgcagcagatgaaagagctcctgaccgagaaccaccagctgaaagaagccatgaagctaaataatcaagccatgaaagggagatttgaggagctttcggcctggacagagaaacagaaggaagaacgccagttttttgagatacagagcaaagaagcaaaagagcgtctaatggccttgagtcatgagaatgagaaattgaaggaagagcttggaaaactaaaagggaaatcagaaaggtcatctgaggaccccactgatgactccaggcttcccagggccgaagcggagcaggaaaaggaccagctcaggacccaggtggtgaggctacaagcagagaaggcagacctgttgggcatcgtgtctgaactgcagctcaagctgaactccagcggctcctcagaagattcctttgttgaaattaggatggctgaaggagaagcagaagggtcagtaaaagaaatcaagcatagtcctgggcccacgagaacagtctccactggcacggcattgtctaaatataggagcagatctgcagatggggccaagaattacttcgaacatgaggagttaactgtgagccagctcctgctgtgcctaagggaagggaatcagaaggtggagagacttgaagttgcactcaaggaggccaaagaaagagtttcagattttgaaaagaaaacaagtaatcgttctgagattgaaacccagacagaggggagcacagagaaagagaatgatgaagagaaaggcccggagactgttggaagcgaagtggaagcactgaacctccaggtgacatctctgtttaaggagcttcaagaggctcatacaaaactcagcgaagctgagctaatgaagaagagacttcaagaaaagtgtcaggcccttgaaaggaaaaattctgcaattccatcagagttgaatgaaaagcaagagcttgtttatactaacaaaaagttagagctacaagtggaaagcatgctatcagaaatcaaaatggaacaggctaaaacagaggatgaaaagtccaaattaactgtgctacagatgacacacaacaagcttcttcaagaacataataatgcattgaaaacaattgaggaactaacaagaaaagagtcagaaaaagtggacagggcagtgctgaaggaactgagtgaaaaactggaactggcagagaaggctctggcttccaaacagctgcaaatggatgaaatgaagcaaaccattgccaagcaggaagaggacctggaaaccatgaccatcctcagggctcagatggaagtttatattcttatcctaccaggcttcggaataatctcccatattgtaacttacta

SEQ ID NO: 445838 - DNA, 1364 bp, Homo sapiens
atgggatgggcggggccgggaaattccccggcgcgggcagggagcggctggctgtcagctgagccgcgctgggcggggtcgccaggccgcgcatcagccctaggcaccccagtcccggctgccccctccgtgggcggggtcgccaggccgcgcatcagccctaggcaccccagtcccggctgccccctccgccaccgccgccgcccgccggcaggttccctggtcagcgtcccatcccggtcgggagttctctccaggcggcacgatgccgaggaaacagtgaccctgagcgaagccaagccgggcggcaggaacttctgcaatgtcccatcaacctctcagctgcctcactgaaaaggaggacagccccagtgaaagcacaggaaatggacccccccacctggcccacccaaacctggacacgtttaccccggaggagctgctgcagcagatgaaagagctcctgaccgagaaccaccagctgaaagaagccatgaagctaaataatcaagccatgaaagggagatttgaggagctttcggcctggacagagaaacagaaggaagaacgccagttttttgagatacagagcaaagaagcaaaagagcgtctaatggccttgagtcatgagaatgagaaattgaaggaagagcttggaaaactaaaagggaaatcagaaaggtcatctgaggaccccactgatgactccaggcttcccagggccgaagcggagcaggaaaaggaccagctcaggacccaggtggtgaggctacaagcagagaaggcagacctgttgggcatcgtgtctgaactgcagctcaagctgaactccagcggctcctcagaagattcctttgttgaaattaggatggctgaaggagaagcagaagggtcagtaaaagaaatcaagcatagtcctgggcccacgagaacagtctccactggcacggcattgtctaaatataggagcagatctgcagatggggccaagaattacttcgaacatgaggagttaactgtgagccagctcctgctgtgcctaagggaagggaatcagaaggtggagagacttgaagttgcactcaaggaggccaaagaaagtatgaaataggttaacttgaaatatgtgtttttttaaaacagctttcctgagatataattaagataccatacagttcacccatttaaagtatacatttcagtgttttttagaatattccaggattgtgcaaccactgttactacaatataattttagaacattttttcccccaaacagcactcactgtctgctcctccaagcaatgtgctttctgtctctatagatttggccattctagacatttcatataaatggaattata

SEQ ID NO: 445839 - DNA, 1088 bp, Homo sapiens
atgggatgggcggggccgggaaattccccggcgcgggcagggagcggctggctgtcagctgagccgcgctgggcggggtcgccaggccgcgcatcagccctaggcaccccagtcccggctgccccctccgccaccgccgccgcccgccggcaggttccctggtcagcgtcccatcccggtcgggagttctctccaggcggcacgatgccgaggaaacagtgaccctgagcgaagccaagccgggcggcaggaacttctgcaatgtcccatcaacctctcagctgcctcactgaaaaggaggacagccccagtgaaagcacaggaaatggacccccccacctggcccacccaaacctggacacgtttaccccggaggagctgctgcagcagatgaaagagctcctgaccgagaaccaccagctgaaagaagccatgaagctaaataatcaagccatgaaagggagatttgaggagctttcggcctggacagagaaacagaaggaagaacgccagttttttgagatacagagcaaagaagcaaaagagcgtctaatggccttgagtcatgagaatgagaaattgaaggaagagcttggaaaactaaaagggaaatcagaaaggtcatctgaggaccccactgatgactccaggcttcccagggccgaagcggagcaggaaaaggaccagctcaggacccaggtggtgaggctacaagcagagaaggcagacctgttgggcatcgtgtctgaactgcagctcaagctgaactccagcggctcctcagaagattcctttgttgaaattaggatggctgaaggagaagcagaagggtcagtaaaagaaatcaagcatagtcctgggcccacgagaacagtctccactggcacgtatgtgaaggaagactcgggctgtcaggcagacaggctgggcaggctcgtcactgggtgcttgtcaccggaggtcaaatgttgtgacctgaggaagtaacttctttatgatttataccaggatctttccagaatatttggtttgaatgctatttaatgttgcagctcaaactggcaaagattaaaaactgtttggttcct

SEQ ID NO: 445840 - DNA, 646 bp, Homo sapiens
ctactacttataaattagcggccgggtcaactgcctattttcttcctaggttaggttatatcttcataatcacaagaattagtgatggcaaaataaaattttgcttatgaatcttttacattgtttatatatgattaatatcatcatatatattttctgtattaagctcatttggcttcatttaagctgtatacttagtcatatatctttcattagttctatggatatgagcagatccctttactggagcccagtatgtgctgtgtgagttagaagtcattcttgctgagaaggtgaataggtagggatttgccttgttttgtaagtctacaatttgccaagagtaaataacactggaccagctgtaaaagtaaacagtgtgtttatgcattgagatactaaagcatttaagaaaaaattaaaagatctcttttgtttaaaggtctacacaacacaccaccaaacgagacgcaatacaacatccacagatgtgaacacacccaaaaaaaacaattcccacaggagagagcgcgcgcaaaggggcaggaacacacagaggggggccgcgcacacgttgtggccccacaagaggggaaaaatgaaagcggaaacaggcaacagtatcctcgtagaaagtttccgccaa

SEQ ID NO: 445841 - DNA, 801 bp, Homo sapiens
atgggatgggcggggccgggaaattccccggcgcgggcagggagcggctggctgtcagctgagccgcgctgggcggggtcgccaggccgcgcatcagccctaggcaccccagtcccggctgccccctccgccaccgccgccgcccgccggcaggttccctggtcagcgtcccatcccggtcgggagttctctccaggcggcacgatgccgaggaaacagtgaccctgagcgaagccaagccgggcggcaggaacttctgcaatgtcccatcaacctctcagctgcctcactgaaaaggaggacagccccagtgaaagcacaggaaatggacccccccacctggcccacccaaacctggacacgtttaccccggaggagctgctgcagcagatgaaagagctcctgaccgagaaccaccagctgaaaggtacaagtaaaaactgtgtgtatctcaaggaagtagcataatgatatttagcccattcaaaaggaaaaagaggctgggcgtggtggctcatgcctgtcattccatcactttgggaggccgaggcagaaggattgcttgagtacaggagttcaagaccagcctgggcaagatggcaagacctgatctctacaaaaaattaaaaaaaaaaaaaaaaaagctgggcgtggtggtgcacgcctctggtcctagctactggggatgctgaggttggaggattgcgtgagcctgggaagttggagctgcagtgagccatgatcgtgccactgcactttagcctggatgacagagagagaccctgactcaaaaaaaaaaaa

SEQ ID NO: 445842 - DNA, 996 bp, Homo sapiens
ggctaggtagaggctggtggtaatcggccgagggctgccctcgcacgccgcccgccggcaggttccctggtcagcgtcccatcccggtcgggagttctctccaggcggcacgatgccgaggaaacagtgaccctgagcgaagccaagccgggcggcaggaacttctgcaatgtcccatcaacctctcagctgcctcactgaaaaggaggacagccccagtgaaagcacaggaaatggacccccccacctggcccacccaaacctggacacgtttaccccggaggagctgctgcagcagatgaaagagctcctgaccgagaaccaccagctgaaagaagccatgaagctaaataatcaagccatgaaagggagatttgaggagctttcggcctggacagagaaacagaaggaagaacgccagttttttgagatacagagcaaagaagcaaaagagcgtctaatggccttgagtcatgagaatgagaaattgaaggaagagcttggaaaactaaaagggaaatcagaaaggtcatctgaggaccccactgatgactccaggcttcccagggccgaagcggagcaggaaaaggaccagctcaggacccaggtggtgaggctacaagcagagaaggcagacctgttgggcatcgtgtctgaactgcagctcaagctgaactccagcggctcctcagaagattcctttgttgaaattaggatggctgaaggagaagcagaagggtcagtaaaagaaatcaagcatagtcctgggcccacgagaacagtctccactggcacgtatgtgaaggaagactcgggctgtcaggcagacaggctgggcaggctcgtcactgggtgcttgtcaccggaggtcaaatgttgtgacctgaggaagtaacttctttatgatttataccaggatctttccagaatatttggtttgaatgctatttaatgttgcagctcaaactggcaaagattaaaaactgtttggttcct

SEQ ID NO: 445843 - DNA, 3841 bp, Homo sapiens
atgggatgggcggggccgggaaattccccggcgcgggcagggagcggctggctgtcagctgagccgcgctgggcggggtcgccaggccgcgcatcagccctaggcaccccagtcccggctgccccctccgcgccgcccgccggcaggttccctggtcagcgtcccatcccggtcgggagttctctccaggcggcacgatgccgaggaaacagtgaccctgagcgaagccaagccgggcggcaggtgtggctttgatagctggtggtgccacttcctggccttggatgagccgtacgcctctgtaaacccaacttcctcacctttgaaacagctgcctggttcagcattaatgaagattagtcagtgacaggcctggtgtgctgagtccgcacatagaagaatcaaaaatgtccaaaatgtaactggagagaaagtgggcaacttttggagaacttctgcaatgtcccatcaacctctcagctgcctcactgaaaaggaggacagccccagtgaaagcacaggaaatggacccccccacctggcccacccaaacctggacacgtttaccccggaggagctgctgcagcagatgaaagagctcctgaccgagaaccaccagctgaaagaagccatgaagctaaataatcaagccatgaaagggagatttgaggagctttcggcctggacagagaaacagaaggaagaacgccagttttttgagatacagagcaaagaagcaaaagagcgtctaatggccttgagtcatgagaatgagaaattgaaggaagagcttggaaaactaaaagggaaatcagaaaggtcatctgaggaccccactgatgactccaggcttcccagggccgaagcggagcaggaaaaggaccagctcaggacccaggtggtgaggctacaagcagagaaggcagacctgttgggcatcgtgtctgaactgcagctcaagctgaactccagcggctcctcagaagattcctttgttgaaattaggatggctgaaggagaagcagaagggtcagtaaaagaaatcaagcatagtcctgggcccacgagaacagtctccactggcacggcattgtctaaatataggagcagatctgcagatggggccaagaattacttcgaacatgaggagttaactgtgagccagctcctgctgtgcctaagggaagggaatcagaaggtggagagacttgaagttgcactcaaggaggccaaagaaagagtttcagattttgaaaagaaaacaagtaatcgttctgagattgaaacccagacagaggggagcacagagaaagagaatgatgaagagaaaggcccggagactgttggaagcgaagtggaagcactgaacctccaggtgacatctctgtttaaggagcttcaagaggctcatacaaaactcagcgaagctgagctaatgaagaagagacttcaagaaaagtgtcaggcccttgaaaggaaaaattctgcaattccatcagagttgaatgaaaagcaagagcttgtttatactaacaaaaagttagagctacaagtggaaagcatgctatcagaaatcaaaatggaacaggctaaaacagaggatgaaaagtccaaattaactgtgctacagatgacacacaacaagcttcttcaagaacataataatgcattgaaaacaattgaggaactaacaagaaaagagtcagaaaaagtggacagggcagtgctgaaggaactgagtgaaaaactggaactggcagagaaggctctggcttccaaacagctgcaaatggatgaaatgaagcaaaccattgccaagcaggaagaggacctggaaaccatgaccatcctcagggctcagatggaagtttactgttctgattttcatgctgaaagagcagcgagagagaaaattcatgaggaaaaggagcaactggcattgcagctggcagttctgctgaaagagaatgatgctttcgaagacggaggcaggcagtccttgatggagatgcagagtcgtcatggggcgagaacaagtgactctgaccagcaggcttaccttgttcaaagaggagctgaggacagggactggcggcaacagcggaatattccgattcattcctgccccaagtgtggagaggttctgcctgacatagacacgttacagattcacgtgatggattgcatcatttaagtgttgatgtatcacctccccaaaactgttggtaaatgtcagattttttcctccaagagttgtgcttttgtgttatttgttttcactcaaatattttgcctcattattcttgttttaaaagaaagaaaacaggccgggcacagtggctcatgcctgtaatcccagcactttgggaggtcgaggtgggtggatcacttggggtcagggtttgagaccagcctggccaacatggcggaaccctgtctctaccaaaattacaaaaattagccgagcatggtggcgcatgcctgtagtcgcagctactcgcgaggttgaggcaggagaattgcttgaacccaggaagtggcagttgcagtgagccgagacgacaccactgcactccagcctgggtgacagagggagactctgtctcgaaagaaagaaagaaaaaaaggaaggaaggagaaggaaggaaggagaagaaaaggtacctgttctacgtagaacacctttggtggagttccatcaactcgcaaagtagaatccttacctactactcttctgataataattttaatattttttatgtttggttgatgcgagcagctgcactgctcatgcagttagctagcatgtgacatcatgtgacaaagttcatgtaattagatggaagaaacctcactgattaattttaagaaccttttagggatgcaggaacaatgaagtggccacagtatgtgctgtttttgaagcatttttaaaaacgaattgtagttgtttttcttcatttaaaatggatctgttggaggttatgtgtgtatgttgtagttttattgcagccacaataattttaccaaagttttcacataggcagttagcctttacttaatatcaagacaagtgaaaaaatattggcatcgatgaaaccgataacattggcctcattggatttctttacccattcacagtgtaaagaagttaccttcatgctttcattgtacctgcaggcctgtgggcttgtacagtagataattaatttctaaaaagaacagctgcctattttcttcctaggttaggttatatcttcataatcacaagaattagtgatggcaaaataaaattttgcttatgaatcttttacattgtttatatatgattaatatcatcatatatattttctgtattaagctcatttggcttcatttaagctgtatacttagtcatatatctttcattagttctatggatatgagcagatccctttactggagcccagtatgtgctgtgtgagttagaagtcattcttgctgagaaggtgaataggtagggatttgccttgttttgtaagtctacaatttgccaagagtaaataacactggaccagctgtaaaagtaaacagtgtgtttatgcattgagatactaaagcatttaagaaaaaattaaaagatctcttttgtttaaaggtctacacaacacaccaccaaacgagacgcaatacaacatccacagatgtgaacacacccaaaaaaaacaattcccacaggagagagcgcgcgcaaaggggcaggaacacacagaggggggccgcgcacacgttgtggccccacaagaggggaaaaatgaaagcggaaacaggcaacagtatcctcgtagaaagtttccgccaa

SEQ ID NO: 445844 - DNA, 3649 bp, Homo sapiens
atgggatgggcggggccgggaaattccccggcgcgggcagggagcggctggctgtcagctgagccgcgctgggcggggtcgccaggccgcgcatcagccctaggcaccccagtcccggctgccccctccgtgggcggggtcgccaggccgcgcatcagccctaggcaccccagtcccggctgccccctccgccaccgccgccgcccgccggcaggttccctggtcagcgtcccatcccggtcgggagttctctccaggcggcacgatgccgaggaaacagtgaccctgagcgaagccaagccgggcggcaggaacttctgcaatgtcccatcaacctctcagctgcctcactgaaaaggaggacagccccagtgaaagcacaggaaatggacccccccacctggcccacccaaacctggacacgtttaccccggaggagctgctgcagcagatgaaagagctcctgaccgagaaccaccagctgaaagaagccatgaagctaaataatcaagccatgaaagggagatttgaggagctttcggcctggacagagaaacagaaggaagaacgccagttttttgagatacagagcaaagaagcaaaagagcgtctaatggccttgagtcatgagaatgagaaattgaaggaagagcttggaaaactaaaagggaaatcagaaaggtcatctgaggaccccactgatgactccaggcttcccagggccgaagcggagcaggaaaaggaccagctcaggacccaggtggtgaggctacaagcagagaaggcagacctgttgggcatcgtgtctgaactgcagctcaagctgaactccagcggctcctcagaagattcctttgttgaaattaggatggctgaaggagaagcagaagggtcagtaaaagaaatcaagcatagtcctgggcccacgagaacagtctccactggcacggcattgtctaaatataggagcagatctgcagatggggccaagaattacttcgaacatgaggagttaactgtgagccagctcctgctgtgcctaagggaagggaatcagaaggtggagagacttgaagttgcactcaaggaggccaaagaaagagtttcagattttgaaaagaaaacaagtaatcgttctgagattgaaacccagacagaggggagcacagagaaagagaatgatgaagagaaaggcccggagactgttggaagcgaagtggaagcactgaacctccaggtgacatctctgtttaaggagcttcaagaggctcatacaaaactcagcgaagctgagctaatgaagaagagacttcaagaaaagtgtcaggcccttgaaaggaaaaattctgcaattccatcagagttgaatgaaaagcaagagcttgtttatactaacaaaaagttagagctacaagtggaaagcatgctatcagaaatcaaaatggaacaggctaaaacagaggatgaaaagtccaaattaactgtgctacagatgacacacaacaagcttcttcaagaacataataatgcattgaaaacaattgaggaactaacaagaaaagagtcagaaaaagtggacagggcagtgctgaaggaactgagtgaaaaactggaactggcagagaaggctctggcttccaaacagctgcaaatggatgaaatgaagcaaaccattgccaagcaggaagaggacctggaaaccatgaccatcctcagggctcagatggaagtttactgttctgattttcatgctgaaagagcagcgagagagaaaattcatgaggaaaaggagcaactggcattgcagctggcagttctgctgaaagagaatgatgctttcgaagacggaggcaggcagtccttgatggagatgcagagtcgtcatggggcgagaacaagtgactctgaccagcaggcttaccttgttcaaagaggagctgaggacagggactggcggcaacagcggaatattccgattcattcctgccccaagtgtggagaggttctgcctgacatagacacgttacagattcacgtgatggattgcatcatttaagtgttgatgtatcacctccccaaaactgttggtaaatgtcagattttttcctccaagagttgtgcttttgtgttatttgttttcactcaaatattttgcctcattattcttgttttaaaagaaagaaaacaggccgggcacagtggctcatgcctgtaatcccagcactttgggaggtcgaggtgggtggatcacttggggtcagggtttgagaccagcctggccaacatggcggaaccctgtctctaccaaaattacaaaaattagccgagcatggtggcgcatgcctgtagtcgcagctactcgcgaggttgaggcaggagaattgcttgaacccaggaagtggcagttgcagtgagccgagacgacaccactgcactccagcctgggtgacagagggagactctgtctcgaaagaaagaaagaaaaaaaggaaggaaggagaaggaaggaaggagaagaaaaggtacctgttctacgtagaacacctttggtggagttccatcaactcgcaaagtagaatccttacctactactcttctgataataattttaatattttttatgtttggttgatgcgagcagctgcactgctcatgcagttagctagcatgtgacatcatgtgacaaagttcatgtaattagatggaagaaacctcactgattaattttaagaaccttttagggatgcaggaacaatgaagtggccacagtatgtgctgtttttgaagcatttttaaaaacgaattgtagttgtttttcttcatttataattttaccaaagttttcacataggcagttagcctttacttaatatcaagacaagtgaaaaaatattggcatcgatgaaaccgataacattggcctcattggatttctttacccattcacagtgtaaagaagttaccttcatgctttcattgtacctgcaggcctgtgggcttgtacagtagataattaatttctaaaaagaacagctgcctattttcttcctaggttaggttatatcttcataatcacaagaattagtgatggcaaaataaaattttgcttatgaatcttttacattgtttatatatgattaatatcatcatatatattttctgtattaagctcatttggcttcatttaagctgtatacttagtcatatatctttcattagttctatggatatgagcagatccctttactggagcccagtatgtgctgtgtgagttagaagtcattcttgctgagaaggtgaataggtagggatttgccttgttttgtaagtctacaatttgccaagagtaaataacactggaccagctgtaaaagtaaacagtgtgtttatgcattgagatactaaagcatttaagaaaaaattaaaagatctcttttgtttaaaggtctacacaacacaccaccaaacgagacgcaatacaacatccacagatgtgaacacacccaaaaaaaacaattcccacaggagagagcgcgcgcaaaggggcaggaacacacagaggggggccgcgcacacgttgtggccccacaagaggggaaaaatgaaagcggaaacaggcaacagtatcctcgtagaaagtttccgccaa

SEQ ID NO: 445845 - DNA, 3794 bp, Homo sapiens
atgggatgggcggggccgggaaattccccggcgcgggcagggagcggctggctgtcagctgagccgcgctgggcggggtcgccaggccgcgcatcagccctaggcaccccagtcccggctgccccctccgccaccgccgccgcccgccggcaggttccctggtcagcgtcccatcccggtcgggagttctctccaggcggcacgatgccgaggaaacagtgaccctgagcgaagccaagccgggcggcaggtgtggctttgatagctggtggtgccacttcctggccttggatgagccgtacgcctctgtaaacccaacttcctcacctttgaaacagctgcctggttcagcattaatgaagattagtcagtgacaggcctggtgtgctgagtccgcacatagaacttctgcaatgtcccatcaacctctcagctgcctcactgaaaaggaggacagccccagtgaaagcacaggaaatggacccccccacctggcccacccaaacctggacacgtttaccccggaggagctgctgcagcagatgaaagagctcctgaccgagaaccaccagctgaaagaagccatgaagctaaataatcaagccatgaaagggagatttgaggagctttcggcctggacagagaaacagaaggaagaacgccagttttttgagatacagagcaaagaagcaaaagagcgtctaatggccttgagtcatgagaatgagaaattgaaggaagagcttggaaaactaaaagggaaatcagaaaggtcatctgaggaccccactgatgactccaggcttcccagggccgaagcggagcaggaaaaggaccagctcaggacccaggtggtgaggctacaagcagagaaggcagacctgttgggcatcgtgtctgaactgcagctcaagctgaactccagcggctcctcagaagattcctttgttgaaattaggatggctgaaggagaagcagaagggtcagtaaaagaaatcaagcatagtcctgggcccacgagaacagtctccactggcacggcattgtctaaatataggagcagatctgcagatggggccaagaattacttcgaacatgaggagttaactgtgagccagctcctgctgtgcctaagggaagggaatcagaaggtggagagacttgaagttgcactcaaggaggccaaagaaagagtttcagattttgaaaagaaaacaagtaatcgttctgagattgaaacccagacagaggggagcacagagaaagagaatgatgaagagaaaggcccggagactgttggaagcgaagtggaagcactgaacctccaggtgacatctctgtttaaggagcttcaagaggctcatacaaaactcagcgaagctgagctaatgaagaagagacttcaagaaaagtgtcaggcccttgaaaggaaaaattctgcaattccatcagagttgaatgaaaagcaagagcttgtttatactaacaaaaagttagagctacaagtggaaagcatgctatcagaaatcaaaatggaacaggctaaaacagaggatgaaaagtccaaattaactgtgctacagatgacacacaacaagcttcttcaagaacataataatgcattgaaaacaattgaggaactaacaagaaaagagtcagaaaaagtggacagggcagtgctgaaggaactgagtgaaaaactggaactggcagagaaggctctggcttccaaacagctgcaaatggatgaaatgaagcaaaccattgccaagcaggaagaggacctggaaaccatgaccatcctcagggctcagatggaagtttactgttctgattttcatgctgaaagagcagcgagagagaaaattcatgaggaaaaggagcaactggcattgcagctggcagttctgctgaaagagaatgatgctttcgaagacggaggcaggcagtccttgatggagatgcagagtcgtcatggggcgagaacaagtgactctgaccagcaggcttaccttgttcaaagaggagctgaggacagggactggcggcaacagcggaatattccgattcattcctgccccaagtgtggagaggttctgcctgacatagacacgttacagattcacgtgatggattgcatcatttaagtgttgatgtatcacctccccaaaactgttggtaaatgtcagattttttcctccaagagttgtgcttttgtgttatttgttttcactcaaatattttgcctcattattcttgttttaaaagaaagaaaacaggccgggcacagtggctcatgcctgtaatcccagcactttgggaggtcgaggtgggtggatcacttggggtcagggtttgagaccagcctggccaacatggcggaaccctgtctctaccaaaattacaaaaattagccgagcatggtggcgcatgcctgtagtcgcagctactcgcgaggttgaggcaggagaattgcttgaacccaggaagtggcagttgcagtgagccgagacgacaccactgcactccagcctgggtgacagagggagactctgtctcgaaagaaagaaagaaaaaaaggaaggaaggagaaggaaggaaggagaagaaaaggtacctgttctacgtagaacacctttggtggagttccatcaactcgcaaagtagaatccttacctactactcttctgataataattttaatattttttatgtttggttgatgcgagcagctgcactgctcatgcagttagctagcatgtgacatcatgtgacaaagttcatgtaattagatggaagaaacctcactgattaattttaagaaccttttagggatgcaggaacaatgaagtggccacagtatgtgctgtttttgaagcatttttaaaaacgaattgtagttgtttttcttcatttaaaatggatctgttggaggttatgtgtgtatgttgtagttttattgcagccacaataattttaccaaagttttcacataggcagttagcctttacttaatatcaagacaagtgaaaaaatattggcatcgatgaaaccgataacattggcctcattggatttctttacccattcacagtgtaaagaagttaccttcatgctttcattgtacctgcaggcctgtgggcttgtacagtagataattaatttctaaaaagaacagctgcctattttcttcctaggttaggttatatcttcataatcacaagaattagtgatggcaaaataaaattttgcttatgaatcttttacattgtttatatatgattaatatcatcatatatattttctgtattaagctcatttggcttcatttaagctgtatacttagtcatatatctttcattagttctatggatatgagcagatccctttactggagcccagtatgtgctgtgtgagttagaagtcattcttgctgagaaggtgaataggtagggatttgccttgttttgtaagtctacaatttgccaagagtaaataacactggaccagctgtaaaagtaaacagtgtgtttatgcattgagatactaaagcatttaagaaaaaattaaaagatctcttttgtttaaaggtctacacaacacaccaccaaacgagacgcaatacaacatccacagatgtgaacacacccaaaaaaaacaattcccacaggagagagcgcgcgcaaaggggcaggaacacacagaggggggccgcgcacacgttgtggccccacaagaggggaaaaatgaaagcggaaacaggcaacagtatcctcgtagaaagtttccgccaa

SEQ ID NO: 445846 - DNA, 3257 bp, Homo sapiens
tgaattgcagctccaggctgaactccagcggctcctcagaagattcctttgttgaaattaggatggctgaaggagacgcagacgggttaggtaaaagaaatcaggcatagtcctgggcccacgtagaacagtctccactggcacgagcagatctgcagatggggccaagggccttgagtcatgagaatgagaaattgaaggaagagcttggaaaactaaaagggaaatcagaaaggtcatctgaggaccccactgatgactccaggcttcccagggccgaagcggagcaggaaaaggaccagctcaggacccaggtggtgaggctacaagcagagaaggcagacctgttgggcatcgtgtctgaactgcagctcaagctgaactccagcggctcctcagaagattcctttgttgaaattaggatggctgaaggagaagcagaagggtcagtaaaagaaatcaagcatagtcctgggcccacgagaacagtctccactggcacggcattgtctaaatataggagcagatctgcagatggggccaagaattacttcgaacatgaggagttaactgtgagccagctcctgctgtgcctaagggaagggaatcagaaggtggagagacttgaagttgcactcaaggaggccaaagaaagagtttcagattttgaaaagaaaacaagtaatcgttctgagattgaaacccagacagaggggagcacagagaaagagaatgatgaagagaaaggcccggagactgttggaagcgaagtggaagcactgaacctccaggtgacatctctgtttaaggagcttcaagaggctcatacaaaactcagcgaagctgagctaatgaagaagagacttcaagaaaagtgtcaggcccttgaaaggaaaaattctgcaattccatcagagttgaatgaaaagcaagagcttgtttatactaacaaaaagttagagctacaagtggaaagcatgctatcagaaatcaaaatggaacaggctaaaacagaggatgaaaagtccaaattaactgtgctacagatgacacacaacaagcttcttcaagaacataataatgcattgaaaacaattgaggaactaacaagaaaagagtcagaaaaagtggacagggcagtgctgaaggaactgagtgaaaaactggaactggcagagaaggctctggcttccaaacagctgcaaatggatgaaatgaagcaaaccattgccaagcaggaagaggacctggaaaccatgaccatcctcagggctcagatggaagtttactgttctgattttcatgctgaaagagcagcgagagagaaaattcatgaggaaaaggagcaactggcattgcagctggcagttctgctgaaagagaatgatgctttcgaagacggaggcaggcagtccttgatggagatgcagagtcgtcatggggcgagaacaagtgactctgaccagcaggcttaccttgttcaaagaggagctgaggacagggactggcggcaacagcggaatattccgattcattcctgccccaagtgtggagaggttctgcctgacatagacacgttacagattcacgtgatggattgcatcatttaagtgttgatgtatcacctccccaaaactgttggtaaatgtcagattttttcctccaagagttgtgcttttgtgttatttgttttcactcaaatattttgcctcattattcttgttttaaaagaaagaaaacaggccgggcacagtggctcatgcctgtaatcccagcactttgggaggtcgaggtgggtggatcacttggggtcagggtttgagaccagcctggccaacatggcggaaccctgtctctaccaaaattacaaaaattagccgagcatggtggcgcatgcctgtagtcgcagctactcgcgaggttgaggcaggagaattgcttgaacccaggaagtggcagttgcagtgagccgagacgacaccactgcactccagcctgggtgacagagggagactctgtctcgaaagaaagaaagaaaaaaaggaaggaaggagaaggaaggaaggagaagaaaaggtacctgttctacgtagaacacctttggtggagttccatcaactcgcaaagtagaatccttacctactactcttctgataataattttaatattttttatgtttggttgatgcgagcagctgcactgctcatgcagttagctagcatgtgacatcatgtgacaaagttcatgtaattagatggaagaaacctcactgattaattttaagaaccttttagggatgcaggaacaatgaagtggccacagtatgtgctgtttttgaagcatttttaaaaacgaattgtagttgtttttcttcatttaaaatggatctgttggaggttatgtgtgtatgttgtagttttattgcagccacaataattttaccaaagttttcacataggcagttagcctttacttaatatcaagacaagtgaaaaaatattggcatcgatgaaaccgataacattggcctcattggatttctttacccattcacagtgtaaagaagttaccttcatgctttcattgtacctgcaggcctgtgggcttgtacagtagataattaatttctaaaaagaacagctgcctattttcttcctaggttaggttatatcttcataatcacaagaattagtgatggcaaaataaaattttgcttatgaatcttttacattgtttatatatgattaatatcatcatatatattttctgtattaagctcatttggcttcatttaagctgtatacttagtcatatatctttcattagttctatggatatgagcagatccctttactggagcccagtatgtgctgtgtgagttagaagtcattcttgctgagaaggtgaataggtagggatttgccttgttttgtaagtctacaatttgccaagagtaaataacactggaccagctgtaaaagtaaacagtgtgtttatgcattgagatactaaagcatttaagaaaaaattaaaagatctcttttgtttaaaggtctacacaacacaccaccaaacgagacgcaatacaacatccacagatgtgaacacacccaaaaaaaacaattcccacaggagagagcgcgcgcaaaggggcaggaacacacagaggggggccgcgcacacgttgtggccccacaagaggggaaaaatgaaagcggaaacaggcaacagtatcctcgtagaaagtttccgccaa

SEQ ID NO: 445847 - DNA, 1998 bp, Homo sapiens
  misc_feature (1)..(1): n is a, c, g, or t
nctcaaggatccttaattttattaatccccccccccctttttcatgctgaaagagcagcgagagagaaaattcatgaggaaaaggagcaactggcattgcagctggcagttctgctgaaagagaatgatgctttcgaagacggaggcaggcagtccttgatggagatgcagagtcgtcatggggcgagaacaagtgactctgaccagcaggcttaccttgttcaaagaggagctgaggacagggactggcggcaacagcggaatattccgattcattcctgccccaagtgtggagaggttctgcctgacatagacacgttacagattcacgtgatggattgcatcatttaagtgttgatgtatcacctccccaaaactgttggtaaatgtcagattttttcctccaagagttgtgcttttgtgttatttgttttcactcaaatattttgcctcattattcttgttttaaaagaaagaaaacaggccgggcacagtggctcatgcctgtaatcccagcactttgggaggtcgaggtgggtggatcacttggggtcagggtttgagaccagcctggccaacatggcggaaccctgtctctaccaaaattacaaaaattagccgagcatggtggcgcatgcctgtagtcgcagctactcgcgaggttgaggcaggagaattgcttgaacccaggaagtggcagttgcagtgagccgagacgacaccactgcactccagcctgggtgacagagggagactctgtctcgaaagaaagaaagaaaaaaaggaaggaaggagaaggaaggaaggagaagaaaaggtacctgttctacgtagaacacctttggtggagttccatcaactcgcaaagtagaatccttacctactactcttctgataataattttaatattttttatgtttggttgatgcgagcagctgcactgctcatgcagttagctagcatgtgacatcatgtgacaaagttcatgtaattagatggaagaaacctcactgattaattttaagaaccttttagggatgcaggaacaatgaagtggccacagtatgtgctgtttttgaagcatttttaaaaacgaattgtagttgtttttcttcatttaaaatggatctgttggaggttatgtgtgtatgttgtagttttattgcagccacaataattttaccaaagttttcacataggcagttagcctttacttaatatcaagacaagtgaaaaaatattggcatcgatgaaaccgataacattggcctcattggatttctttacccattcacagtgtaaagaagttaccttcatgctttcattgtacctgcaggcctgtgggcttgtacagtagataattaatttctaaaaagaacagctgcctattttcttcctaggttaggttatatcttcataatcacaagaattagtgatggcaaaataaaattttgcttatgaatcttttacattgtttatatatgattaatatcatcatatatattttctgtattaagctcatttggcttcatttaagctgtatacttagtcatatatctttcattagttctatggatatgagcagatccctttactggagcccagtatgtgctgtgtgagttagaagtcattcttgctgagaaggtgaataggtagggatttgccttgttttgtaagtctacaatttgccaagagtaaataacactggaccagctgtaaaagtaaacagtgtgtttatgcattgagatactaaagcatttaagaaaaaattaaaagatctcttttgtttaaaggtctacacaacacaccaccaaacgagacgcaatacaacatccacagatgtgaacacacccaaaaaaaacaattcccacaggagagagcgcgcgcaaaggggcaggaacacacagaggggggccgcgcacacgttgtggccccacaagaggggaaaaatgaaagcggaaacaggcaacagtatcctcgtagaaagtttccgccaa

SEQ ID NO: 445848 - DNA, 1649 bp, Homo sapiens
atgggatgggcggggccgggaaattccccggcgcgggcagggagcggctggctgtcagctgagccgcgctgggcggggtcgccaggccgcgcatcagccctaggcaccccagtcccggctgccccctccgtgggcggggtcgccaggccgcgcatcagccctaggcaccccagtcccggctgccccctccgccaccgccgccgcccgccggcaggttccctggtcagcgtcccatcccggtcgggagttctctccaggcggcacgatgccgaggaaacagtgaccctgagcgaagccaagccgggcggcaggaacttctgcaatgtcccatcaacctctcagctgcctcactgaaaaggaggacagccccagtgaaagcacaggaaatggacccccccacctggcccacccaaacctggacacgtttaccccggaggagctgctgcagcagatgaaagagctcctgaccgagaaccaccagctgaaagaagccatgaagctaaataatcaagccatgaaagggagatttgaggagctttcggcctggacagagaaacagaaggaagaacgccagttttttgagatacagagcaaagaagcaaaagagcgtctaatggccttgagtcatgagaatgagaaattgaaggaagagcttggaaaactaaaagggaaatcagaaaggtcatctgaggaccccactgatgactccaggcttcccagggccgaagcggagcaggaaaaggaccagctcaggacccaggtggtgaggctacaagcagagaaggcagacctgttgggcatcgtgtctgaactgcagctcaagctgaactccagcggctcctcagaagattcctttgttgaaattaggatggctgaaggagaagcagaagggtcagtaaaagaaatcaagcatagtcctgggcccacgagaacagtctccactggcacggcattgtctaaatataggagcagatctgcagatggggccaagaattacttcgaacatgaggagttaactgtgagccagctcctgctgtgcctaagggaagggaatcagaaggtggagagacttgaagttgcactcaaggaggccaaagaaagagtttcagattttgaaaagaaaacaagtaatcgttctgagattgaaacccagacagaggggagcacagagaaagagaatgatgaagagaaaggcccggagactgttggaagcgaagtggaagcactgaacctccaggtgacatctctgtttaaggagcttcaagaggctcatacaaaactcagcgaagctgagctaatgaagaagagacttcaagaaaagtaagaatgagagagcaattttatcctcctttgaaatatacatttttacaaagtatactactatataaaaacatagttttttaactatgttatgactaaaagaaaaatagacacctaattaaaatataaattcagaatatactaatgttccagttaatgtgtgagcatgaaatacttgtaagatggggggttggggactggagaactttaattctgccatttaggggcatttgttaaatgtacgagcctgggtaagatctctacagtaaagctgtgagctagttttcctgttactgacttaagctgatgacattgatgtgagtaagcat

SEQ ID NO: 445849 - DNA, 293 bp, Homo sapiens
ttgaatacgaagttgaactgatgttaaaactcgccatctgttcttcaagtgaaacaaacacaactgcctgcaaaatggaactaatggaattatcatacttattcccaggagctgaggacagggactggcggcaacagcggaatattccgattcattcctgccccaagtgtggagaggttctgcctgacatagacacgttacagattcacgtgatggattgcatcatttaagtgttgatgtatcacctccccaaaactgttggtaaatgtcagattttttcctccaagagttgt

SEQ ID NO: 445850 - DNA, 283 bp, Homo sapiens
ggatccggttgcagtgagccgagatcgcgccattgcagtctaacctgggcaacaagagcaagactcaggctcaaaaaaaaaggagatcctgtcattggtaacaacataaatgttgttgcattcactatgcaatgttgtttcactatgttaagtgaaataagccaggcacagaaagacaaactttgaatgttcttatttctgggagataaaaagtaaagcaattgaactcatggacacagaaaaggatggttaccagaggctgtgaagggtaagggggtagtga

SEQ ID NO: 445851 - DNA, 4606 bp, Homo sapiens
  misc_feature (2395)..(2395): n is a, c, g, or t
  misc_feature (2430)..(2430): n is a, c, g, or t
  misc_feature (2595)..(2596): n is a, c, g, or t
  misc_feature (2982)..(2982): n is a, c, g, or t
  misc_feature (3347)..(3348): n is a, c, g, or t
  misc_feature (3544)..(3544): n is a, c, g, or t
  misc_feature (4157)..(4157): n is a, c, g, or t
gcctcgccaccagaggtttcccagagaggaaggcgtggctccctcccgggccagtgagccctggcgccgccgcggccgcggtcccagcagcggagtagggcggcggctgcgccccgcaccatggggggcagcccagccccagccgcggtaaacgccgacctccgccgccgcccgcgccgcgtctgccccctcccgctgcggctctctggacgccatcccctcctcacctcgaagccaacatgaaggagacccggggctacggaggggatgcccccttctgcacccgcctcaaccactcctacacaggcatgtgggcgcccgagcgttccgccgaggcgcggggcaacctcacgcgccctccagggtctggcgaggattgcggatcggtgtccgtggccttcccgatcaccatgctgctcactggtttcgtgggcaacgcactggccatgctgctcgtgtcgcgcagctaccggcgccgggagagcaagcgcaagaagtccttcctgctgtgcatcggctggctggcgctcaccgacctggtcgggcagcttctcaccaccccggtcgtcatcgtcgtgtacctgtccaagcagcgttgggagcacatcgacccgtcggggcggctctgcacctttttcgggctgaccatgactgttttcgggctctcctcgttgttcatcgccagcgccatggccgtcgagcgggcgctggccatcagggcgccgcactggtatgcgagccacatgaagacgcgtgccacccgcgctgtgctgctcggcgtgtggctggccgtgctcgccttcgccctgctgccggtgctgggcgtgggccagtacaccgtccagtggcccgggacgtggtgcttcatcagcaccgggcgagggggcaacgggactagctcttcgcataactggggcaaccttttcttcgcctctgcctttgccttcctggggctcttggcgctgacagtcaccttttcctgcaacctggccaccattaaggccctggtgtcccgctgccgggccaaggccacggcatctcagtccagtgcccagtggggccgcatcacgaccgagacggccattcagcttatggggatcatgtgcgtgctgtcggtctgctggtctccgctcctgataatgatgttgaaaatgatcttcaatcagacatcagttgagcactgcaagacacacacggagaagcagaaagaatgcaacttcttcttaatagctgttcgcctggcttcactgaaccagatcttggatccttgggtttacctgctgttaagaaagatccttcttcgaaagttttgccaggtagcaaatgctgtctccagctgctctaatgatggacagaaagggcagcctatctcattatctaatgaaataatacagacagaagcatgaaagaaaacacttaacttgcatgtgcacagcttttggtaacaaatatcgctaaaccttactgtgaatttaggcatctctggcatgccactgtttatgcattgaagtggaatttttggtataaagctaaatggtcttagaagcatagaaaatccctatgtgccaaaagtagtgaaacacaaacaaaggaaaatatattaataacagtctagtgtttttgttgagtctgccattcgtagctgaatatgtgattaattatgtgatgaaaacattttttataaatgatcttggtctattggggagcggggatagttaatattccagtacactgaatacatgaggaatttaaccacatacatcattgaagacaagggatagcagtttgtttttattcaaagacattgctgtgttctctttcattgcctctctcgctttctgtcacttttttcctccttacattaaagaaaagtttaattacagttaaaaatgtataatgtatttataatattcatcgataccattattcaaatattgctcaatacagcaaattagctcctaacctaacaaagtttaagtttacttggattgataattaggtttactctttatctgaataagaaccaattccatttgtttgaaatatggagtttgtgactacccaaattgctaattattctttcttttgaatatattttacatttctatgagcctaaggaagattcatgaaactgacctatgagagtcgtgaagtggtttttcagaatgctatgtaaggaccgatttgagcactaactataggtactctgaatatatatttcccttgattattcaccaaaagtgttccccagtctttgactctttaaattccaatactgattccaaaacaaataaatattttgaagactcaatgaatactttccatattttggcctatttatataagaaagttaataacattgacccttcacagctcttctgcctgctcctcaagnggctctatctaatatttattactaaaatgtttttnctacagtctacatgaatacaaacctcaatagctaagcttgacgtatttgtgcacaagtagatcactacattaagttttgggaattgcacttcttaaaaatgtctccccaccaaacatagtaatcctgtagttatgcctacacaaagcttgccatattctttggtnnattcattttgtaaacccattaactttttattgtgaagattttcatttgcagtttcttgcactgcttttctagttttttaaaagcttgagatttatttatacttcttgtagtaactgcatatttctgtgtgtgtttagtggtaaagaattaattttgataggtacaatatgtctatcagattgatatatacaccagcctatgtcaattggggctaattattttaaatgaccatgtcaaattgaatttggagacaaaatctgttgagagtgcttatgtaattaatgatggttctactaactaaattttggaaaaggtgataaatagactatactaaaatctctctatgccatagaattggattatcctgtaggtcatctcattgggtntaagacaaaactacctactttttttcaaaagtgcactgaaatcacataataaagaggctttacctcttggttggtcctgtgaccctaagttctagtcagatagacacagaggcaatgtgaatttgagtggcatgagcatgattaggttattccttccagcatctagtatagcacctggaatatagaaactgtctaatacatatttattcagtgaatcaatgagcagaagtttgccaggacagtacacattggcaaggcacataccatatgattgaagtgcttcatgccattacagtccatcaggctgataaagtgaattatttctgattatttaattacagaaatatgaatttatcttcaagggnntagtgtcatactgctgtacaacacagtgctttatttatactaataatttaggagactgatacttccaaatgatagtggacattactatcacaagaatatcacttttcatcaaactgcaaaaatacagaaaggcaaaaaacctgacacttattcttaactgcaaattaaattcctgcccaggggatatattttaggnggggatgaatggcagcttttgtgttttttttaacaagcttgaaagggggtggaaaacaaagaaattatgtaaatggcatatgagttttattatctaggcattcgttagtatggggaaacctgataagaaatgaaaatcccaaatgatttcagccttttcatgatggttgaggttagatttcagagatgtacagagactagagcggtggttagaaagaggatatatgtagtcacagcagaaagacgtgtctaagtttaattttattggctttcaagttcactcatgtatacttagtttgtccatacatatgtctaatcaggaaaaatgcatgtatagattatgacaattcctgaattttgaagtattggttaaaagacaattaaaggccaagaaaaccatggtggaagaagtaagcgaatgaaatgtagaaatatatgtaaaattagcaagtgtcaattttaccaagtagtgttgattttccaaacaatgaatttatatactatgctgagtcacagagaagaatgatcacatgttacttaatgagagcagtttacttttcaaataaaataggtatgatgaatgtcttaaaaatatcttgaagttgaagaaacanaaatgagttatctcaatatttaccaagttaacctagtgctgtatatatcccaagatattttaggtaaatgtaagtgtttaatcatgccagatttaaactagtctgaaatatagggtatacatatatttctacttacatttctttattttatgaaatatccgaccatgttgcagaaaataatgcaaaacctcatgtaagttaactatgaaagatcctgtgagcacattggcattgagtgacagacaaactaaaaactggcaaacagtattttaataagggggtcactctgtggcagtattctaatattggattttcaagtagattaggctttttatttattcaacgctttttataattttgttctttttgactccaaattattggtcagctttcaaccttctccacatcagcaatcactaatagttcttttggttgagatcaactcagaa

SEQ ID NO: 445852 - DNA, 1839 bp, Homo sapiens
gcctcgccaccagaggtttcccagagaggaaggcgtggctccctcccgggccagtgagccctggcgccgccgcggccgcggtcccagcagcggagtagggcggcggctgcgccccgcaccatggggggcagcccagccccagccgcggtaaacgccgacctccgccgccgcccgcgccgcgtctgccccctcccgctgcggctctctggacgccatcccctcctcacctcgaagccaacatgaaggagacccggggctacggaggggatgcccccttctgcacccgcctcaaccactcctacacaggcatgtgggcgcccgagcgttccgccgaggcgcggggcaacctcacgcgccctccagggtctggcgaggattgcggatcggtgtccgtggccttcccgatcaccatgctgctcactggtttcgtgggcaacgcactggccatgctgctcgtgtcgcgcagctaccggcgccgggagagcaagcgcaagaagtccttcctgctgtgcatcggctggctggcgctcaccgacctggtcgggcagcttctcaccaccccggtcgtcatcgtcgtgtacctgtccaagcagcgttgggagcacatcgacccgtcggggcggctctgcacctttttcgggctgaccatgactgttttcgggctctcctcgttgttcatcgccagcgccatggccgtcgagcgggcgctggccatcagggcgccgcactggtatgcgagccacatgaagacgcgtgccacccgcgctgtgctgctcggcgtgtggctggccgtgctcgccttcgccctgctgccggtgctgggcgtgggccagtacaccgtccagtggcccgggacgtggtgcttcatcagcaccgggcgagggggcaacgggactagctcttcgcataactggggcaaccttttcttcgcctctgcctttgccttcctggggctcttggcgctgacagtcaccttttcctgcaacctggccaccattaaggccctggtgtcccgctgccgggccaaggccacggcatctcagtccagtgcccagtggggccgcatcacgaccgagacggccattcagcttatggggatcatgtgcgtgctgtcggtctgctggtctccgctcctgataatgatgttgaaaatgatcttcaatcagacatcagttgagcactgcaagacacacacggagaagcagaaagaatgcaacttcttcttaatagctgttcgcctggcttcactgaaccagatcttggatccttgggtttacctgctgttaagaaagatccttcttcgaaagttttgccaggaggaattttggggaaattaaaacctgcctttctgccaggatcacatcactggaagctccatgactctctttttgtaaaagaaaaaaaaatcacagaaacacccacctcccaaactattctcttttacttcttcccccaagcccacccccaaatataactgttatccagaagctgttatgtcctgtttccatacatgtttttgtacttttactatatctacatacatcaattaaacttatgtcctattgttttgtgaatttatatttgcgtatacattatcatatgtaaaatttgcatttttttattgaaaattatgtttcttgagatttatccacattgaaacatggagctctaaatcgttaattttaaccgctatagagtattccataatttgaataaagcataatttgtttgtacaatctcccgccaagggaaaattatttccacactcatcatgacaaggagcactgcaaaaataaaaataaaaattacattcatacatgtttaactgcacccatctgc

SEQ ID NO: 445853 - DNA, 1866 bp, Homo sapiens
gcctcgccaccagaggtttcccagagaggaaggcgtggctccctcccgggccagtgagccctggcgccgccgcggccgcggtcccagcagcggagtagggcggcggctgcgccccgcaccatggggggcagcccagccccagccgcggtaaacgccgacctccgccgccgcccgcgccgcgtctgccccctcccgctgcggctctctggacgccatcccctcctcacctcgaagccaacatgaaggagacccggggctacggaggggatgcccccttctgcacccgcctcaaccactcctacacaggcatgtgggcgcccgagcgttccgccgaggcgcggggcaacctcacgcgccctccagggtctggcgaggattgcggatcggtgtccgtggccttcccgatcaccatgctgctcactggtttcgtgggcaacgcactggccatgctgctcgtgtcgcgcagctaccggcgccgggagagcaagcgcaagaagtccttcctgctgtgcatcggctggctggcgctcaccgacctggtcgggcagcttctcaccaccccggtcgtcatcgtcgtgtacctgtccaagcagcgttgggagcacatcgacccgtcggggcggctctgcacctttttcgggctgaccatgactgttttcgggctctcctcgttgttcatcgccagcgccatggccgtcgagcgggcgctggccatcagggcgccgcactggtatgcgagccacatgaagacgcgtgccacccgcgctgtgctgctcggcgtgtggctggccgtgctcgccttcgccctgctgccggtgctgggcgtgggccagtacaccgtccagtggcccgggacgtggtgcttcatcagcaccgggcgagggggcaacgggactagctcttcgcataactggggcaaccttttcttcgcctctgcctttgccttcctggggctcttggcgctgacagtcaccttttcctgcaacctggccaccattaaggccctggtgtcccgctgccgggccaaggccacggcatctcagtccagtgcccagtggggccgcatcacgaccgagacggccattcagcttatggggatcatgtgcgtgctgtcggtctgctggtctccgctcctgataatgatgttgaaaatgatcttcaatcagacatcagttgagcactgcaagacacacacggagaagcagaaagaatgcaacttcttcttaatagctgttcgcctggcttcactgaaccagatcttggatccttgggtttacctgctgttaagaaagatccttcttcgaaagttttgccagatgagaaaaagaagactcagagagcaagaggaattttggggaaattaaaacctgcctttctgccaggatcacatcactggaagctccatgactctctttttgtaaaagaaaaaaaaatcacagaaacacccacctcccaaactattctcttttacttcttcccccaagcccacccccaaatataactgttatccagaagctgttatgtcctgtttccatacatgtttttgtacttttactatatctacatacatcaattaaacttatgtcctattgttttgtgaatttatatttgcgtatacattatcatatgtaaaatttgcatttttttattgaaaattatgtttcttgagatttatccacattgaaacatggagctctaaatcgttaattttaaccgctatagagtattccataatttgaataaagcataatttgtttgtacaatctcccgccaagggaaaattatttccacactcatcatgacaaggagcactgcaaaaataaaaataaaaattacattcatacatgtttaactgcacccatctgc

SEQ ID NO: 445854 - DNA, 2035 bp, Homo sapiens
gcctcgccaccagaggtttcccagagaggaaggcgtggctccctcccgggccagtgagccctggcgccgccgcggccgcggtcccagcagcggagtagggcggcggctgcgccccgcaccatggggggcagcccagccccagccgcggtaaacgccgacctccgccgccgcccgcgccgcgtctgccccctcccgctgcggctctctggacgccatcccctcctcacctcgaagccaacatgaaggagacccggggctacggaggggatgcccccttctgcacccgcctcaaccactcctacacaggcatgtgggcgcccgagcgttccgccgaggcgcggggcaacctcacgcgccctccagggtctggcgaggattgcggatcggtgtccgtggccttcccgatcaccatgctgctcactggtttcgtgggcaacgcactggccatgctgctcgtgtcgcgcagctaccggcgccgggagagcaagcgcaagaagtccttcctgctgtgcatcggctggctggcgctcaccgacctggtcgggcagcttctcaccaccccggtcgtcatcgtcgtgtacctgtccaagcagcgttgggagcacatcgacccgtcggggcggctctgcacctttttcgggctgaccatgactgttttcgggctctcctcgttgttcatcgccagcgccatggccgtcgagcgggcgctggccatcagggcgccgcactggtatgcgagccacatgaagacgcgtgccacccgcgctgtgctgctcggcgtgtggctggccgtgctcgccttcgccctgctgccggtgctgggcgtgggccagtacaccgtccagtggcccgggacgtggtgcttcatcagcaccgggcgagggggcaacgggactagctcttcgcataactggggcaaccttttcttcgcctctgcctttgccttcctggggctcttggcgctgacagtcaccttttcctgcaacctggccaccattaaggccctggtgtcccgctgccgggccaaggccacggcatctcagtccagtgcccagtggggccgcatcacgaccgagacggccattcagcttatggggatcatgtgcgtgctgtcggtctgctggtctccgctcctgataatgatgttgaaaatgatcttcaatcagacatcagttgagcactgcaagacacacacggagaagcagaaagaatgcaacttcttcttaatagctgttcgcctggcttcactgaaccagatcttggatccttgggtttacctgctgttaagaaagatccttcttcgaaagttttgccagatgagaaaaagaagactcagagagcaagagatggggcctgatggaaggtgtttttgtcatgcatggaggcaggtccccaggacttggtgcagttctcatgatagagaaccctgcagtgtccagctaagctgatgacttgaagataaatctgcctaaccctgggatgaagtatctgtgaactattttgacagcagatgaggaattttggggaaattaaaacctgcctttctgccaggatcacatcactggaagctccatgactctctttttgtaaaagaaaaaaaaatcacagaaacacccacctcccaaactattctcttttacttcttcccccaagcccacccccaaatataactgttatccagaagctgttatgtcctgtttccatacatgtttttgtacttttactatatctacatacatcaattaaacttatgtcctattgttttgtgaatttatatttgcgtatacattatcatatgtaaaatttgcatttttttattgaaaattatgtttcttgagatttatccacattgaaacatggagctctaaatcgttaattttaaccgctatagagtattccataatttgaataaagcataatttgtttgtacaatctcccgccaagggaaaattatttccacactcatcatgacaaggagcactgcaaaaataaaaataaaaattacattcatacatgtttaactgcacccatctgc

SEQ ID NO: 445855 - DNA, 2008 bp, Homo sapiens
gcctcgccaccagaggtttcccagagaggaaggcgtggctccctcccgggccagtgagccctggcgccgccgcggccgcggtcccagcagcggagtagggcggcggctgcgccccgcaccatggggggcagcccagccccagccgcggtaaacgccgacctccgccgccgcccgcgccgcgtctgccccctcccgctgcggctctctggacgccatcccctcctcacctcgaagccaacatgaaggagacccggggctacggaggggatgcccccttctgcacccgcctcaaccactcctacacaggcatgtgggcgcccgagcgttccgccgaggcgcggggcaacctcacgcgccctccagggtctggcgaggattgcggatcggtgtccgtggccttcccgatcaccatgctgctcactggtttcgtgggcaacgcactggccatgctgctcgtgtcgcgcagctaccggcgccgggagagcaagcgcaagaagtccttcctgctgtgcatcggctggctggcgctcaccgacctggtcgggcagcttctcaccaccccggtcgtcatcgtcgtgtacctgtccaagcagcgttgggagcacatcgacccgtcggggcggctctgcacctttttcgggctgaccatgactgttttcgggctctcctcgttgttcatcgccagcgccatggccgtcgagcgggcgctggccatcagggcgccgcactggtatgcgagccacatgaagacgcgtgccacccgcgctgtgctgctcggcgtgtggctggccgtgctcgccttcgccctgctgccggtgctgggcgtgggccagtacaccgtccagtggcccgggacgtggtgcttcatcagcaccgggcgagggggcaacgggactagctcttcgcataactggggcaaccttttcttcgcctctgcctttgccttcctggggctcttggcgctgacagtcaccttttcctgcaacctggccaccattaaggccctggtgtcccgctgccgggccaaggccacggcatctcagtccagtgcccagtggggccgcatcacgaccgagacggccattcagcttatggggatcatgtgcgtgctgtcggtctgctggtctccgctcctgataatgatgttgaaaatgatcttcaatcagacatcagttgagcactgcaagacacacacggagaagcagaaagaatgcaacttcttcttaatagctgttcgcctggcttcactgaaccagatcttggatccttgggtttacctgctgttaagaaagatccttcttcgaaagttttgccaggagatggggcctgatggaaggtgtttttgtcatgcatggaggcaggtccccaggacttggtgcagttctcatgatagagaaccctgcagtgtccagctaagctgatgacttgaagataaatctgcctaaccctgggatgaagtatctgtgaactattttgacagcagatgaggaattttggggaaattaaaacctgcctttctgccaggatcacatcactggaagctccatgactctctttttgtaaaagaaaaaaaaatcacagaaacacccacctcccaaactattctcttttacttcttcccccaagcccacccccaaatataactgttatccagaagctgttatgtcctgtttccatacatgtttttgtacttttactatatctacatacatcaattaaacttatgtcctattgttttgtgaatttatatttgcgtatacattatcatatgtaaaatttgcatttttttattgaaaattatgtttcttgagatttatccacattgaaacatggagctctaaatcgttaattttaaccgctatagagtattccataatttgaataaagcataatttgtttgtacaatctcccgccaagggaaaattatttccacactcatcatgacaaggagcactgcaaaaataaaaataaaaattacattcatacatgtttaactgcacccatctgc

SEQ ID NO: 445856 - DNA, 2297 bp, Homo sapiens
  misc_feature (1609)..(1609): n is a, c, g, or t
gcctcgccaccagaggtttcccagagaggaaggcgtggctccctcccgggccagtgagccctggcgccgccgcggccgcggtcccagcagcggagtagggcggcggctgcgccccgcaccatggggggcagcccagccccagccgcggtaaacgccgacctccgccgccgcccgcgccgcgtctgccccctcccgctgcggctctctggacgccatcccctcctcacctcgaagccaacatgaaggagacccggggctacggaggggatgcccccttctgcacccgcctcaaccactcctacacaggcatgtgggcgcccgagcgttccgccgaggcgcggggcaacctcacgcgccctccagggtctggcgaggattgcggatcggtgtccgtggccttcccgatcaccatgctgctcactggtttcgtgggcaacgcactggccatgctgctcgtgtcgcgcagctaccggcgccgggagagcaagcgcaagaagtccttcctgctgtgcatcggctggctggcgctcaccgacctggtcgggcagcttctcaccaccccggtcgtcatcgtcgtgtacctgtccaagcagcgttgggagcacatcgacccgtcggggcggctctgcacctttttcgggctgaccatgactgttttcgggctctcctcgttgttcatcgccagcgccatggccgtcgagcgggcgctggccatcagggcgccgcactggtatgcgagccacatgaagacgcgtgccacccgcgctgtgctgctcggcgtgtggctggccgtgctcgccttcgccctgctgccggtgctgggcgtgggccagtacaccgtccagtggcccgggacgtggtgcttcatcagcaccgggcgagggggcaacgggactagctcttcgcataactggggcaaccttttcttcgcctctgcctttgccttcctggggctcttggcgctgacagtcaccttttcctgcaacctggccaccattaaggccctggtgtcccgctgccgggccaaggccacggcatctcagtccagtgcccagtggggccgcatcacgaccgagacggccattcagcttatggggatcatgtgcgtgctgtcggtctgctggtctccgctcctgataatgatgttgaaaatgatcttcaatcagacatcagttgagcactgcaagacacacacggagaagcagaaagaatgcaacttcttcttaatagctgttcgcctggcttcactgaaccagatcttggatccttgggtttacctgctgttaagaaagatccttcttcgaaagttttgccagatcaggtaccacacaaacaactatgcatccagctccacctccttaccctgccagtgttcctcaaccttgatgtggagcgaccatttggaaagatgagaaaaagaagactcagagagcaattctggaggccggcaagttcaggatcagggtgccagcagattcggtgtctgactggagtgcagtggagtgatttccgctcactgcaaccttcacctcctccactcactgcaatcttcgcctcctgggttcaagtgattctcctgcctcagcctcccaagtagctggaattgcangatgcgccacaagcctggctaatttttgcatttttagtagagatgagtttcaccatgtttgccaggctggtcttgaacacctgacctcaagtaacccacccaccttggcctcccaaagagctgggattacaggcatgagccaacgtgcctggccatgttctgatcgtttaatgatagcaacatttagtattatagagcatgaaaatgtcaaagtcgcaactctaaaatgtttttatttagaaatatgtgcctattagaattttagttactagaattatttaagaaaattggacgttttataataacaggtcaacattgtaattccaagctaaaatgggtgagtaattgctttaggcttgtaatttcagattaaaatcttacttgtaacatttaagagaacttcaggttcatcatacctataaatttaatttattaggcttataagagtgacttaagttcttgggaagtttcttaagtcacctaattggtatacttcaaaagaaaacagaaatatgttacattaataaatgtgcttaaatatttaaggaatttaattaagttgtgaaatcttccttcaaagtaattataaaatttgctatgtttatgaatgtgttaataagatttataaactaacctaaaagcttaagaagaacaagagtttaaataaattgaatactaattttgtacc

SEQ ID NO: 445857 - DNA, 834 bp, Homo sapiens
cactgggcattctcacatgtcttaccatgtttccacccaaggaatataggatcttcttcttttagtagatgtttgtagaaaaattttttacaccccgagtttgtggcatacataggttgtccctattcatttttcactattactgtcacacaacttcgttcttgttcttgttcttgttatactgctgtaagtgatttaccattcctgttcataatctgaaatttatgagaatttattgcctttgatttttatttaagatattaacagtgcatttattattggctatcctaattgatttgtttgttttccaggaggaattttggggaaattaaaacctgcctttctgccaggatcacatcactggaagctccatgactctctttttgtaaaagaaaaaaaaatcacagaaacacccacctcccaaactattctcttttacttcttcccccaagcccacccccaaatataactgttatccagaagctgttatgtcctgtttccatacatgtttttgtacttttactatatctacatacatcaattaaacttatgtcctattgttttgtgaatttatatttgcgtatacattatcatatgtaaaatttgcatttttttattgaaaattatgtttcttgagatttatccacattgaaacatggagctctaaatcgttaattttaaccgctatagagtattccataatttgaataaagcataatttgtttgtacaatctcccgccaagggaaaattatttccacactcatcatgacaaggagcactgcaaaaataaaaataaaaattacattcatacatgtttaactgcacccatctgc

SEQ ID NO: 445858 - DNA, 816 bp, Homo sapiens
cttccttaggtggagctggaaaggtggaggcggaagtgactgatcaattcaggggcgtggggttcgtttaggttttgccctgtgtatgacctcgtttggagccatgaaaccagataatgatgttgaaaatgatcttcaatcagacatcagttgagcactgcaagacacacacggagaagcagaaagaatgcaacttcttcttaatagctgttcgcctggcttcactgaaccagatcttggatccttgggtttacctgctgttaagaaagatccttcttcgaaagttttgccaggaggaattttggggaaattaaaacctgcctttctgccaggatcacatcactggaagctccatgactctctttttgtaaaagaaaaaaaaatcacagaaacacccacctcccaaactattctcttttacttcttcccccaagcccacccccaaatataactgttatccagaagctgttatgtcctgtttccatacatgtttttgtacttttactatatctacatacatcaattaaacttatgtcctattgttttgtgaatttatatttgcgtatacattatcatatgtaaaatttgcatttttttattgaaaattatgtttcttgagatttatccacattgaaacatggagctctaaatcgttaattttaaccgctatagagtattccataatttgaataaagcataatttgtttgtacaatctcccgccaagggaaaattatttccacactcatcatgacaaggagcactgcaaaaataaaaataaaaattacattcatacatgtttaactgcacccatctgc

SEQ ID NO: 445859 - DNA, 1942 bp, Homo sapiens
gcctcgccaccagaggtttcccagagaggaaggcgtggctccctcccgggccagtgagccctggcgccgccgcggccgcggtcccagcagcggagtagggcggcggctgcgccccgcaccatggggggcagcccagccccagccgcggtaaacgccgacctccgccgccgcccgcgccgcgtctgccccctcccgctgcggctctctggacgccatcccctcctcacctcgaagccaacatgaaggagacccggggctacggaggggatgcccccttctgcacccgcctcaaccactcctacacaggcatgtgggcgcccgagcgttccgccgaggcgcggggcaacctcacgcgccctccagggtctggcgaggattgcggatcggtgtccgtggccttcccgatcaccatgctgctcactggtttcgtgggcaacgcactggccatgctgctcgtgtcgcgcagctaccggcgccgggagagcaagcgcaagaagtccttcctgctgtgcatcggctggctggcgctcaccgacctggtcgggcagcttctcaccaccccggtcgtcatcgtcgtgtacctgtccaagcagcgttgggagcacatcgacccgtcggggcggctctgcacctttttcgggctgaccatgactgttttcgggctctcctcgttgttcatcgccagcgccatggccgtcgagcgggcgctggccatcagggcgccgcactggtatgcgagccacatgaagacgcgtgccacccgcgctgtgctgctcggcgtgtggctggccgtgctcgccttcgccctgctgccggtgctgggcgtgggccagtacaccgtccagtggcccgggacgtggtgcttcatcagcaccgggcgagggggcaacgggactagctcttcgcataactggggcaaccttttcttcgcctctgcctttgccttcctggggctcttggcgctgacagtcaccttttcctgcaacctggccaccattaaggccctggtgtcccgctgccgggccaaggccacggcatctcagtccagtgcccagtggggccgcatcacgaccgagacggccattcagcttatggggatcatgtgcgtgctgtcggtctgctggtctccgctcctgataatgatgttgaaaatgatcttcaatcagacatcagttgagcactgcaagacacacacggagaagcagaaagaatgcaacttcttcttaatagctgttcgcctggcttcactgaaccagatcttggatccttgggtttacctgctgttaagaaagatccttcttcgaaagttttgccagatgagaaaaagaagactcagagagcaagagatggggcctgatggaaggtgtttttgtcatgcatggaggcaggtccccaggacttggtgcagttctcatgatagaggaattttggggaaattaaaacctgcctttctgccaggatcacatcactggaagctccatgactctctttttgtaaaagaaaaaaaaatcacagaaacacccacctcccaaactattctcttttacttcttcccccaagcccacccccaaatataactgttatccagaagctgttatgtcctgtttccatacatgtttttgtacttttactatatctacatacatcaattaaacttatgtcctattgttttgtgaatttatatttgcgtatacattatcatatgtaaaatttgcatttttttattgaaaattatgtttcttgagatttatccacattgaaacatggagctctaaatcgttaattttaaccgctatagagtattccataatttgaataaagcataatttgtttgtacaatctcccgccaagggaaaattatttccacactcatcatgacaaggagcactgcaaaaataaaaataaaaattacattcatacatgtttaactgcacccatctgc

SEQ ID NO: 445860 - DNA, 1917 bp, Homo sapiens
gcctcgccaccagaggtttcccagagaggaaggcgtggctccctcccgggccagtgagccctggcgccgccgcggccgcggtcccagcagcggagtagggcggcggctgcgccccgcaccatggggggcagcccagccccagccgcggtaaacgccgacctccgccgccgcccgcgccgcgtctgccccctcccgctgcggctctctggacgccatcccctcctcacctcgaagccaacatgaaggagacccggggctacggaggggatgcccccttctgcacccgcctcaaccactcctacacaggcatgtgggcgcccgagcgttccgccgaggcgcggggcaacctcacgcgccctccagggtctggcgaggattgcggatcggtgtccgtggccttcccgatcaccatgctgctcactggtttcgtgggcaacgcactggccatgctgctcgtgtcgcgcagctaccggcgccgggagagcaagcgcaagaagtccttcctgctgtgcatcggctggctggcgctcaccgacctggtcgggcagcttctcaccaccccggtcgtcatcgtcgtgtacctgtccaagcagcgttgggagcacatcgacccgtcggggcggctctgcacctttttcgggctgaccatgactgttttcgggctctcctcgttgttcatcgccagcgccatggccgtcgagcgggcgctggccatcagggcgccgcactggtatgcgagccacatgaagacgcgtgccacccgcgctgtgctgctcggcgtgtggctggccgtgctcgccttcgccctgctgccggtgctgggcgtgggccagtacaccgtccagtggcccgggacgtggtgcttcatcagcaccgggcgagggggcaacgggactagctcttcgcataactggggcaaccttttcttcgcctctgcctttgccttcctggggctcttggcgctgacagtcaccttttcctgcaacctggccaccattaaggccctggtgtcccgctgccgggccaaggccacggcatctcagtccagtgcccagtggggccgcatcacgaccgagacggccattcagcttatggggatcatgtgcgtgctgtcggtctgctggtctccgctcctgataatgatgttgaaaatgatcttcaatcagacatcagttgagcactgcaagacacacacggagaagcagaaagaatgcaacttcttcttaatagctgttcgcctggcttcactgaaccagatcttggatccttgggtttacctgctgttaagaaagatccttcttcgaaagttttgccagatgagaaaaagaagactcagagagcaattctggaggccggcaagttcaggatcagggtgccagcagattcggtgtctggaggaattttggggaaattaaaacctgcctttctgccaggatcacatcactggaagctccatgactctctttttgtaaaagaaaaaaaaatcacagaaacacccacctcccaaactattctcttttacttcttcccccaagcccacccccaaatataactgttatccagaagctgttatgtcctgtttccatacatgtttttgtacttttactatatctacatacatcaattaaacttatgtcctattgttttgtgaatttatatttgcgtatacattatcatatgtaaaatttgcatttttttattgaaaattatgtttcttgagatttatccacattgaaacatggagctctaaatcgttaattttaaccgctatagagtattccataatttgaataaagcataatttgtttgtacaatctcccgccaagggaaaattatttccacactcatcatgacaaggagcactgcaaaaataaaaataaaaattacattcatacatgtttaactgcacccatctgc

SEQ ID NO: 445861 - DNA, 722 bp, Homo sapiens
tgggagcacatcgacccgtcggggcggctctgcacctttttcgggctgaccatgactgttttcgggctctcctcgttgttcatcgccagcgccatggccgtcgagcgggcgctggccatcagggcgccgcactggtatgcgagccacatgaagacgcgtgccacccgcgctgtgctgctcggcgtgtggctggccgtgctcgccttcgccctgctgccggtgctgggcgtgggccagtacaccgtccagtggcccgggacgtggtgcttcatcagcaccgggcgagggggcaacgggactagctcttcgcataactggggcaaccttttcttcgcctctgcctttgccttcctggggctcttggcgctgacagtcaccttttcctgcaacctggccaccattaaggccctggtgtcccgctgccgggccaaggccacggcatctcagtccagtgcccagtggggccgcatcacgaccgagacggccattcagcttatggggatcatgtgcgtgctgtcggtctgctggtctccgctcctggtaggtagttccagggttgggggaagtcaggatgcgtgtgcgagtaagcgggaacctaagactttgctaagtggcagcacccgcaggggtgtgtttgcaaccgcagagcgctgaagtgtcctttcctcctgcccgcgcggtcttggttacagcttcagagctgagctcctcacttactagct

SEQ ID NO: 445862 - DNA, 2382 bp, Homo sapiens
gcctcgccaccagaggtttcccagagaggaaggcgtggctccctcccgggccagtgagccctggcgccgccgcggccgcggtcccagcagcggagtagggcggcggctgcgccccgcaccatggggggcagcccagccccagccgcggtaaacgccgacctccgccgccgcccgcgccgcgtctgccccctcccgctgcggctctctggacgccatcccctcctcacctcgaagccaacatgaaggagacccggggctacggaggggatgcccccttctgcacccgcctcaaccactcctacacaggcatgtgggcgcccgagcgttccgccgaggcgcggggcaacctcacgcgccctccagggtctggcgaggattgcggatcggtgtccgtggccttcccgatcaccatgctgctcactggtttcgtgggcaacgcactggccatgctgctcgtgtcgcgcagctaccggcgccgggagagcaagcgcaagaagtccttcctgctgtgcatcggctggctggcgctcaccgacctggtcgggcagcttctcaccaccccggtcgtcatcgtcgtgtacctgtccaagcagcgttgggagcacatcgacccgtcggggcggctctgcacctttttcgggctgaccatgactgttttcgggctctcctcgttgttcatcgccagcgccatggccgtcgagcgggcgctggccatcagggcgccgcactggtatgcgagccacatgaagacgcgtgccacccgcgctgtgctgctcggcgtgtggctggccgtgctcgccttcgccctgctgccggtgctgggcgtgggccagtacaccgtccagtggcccgggacgtggtgcttcatcagcaccgggcgagggggcaacgggactagctcttcgcataactggggcaaccttttcttcgcctctgcctttgccttcctggggctcttggcgctgacagtcaccttttcctgcaacctggccaccattaaggccctggtgtcccgctgccgggccaaggccacggcatctcagtccagtgcccagtggggccgcatcacgaccgagacggccattcagcttatggggatcatgtgcgtgctgtcggtctgctggtctccgctcctgataatgatgttgaaaatgatcttcaatcagacatcagttgagcactgcaagacacacacggagaagcagaaagaatgcaacttcttcttaatagctgttcgcctggcttcactgaaccagatcttggatccttgggtttacctgctgttaagaaagatccttcttcgaaagttttgccagatcaggtaccacacaaacaactatgcatccagctccacctccttaccctgccagtgttcctcaaccttgatgtggagcgaccatttggaaagataatgaaagaacggagttggacattttattgcaattcctgcttccctgaatttgcatatttcttcccacctgagaaggataattatatattttaatttggattatttcttcatttttatctttttattttaatgattgttttgtcagtaatacccatggagatcaactttattattataatccatgcctctgaatattagattggtttcttggatgggattttgaatatgcatttaagaagttgggaagaatttcacagatgatgattggaggaaaagtgatgaaaagaaagacctgtgttccaggagttttctccaacttcaaacctttacgtgaatcttaaccaaagtggacatctttacatttcatgatagcttgcttttgcaatatgagtttgaaaaatcagtataagcttatgatggtgaaaagtcaacatattgagagtgataattcaattaataggatatgaacttaacgatataaaagataaacttaacgacatataaaagcaaatgagggcaggagggaatcgtgacaaaaaatatttgtgcccaattatgattaatgttttagagatgttgtgtccctgtgggcttagcatggaactaaaagttcctaagtctcaattctagttatgtgtcatttagtaactcaggaatctgcttaattgttatttctaagcttttgatgacaaaggagtgatgcagctaagggcatccttggagtgtcataaaaaacaaatttgaggttgaatgattagctgcgcagttagagtgataaaaaaatccaggtaggccttctgattcaccatgaccaagtcaggatttcttaatatttcttttctggcagcatatacaaaggcaaaattaataaataacagttgttgaataacaaactttattacgtttttataaaataaaagaatctattttgtctgtattaaaataaaaaactttgtggacttctaaaagat

SEQ ID NO: 445863 - DNA, 1958 bp, Homo sapiens
gcctcgccaccagaggtttcccagagaggaaggcgtggctccctcccgggccagtgagccctggcgccgccgcggccgcggtcccagcagcggagtagggcggcggctgcgccccgcaccatggggggcagcccagccccagccgcggtaaacgccgacctccgccgccgcccgcgccgcgtctgccccctcccgctgcggctctctggacgccatcccctcctcacctcgaagccaacatgaaggagacccggggctacggaggggatgcccccttctgcacccgcctcaaccactcctacacaggcatgtgggcgcccgagcgttccgccgaggcgcggggcaacctcacgcgccctccagggtctggcgaggattgcggatcggtgtccgtggccttcccgatcaccatgctgctcactggtttcgtgggcaacgcactggccatgctgctcgtgtcgcgcagctaccggcgccgggagagcaagcgcaagaagtccttcctgctgtgcatcggctggctggcgctcaccgacctggtcgggcagcttctcaccaccccggtcgtcatcgtcgtgtacctgtccaagcagcgttgggagcacatcgacccgtcggggcggctctgcacctttttcgggctgaccatgactgttttcgggctctcctcgttgttcatcgccagcgccatggccgtcgagcgggcgctggccatcagggcgccgcactggtatgcgagccacatgaagacgcgtgccacccgcgctgtgctgctcggcgtgtggctggccgtgctcgccttcgccctgctgccggtgctgggcgtgggccagtacaccgtccagtggcccgggacgtggtgcttcatcagcaccgggcgagggggcaacgggactagctcttcgcataactggggcaaccttttcttcgcctctgcctttgccttcctggggctcttggcgctgacagtcaccttttcctgcaacctggccaccattaaggccctggtgtcccgctgccgggccaaggccacggcatctcagtccagtgcccagtggggccgcatcacgaccgagacggccattcagcttatggggatcatgtgcgtgctgtcggtctgctggtctccgctcctgataatgatgttgaaaatgatcttcaatcagacatcagttgagcactgcaagacacacacggagaagcagaaagaatgcaacttcttcttaatagctgttcgcctggcttcactgaaccagatcttggatccttgggtttacctgctgttaagaaagatccttcttcgaaagttttgccagatcaggtaccacacaaacaactatgcatccagctccacctccttaccctgccagtgttcctcaaccttgatgtggagcgaccatttggaaagatgagaaaaagaagactcagagagcaagaggaattttggggaaattaaaacctgcctttctgccaggatcacatcactggaagctccatgactctctttttgtaaaagaaaaaaaaatcacagaaacacccacctcccaaactattctcttttacttcttcccccaagcccacccccaaatataactgttatccagaagctgttatgtcctgtttccatacatgtttttgtacttttactatatctacatacatcaattaaacttatgtcctattgttttgtgaatttatatttgcgtatacattatcatatgtaaaatttgcatttttttattgaaaattatgtttcttgagatttatccacattgaaacatggagctctaaatcgttaattttaaccgctatagagtattccataatttgaataaagcataatttgtttgtacaatctcccgccaagggaaaattatttccacactcatcatgacaaggagcactgcaaaaataaaaataaaaattacattcatacatgtttaactgcacccatctgc

SEQ ID NO: 445864 - DNA, 2104 bp, Homo sapiens
  misc_feature (1362)..(1362): n is a, c, g, or t
gcctcgccaccagaggtttcccagagaggaaggcgtggctccctcccgggccagtgagccctggcgccgccgcggccgcggtcccagcagcggagtagggcggcggctgcgccccgcaccatggggggcagcccagccccagccgcggtaaacgccgacctccgccgccgcccgcgccgcgtctgccccctcccgctgcggctctctggacgccatcccctcctcacctcgaagccaacatgaaggagacccggggctacggaggggatgcccccttctgcacccgcctcaaccactcctacacaggcatgtgggcgcccgagcgttccgccgaggcgcggggcaacctcacgcgccctccagggtctggcgaggattgcggatcggtgtccgtggccttcccgatcaccatgctgctcactggtttcgtgggcaacgcactggccatgctgctcgtgtcgcgcagctaccggcgccgggagagcaagcgcaagaagtccttcctgctgtgcatcggctggctggcgctcaccgacctggtcgggcagcttctcaccaccccggtcgtcatcgtcgtgtacctgtccaagcagcgttgggagcacatcgacccgtcggggcggctctgcacctttttcgggctgaccatgactgttttcgggctctcctcgttgttcatcgccagcgccatggccgtcgagcgggcgctggccatcagggcgccgcactggtatgcgagccacatgaagacgcgtgccacccgcgctgtgctgctcggcgtgtggctggccgtgctcgccttcgccctgctgccggtgctgggcgtgggccagtacaccgtccagtggcccgggacgtggtgcttcatcagcaccgggcgagggggcaacgggactagctcttcgcataactggggcaaccttttcttcgcctctgcctttgccttcctggggctcttggcgctgacagtcaccttttcctgcaacctggccaccattaaggccctggtgtcccgctgccgggccaaggccacggcatctcagtccagtgcccagtggggccgcatcacgaccgagacggccattcagcttatggggatcatgtgcgtgctgtcggtctgctggtctccgctcctgataatgatgttgaaaatgatcttcaatcagacatcagttgagcactgcaagacacacacggagaagcagaaagaatgcaacttcttcttaatagctgttcgcctggcttcactgaaccagatcttggatccttgggtttacctgctgttaagaaagatccttcttcgaaagttttgccagatgagaaaaagaagactcagagagcaagctcctcttcttcccaccnctactgtgattgatccttcaaggttctgtgctcagcccttccgttggttcttggatttgtcctttcccgccatgtcttcatcacatccacaacttccactaacacttgcgagcttcaaacttcttagagaaccctgcagtgtccagctaagctgatgacttgaagataaatctgcctaaccctgggatgaagtatctgtgaactattttgacagcagatgaggaattttggggaaattaaaacctgcctttctgccaggatcacatcactggaagctccatgactctctttttgtaaaagaaaaaaaaatcacagaaacacccacctcccaaactattctcttttacttcttcccccaagcccacccccaaatataactgttatccagaagctgttatgtcctgtttccatacatgtttttgtacttttactatatctacatacatcaattaaacttatgtcctattgttttgtgaatttatatttgcgtatacattatcatatgtaaaatttgcatttttttattgaaaattatgtttcttgagatttatccacattgaaacatggagctctaaatcgttaattttaaccgctatagagtattccataatttgaataaagcataatttgtttgtacaatctcccgccaagggaaaattatttccacactcatcatgacaaggagcactgcaaaaataaaaataaaaattacattcatacatgtttaactgcacccatctgc

SEQ ID NO: 445865 - DNA, 1970 bp, Homo sapiens
gcctcgccaccagaggtttcccagagaggaaggcgtggctccctcccgggccagtgagccctggcgccgccgcggccgcggtcccagcagcggagtagggcggcggctgcgccccgcaccatggggggcagcccagccccagccgcggtaaacgccgacctccgccgccgcccgcgccgcgtctgccccctcccgctgcggctctctggacgccatcccctcctcacctcgaagccaacatgaaggagacccggggctacggaggggatgcccccttctgcacccgcctcaaccactcctacacaggcatgtgggcgcccgagcgttccgccgaggcgcggggcaacctcacgcgccctccagggtctggcgaggattgcggatcggtgtccgtggccttcccgatcaccatgctgctcactggtttcgtgggcaacgcactggccatgctgctcgtgtcgcgcagctaccggcgccgggagagcaagcgcaagaagtccttcctgctgtgcatcggctggctggcgctcaccgacctggtcgggcagcttctcaccaccccggtcgtcatcgtcgtgtacctgtccaagcagcgttgggagcacatcgacccgtcggggcggctctgcacctttttcgggctgaccatgactgttttcgggctctcctcgttgttcatcgccagcgccatggccgtcgagcgggcgctggccatcagggcgccgcactggtatgcgagccacatgaagacgcgtgccacccgcgctgtgctgctcggcgtgtggctggccgtgctcgccttcgccctgctgccggtgctgggcgtgggccagtacaccgtccagtggcccgggacgtggtgcttcatcagcaccgggcgagggggcaacgggactagctcttcgcataactggggcaaccttttcttcgcctctgcctttgccttcctggggctcttggcgctgacagtcaccttttcctgcaacctggccaccattaaggccctggtgtcccgctgccgggccaaggccacggcatctcagtccagtgcccagtggggccgcatcacgaccgagacggccattcagcttatggggatcatgtgcgtgctgtcggtctgctggtctccgctcctgataatgatgttgaaaatgatcttcaatcagacatcagttgagcactgcaagacacacacggagaagcagaaagaatgcaacttcttcttaatagctgttcgcctggcttcactgaaccagatcttggatccttgggtttacctgctgttaagaaagatccttcttcgaaagttttgccagatgagaaaaagaagactcagagagcaattaatctgcagtttgcgaactctcagatacagagggcaactgcacattgtgggcaagtacaaacctatcgtgtgctgaacagagaagaaatggaggtactcgtgagcagcattaatgtgtacaccagaatctcaacagtaaagacagaataacatgaagaaaataactacaggagtgctgtgttttaaaaaagcaagctcctccagctgagtttgtgactctaatccctgcttattttgagcactttccatgtgttgattgactcggaaaggtgggagattaccagcaagccaggtcatttgggcaaacatgggcatatttttagcaaagctgaacaaactggttggtcactcgaactacccaatttagacttatagtaagaatagcacatggttcagaattgccaagactgctgctttagtcaacagaaattttttcatatgcatgctggtaatgcagtgcatctctggaagaaatgcaagagtattttaacatttggtccagaagaaatatgtaaagggtgtttgtagaatttgatgccctcttcagtgacataaggttatgggtttgtgaatggaaaatctgttatttgttcaggttattaaaacacattctaattcaacatca

SEQ ID NO: 445866 - DNA, 2361 bp, Homo sapiens
gcctcgccaccagaggtttcccagagaggaaggcgtggctccctcccgggccagtgagccctggcgccgccgcggccgcggtcccagcagcggagtagggcggcggctgcgccccgcaccatggggggcagcccagccccagccgcggtaaacgccgacctccgccgccgcccgcgccgcgtctgccccctcccgctgcggctctctggacgccatcccctcctcacctcgaagccaacatgaaggagacccggggctacggaggggatgcccccttctgcacccgcctcaaccactcctacacaggcatgtgggcgcccgagcgttccgccgaggcgcggggcaacctcacgcgccctccagggtctggcgaggattgcggatcggtgtccgtggccttcccgatcaccatgctgctcactggtttcgtgggcaacgcactggccatgctgctcgtgtcgcgcagctaccggcgccgggagagcaagcgcaagaagtccttcctgctgtgcatcggctggctggcgctcaccgacctggtcgggcagcttctcaccaccccggtcgtcatcgtcgtgtacctgtccaagcagcgttgggagcacatcgacccgtcggggcggctctgcacctttttcgggctgaccatgactgttttcgggctctcctcgttgttcatcgccagcgccatggccgtcgagcgggcgctggccatcagggcgccgcactggtatgcgagccacatgaagacgcgtgccacccgcgctgtgctgctcggcgtgtggctggccgtgctcgccttcgccctgctgccggtgctgggcgtgggccagtacaccgtccagtggcccgggacgtggtgcttcatcagcaccgggcgagggggcaacgggactagctcttcgcataactggggcaaccttttcttcgcctctgcctttgccttcctggggctcttggcgctgacagtcaccttttcctgcaacctggccaccattaaggccctggtgtcccgctgccgggccaaggccacggcatctcagtccagtgcccagtggggccgcatcacgaccgagacggccattcagcttatggggatcatgtgcgtgctgtcggtctgctggtctccgctcctgataatgatgttgaaaatgatcttcaatcagacatcagttgagcactgcaagacacacacggagaagcagaaagaatgcaacttcttcttaatagctgttcgcctggcttcactgaaccagatcttggatccttgggtttacctgctgttaagaaagatccttcttcgaaagttttgccagatcaggtaccacacaaacaactatgcatccagctccacctccttaccctgccagtgttcctcaaccttgatgtggagcgaccatttggaaagataatgaaagaacggagttggacattttattgcaattcctgcttccctgaatttgcatatttcttcccacctgagaaggataattatatattttaatttggattatttcttcatttttatctttttattttaatgattgttttgtcagtaatacccatggagatcaactttattattataatccatgcctctgaatattagattggtttcttggatgggattttgaatatgcatttaagaagttgggaagaatttcacagatgatgattggaggaaaagtgatgaaaagaaagacctgtgttccaggagttttctccaacttcaaacctttacgtgaatcttaaccaaagtggacatctttacatttcatgatagcttgcttttgcaatatgagtttgaaaaatcagtataagcttatgatggtgaaaagtcaacatattgagagtgataattcaattaataggatatgaacttaacgacatataaaagcaaatgagggcaggagggaatcgtgacaaaaaatatttgtgcccaattatgattaatgttttagagatgttgtgtccctgtgggcttagcatggaactaaaagttcctaagtctcaattctagttatgtgtcatttagtaactcaggaatctgcttaattgttatttctaagcttttgatgacaaaggagtgatgcagctaagggcatccttggagtgtcataaaaaacaaatttgaggttgaatgattagctgcgcagttagagtgataaaaaaatccaggtaggccttctgattcaccatgaccaagtcaggatttcttaatatttcttttctggcagcatatacaaaggcaaaattaataaataacagttgttgaataacaaactttattacgtttttataaaataaaagaatctattttgtctgtattaaaataaaaaactttgtggacttctaaaagat

SEQ ID NO: 445867 - DNA, 2074 bp, Homo sapiens
gcctcgccaccagaggtttcccagagaggaaggcgtggctccctcccgggccagtgagccctggcgccgccgcggccgcggtcccagcagcggagtagggcggcggctgcgccccgcaccatggggggcagcccagccccagccgcggtaaacgccgacctccgccgccgcccgcgccgcgtctgccccctcccgctgcggctctctggacgccatcccctcctcacctcgaagccaacatgaaggagacccggggctacggaggggatgcccccttctgcacccgcctcaaccactcctacacaggcatgtgggcgcccgagcgttccgccgaggcgcggggcaacctcacgcgccctccagggtctggcgaggattgcggatcggtgtccgtggccttcccgatcaccatgctgctcactggtttcgtgggcaacgcactggccatgctgctcgtgtcgcgcagctaccggcgccgggagagcaagcgcaagaagtccttcctgctgtgcatcggctggctggcgctcaccgacctggtcgggcagcttctcaccaccccggtcgtcatcgtcgtgtacctgtcctagctcttcgcataactggggcaaccttttcttcgcctctgcctttgccttcctggggctcttggcgctgacagtcaccttttcctgcaacctggccaccattaaggccctggtgtcccgctgccgggccaaggccacggcatctcagtccagtgcccagtggggccgcatcacgaccgagacggccattcagcttatggggatcatgtgcgtgctgtcggtctgctggtctccgctcctgataatgatgttgaaaatgatcttcaatcagacatcagttgagcactgcaagacacacacggagaagcagaaagaatgcaacttcttcttaatagctgttcgcctggcttcactgaaccagatcttggatccttgggtttacctgctgttaagaaagatccttcttcgaaagttttgccagatcaggtaccacacaaacaactatgcatccagctccacctccttaccctgccagtgttcctcaaccttgatgtggagcgaccatttggaaagataatgaaagaacggagttggacattttattgcaattcctgcttccctgaatttgcatatttcttcccacctgagaaggataattatatattttaatttggattatttcttcatttttatctttttattttaatgattgttttgtcagtaatacccatggagatcaactttattattataatccatgcctctgaatattagattggtttcttggatgggattttgaatatgcatttaagaagttgggaagaatttcacagatgatgattggaggaaaagtgatgaaaagaaagacctgtgttccaggagttttctccaacttcaaacctttacgtgaatcttaaccaaagtggacatctttacatttcatgatagcttgcttttgcaatatgagtttgaaaaatcagtataagcttatgatggtgaaaagtcaacatattgagagtgataattcaattaataggatatgaacttaacgatataaaagataaacttaacgacatataaaagcaaatgagggcaggagggaatcgtgacaaaaaatatttgtgcccaattatgattaatgttttagagatgttgtgtccctgtgggcttagcatggaactaaaagttcctaagtctcaattctagttatgtgtcatttagtaactcaggaatctgcttaattgttatttctaagcttttgatgacaaaggagtgatgcagctaagggcatccttggagtgtcataaaaaacaaatttgaggttgaatgattagctgcgcagttagagtgataaaaaaatccaggtaggccttctgattcaccatgaccaagtcaggatttcttaatatttcttttctggcagcatatacaaaggcaaaattaataaataacagttgttgaataacaaactttattacgtttttataaaataaaagaatctattttgtctgtattaaaataaaaaactttgtggacttctaaaagat

SEQ ID NO: 445868 - DNA, 1941 bp, Homo sapiens
atcaacatctcacagcctgtgaagctctcagtgtgcctctgtcctttgccacaaacatgaggttcacattccctctcatggctatagtcctggaaattgccatgattgttttatttggattatttgttgagtatgaaacggaccagactgttctcgagcagctcaacatcaccaagccaacagacatgggcatattctttgagttatatcctctgttccaagatgtacatgttatgatatttgttgggtttggcttcctcatgaccttcctgaagaaatatggcttcagcagtgtgggtatcaacctactcgttgctgctttgggcctccagtggggcactattgtacagggaatcctgcaaagccagggacagaaatttaacattggaatcaaaaacatgataaatgcagacttcagtgcagccacagttctgatatcttttggagctgtcctgggaaaaacgagccccacccaaatgctgatcatgacaattttagaaattgttttctttgcccacaatgaatacctggttagtgaaatatttaaggcctctgacattggagcatcaatgacgatccatgcctttggggcctactttggcttggctgtagcaggcatcttgtatcgatctggactgagaaaggggcatgaaaatgaagagtccgcatactactcagacttgtttgcaatgattgggactctctttctgtggatgttttggcccagctttaactcggccattgctgaacctggagacaaacagtgcagggccattgtaaacacgtacttctctctcgctgcctgtgtgctcacagcctttgccttctccagcctagtggagcaccgaggcaagctcaacatggttcacattcagaatgccacccttgctggaggagttgctgtgggcacttgtgcggatatggcaattcacccatttggttctatgattattgggagcattgcaggaatggtctctgtgcttggatacaagttcctgactccactttttactactaaactgaggatccatgatacatgtggggtccataacctccacggcttacctggtgtagtgggaggccttgcaggcattgtggcagtagcaatgggcgcctccaacacgtctatggccatgcaggcagctgcactgggttcctctatcggaacagcagttgttggaggtctgatgacaggtttaattctaaagttgcctctctggggacagccatctgaccagaactgctatgatgattctgtttattggaaggtccctaagacgagataacttgacaatcagttccatggacatggtgaccacagccagctggaacctgaagtctaaacaccattcctgctctccagcttcctttcccattatccagaatcaagtccaaataaacaaaaagggagtaaccaaagagagtatggaccagagtgaatagatcctaagtcccaaatggccagtgtaaaaatgtccttatgtctgatgctgtctcttgctcttcaatgattaattgaggggatgttactcataaaacagataatcaaatagatcttctccaggattcccaaaaagcttttggcagtgagtaaatacagagtaaacatgtcagtttcttaatgtagacactatgtcttcaatcccaaaaattataaaactgaaacccatgaagcaagaatagatgtgagaaatctatgtaaaaaaataattaaagaaatgcatgtgtgtaaagtagtaatatgatgattttaggtagtgctttttattttaaaaatagtctagttagtaatgttgtatccttgcatgaatattattcttaattccttttgcatgttgactatttgcaacgagctcaaatgctatctgatcaaagtctattttgcataaaatgtccaataattaaatattgttataaaataaaacatcagtctttgactct

SEQ ID NO: 445869 - DNA, 1231 bp, Homo sapiens
  misc_feature (1199)..(1199): n is a, c, g, or t
  misc_feature (1204)..(1204): n is a, c, g, or t
  misc_feature (1208)..(1208): n is a, c, g, or t
  misc_feature (1214)..(1214): n is a, c, g, or t
  misc_feature (1216)..(1216): n is a, c, g, or t
  misc_feature (1221)..(1221): n is a, c, g, or t
  misc_feature (1225)..(1227): n is a, c, g, or t
atcaacatctcacagcctgtgaagctctcagtgtgcctctgtcctttgccacaaacatgaggttcacattccctctcatggctatagtcctggaaattgccatgattgttttatttggattatttgttgagtatgaaacggaccagactgttctcgagcagctcaacatcaccaagccaacagacatgggcatattctttgagttatatcctctgttccaagatgtacatgttatgatatttgttgggtttggcttcctcatgaccttcctgaagaaatatggcttcagcagtgtgggtatcaacctactcgttgctgctttgggcctccagtggggcactattgtacagggaatcctgcaaagccagggacagaaatttaacattggaatcaaaaacatgataaatgcagacttcagtgcagccacagttctgatatcttttggagctgtcctgggaaaaacgagccccacccaaatgctgatcatgacaattttagaaattgttttctttgcccacaatgaatacctggttagtgaaatatttaaggcctctgacattggagcatcaatgacgatccatgcctttggggcctactttggcttggctgtagcaggcatcttgtatcgatctggactgagaaaggggcatgaaaatgaagagtccgcatactactcagacttgtttgcaatgattgggactctctttctgtggatgttttggcccagctttaactcggccattgctgaacctggagacaaacagtgcagggccattgtaaacacgtacttctctctcgctgcctgtgtgctcacagcctttgccttctccagcctagtggagcaccgaggcaagctcaacatggttcacattcagaatgccacccttgctggaggagttgctgtgggcacttgtgcggatatggcaattcacccatttggttctatgattattgggagcattgcaggaatggtctctgtgcttggatacaagttcctgactccactttttactactaaactgaggatccatgatacatgtggggtccataacctccacggcttacctggtgtagtgggaggccttgcaggcattgtggcagtagcaatgggcgcctccaacacgtctatggccatgcaggcagctgcactgggttcctctatcggaacagcagttgttggaggtctgatgacaggtccntaaanagtnaacacntncctgntctnnngctt

SEQ ID NO: 445870 - DNA, 539 bp, Homo sapiens
ctgaagcagaagaattgcttgaacctgagaggtggaagttgcagttagcagagatcaagccactgcactccagcctgggtgacagagggacactccatctcaaaaataaataaataaacaaataaataagtaaataaataaataaagcaaactgcatcctctggactgtcttccatattcagaactaatatcccctcttttggttcactacagggactctctttctgtggatgttttggcccagctttaactcggccattgctgaacctggagacaaacagtgcagggccattgtaaacacgtacttctctctcgctgcctgtgtgctcacagcctttgccttctccagcctagtggagcaccgaggcaagctcaacatggttcacattcagaatgccacccttgctggaggagttgctgtgggcacttgtgcggatatggcaattcacccatttggttctatgattattgggagcattgcaggaatggtctctgtgcttggatacaagttcctgactgttaaggtacagcagatgttc

SEQ ID NO: 445871 - DNA, 551 bp, Homo sapiens
gatgattttataatagtatataagctactatgcaagtagattttcctcttcagcgtcacaacatgactcattttccctctaccgtcacaggtttaattctaaagttgcctctctggggacagccatctgaccagaactgctatgatgattctgtttattggaaggtactgtacagtattctaaacaagaatgtaaacgatgactccattagtgaaagctttacacacttcaagcctagatatctgtgtgcataggtgtgatgaaattgagttagcctggcatggtaggtagctcacacatgtaatctcagcactttgggcggctgaggctggaggattgtttgatgccaggagtttgggtccagcctgggcaactctctacaaaaattataaataataaatttaaaatttttctttcaatgggatgtcaagtgtaaaagaaaaataaataaatgaaaagaaactgaatgaactacctatttatagaaagaaattgagatgatgtgcccagccagataaaatcagaagttatggtattttctaaagcagaag

SEQ ID NO: 445872 - DNA, 1458 bp, Homo sapiens
ctgaagcagaagaattgcttgaacctgagaggtggaagttgcagttagcagagatcaagccactgcactccagcctgggtgacagagggacactccatctcaaaaataaataaataaacaaataaataagtaaataaataaataaagcaaactgcatcctctggactgtcttccatattcagaactaatatcccctcttttggttcactacagggactctctttctgtggatgttttggcccagctttaactcggccattgctgaacctggagacaaacagtgcagggccattgtaaacacgtacttctctctcgctgcctgtgtgctcacagcctttgccttctccagcctagtggagcaccgaggcaagctcaacatggttcacattcagaatgccacccttgctggaggagttgctgtgggcacttgtgcggatatggcaattcacccatttggttctatgattattgggagcattgcaggaatggtctctgtgcttggatacaagttcctgactccactttttactactaaactgaggatccatgatacatgtggggtccataacctccacggcttacctggtgtagtgggaggccttgcaggcattgtggcagtagcaatgggcgcctccaacacgtctatggccatgcaggcagctgcactgggttcctctatcggaacagcagttgttggaggtctgatgacaggtttaattctaaagttgcctctctggggacagccatctgaccagaactgctatgatgattctgtttattggaaggtccctaagacgagataacttgacaatcagttccatggacatggtgaccacagccagctggaacctgaagtctaaacaccattcctgctctccagcttcctttcccattatccagaatcaagtccaaataaacaaaaagggagtaaccaaagagagtatggaccagagtgaatagatcctaagtcccaaatggccagtgtaaaaatgtccttatgtctgatgctgtctcttgctcttcaatgattaattgaggggatgttactcataaaacagataatcaaatagatcttctccaggattcccaaaaagcttttggcagtgagtaaatacagagtaaacatgtcagtttcttaatgtagacactatgtcttcaatcccaaaaattataaaactgaaacccatgaagcaagaatagatgtgagaaatctatgtaaaaaaataattaaagaaatgcatgtgtgtaaagtagtaatatgatgattttaggtagtgctttttattttaaaaatagtctagttagtaatgttgtatccttgcatgaatattattcttaattccttttgcatgttgactatttgcaacgagctcaaatgctatctgatcaaagtctattttgcataaaatgtccaataattaaatattgttataaaataaaacatcagtctttgactct

SEQ ID NO: 445873 - DNA, 399 bp, Homo sapiens
aaaagaaactgacagagagtggatactcaatatttattaaatgaatcagatcaggtatcaattttttgagagtgctaaaccctccctaaggaaagtcttatttccaaagtttacatgaaaagatgattctcttctttaaggtgtatctcagaattttctaacactgctcaagagtttcaaagaaaataagaatatgaaagaaaaattgtaacaaatgcttaatttgctgctgtgtaatgttacactctggcctgaagatggcagtcatccacaccctcagtgagtgagactttctttggctgagatccaggaaagacactgattcttttttgtttgcttccttaggtctatggccatgcaggcagctgcactgggttcctctatcggaacagcagttgt

SEQ ID NO: 445874 - DNA, 384 bp, Homo sapiens
acttctctctcgctgcctgtgtgctcacagcctttgccttctccagcctagtggagcaccgaggcaagctcaacatggtaagtgccgccttagccctcatggaaattttgcttcacaacactgacagttgctcagataagtagtaggtaatttctgcatcactgctgaactctcaagacaaatcagaagcagaccttgtagaatgttctaaaaacaacaacatttattcattaattcacttattcatcaaatctgtaccctgggctgggcgcagtggctaatgcctgtaatcccagcactttgggaggcctagacagggggattacctgaggtcaagagttcaagacaagcctggccaacatggagaaaccctgtgactactaa

SEQ ID NO: 445875 - DNA, 193 bp, Homo sapiens
tgcatgtgtgtaaagtagtaatatgatgattttaggtagtgctttttattttaaaaatagtctagttagtaatgttgtatccttgcatgaatattattcttaattccttttgcatgttgactatttgcaacgagctcaaatgctatctgatcaaagtctattttgcataaaatgtccaataattaaatattgt

SEQ ID NO: 445876 - DNA, 1309 bp, Homo sapiens
atcaacatctcacagcctgtgaagctctcagtgtgcctctgtcctttgccacaaacatgaggttcacattccctctcatggctatagtcctggaaattgccatgattgttttatttggattatttgttgagtatgaaacggaccagactgttctcgagcagctcaacatcaccaagccaacagacatgggcatattctttgagttatatcctctgttccaagatgtacatgttatgatatttgttgggtttggcttcctcatgaccttcctgaagaaatatggcttcagcagtgtgggtatcaacctactcgttgctgctttgggcctccagtggggcactattgtacagggaatcctgcaaagccagggacagaaatttaacattggaatcaaaaacatgataaatgcagacttcagtgcagccacagttctgatatcttttggagctgtcctgggaaaaacgagccccacccaaatgctgatcatgacaattttagaaattgttttctttgcccacaatgaatacctggttagtgaaatatttaaggcctctgacattggagcatcaatgacgatccatgcctttggggcctactttggcttggctgtagcaggcatcttgtatcgatctggactgagaaaggggcatgaaaatgaagagtccgcatactactcagacttgtttgcaatgattgggactctctttctgtggatgttttggcccagctttaactcggccattgctgaacctggagacaaacagtgcagggccattgtaaacacgtacttctctctcgctgcctgtgtgctcacagcctttgccttctccagcctagtggagcaccgaggcaagctcaacatggttcacattcagaatgccacccttgctggaggagttgctgtgggcacttgtgcggatatggcaattcacccatttggttctatgattattgggagcattgcaggaatggtctctgtgcttggatacaagttcctgactccactttttactactaaactgaggatccatgatacatgtggggtccataacctccacggcttacctggtgtagtgggaggccttgcaggcattgtggcagtagcaatgggcgcctccaacacgtctatggccatgcaggcagctgcactgggttcctctatcggaacagcagttgttggaggtctgatgacaggtttaattctaaagttgcctctctggggacagccatctgaccagaactgctatgatgattctgtttattggaaggtccctaagacgagataaacaccattcctgctctccagctt

SEQ ID NO: 445877 - DNA, 1819 bp, Homo sapiens
atcaacatctcacagcctgtgaagctctcagtgtgcctctgtcctttgccacaaacatgaggttcacattccctctcatggctatagtcctggaaattgccatgattgttttatttggattatttgttgagtatgaaacggaccagactgttctcgagcagctcaacatcaccaagccaacagacatgggcatattctttgagttatatcctctgttccaagatgtacatgttatgatatttgttgggtttggcttcctcatgaccttcctgaagaaatatggcttcagcagtgtgggtatcaacctactcgttgctgctttgggcctccagtggggcactattgtacagggaatcctgcaaagccagggacagaaatttaacattggaatcaaaaacatgataaatgcagacttcagtgcagccacagttctgatatcttttggagctgtcctgggaaaaacgagccccacccaaatgctgatcatgacaattttagaaattgttttctttgcccacaatgaatacctggttagtgaaatatttaaggcctctgacattggagcatcaatgacgatccatgcctttggggcctactttggcttggctgtagcaggcatcttgtatcgatctggactgagaaaggggcatgaaaatgaagagtccgcatactactcagacttgtttgcaatgattgggactctctttctgtggatgttttggcccagctttaactcggccattgctgaacctggagacaaacagtgcagggccattgtaaacacgtacttctctctcgctgcctgtgtgctcacagcctttgccttctccagcctagtggagcaccgaggcaagctcaacatggttcacattcagaatgccacccttgctggaggagttgctgtgggcacttgtgcggatatggcaattcacccatttggttctatgattattgggagcattgcaggaatggtctctgtgcttggatacaagttcctgactgtctatggccatgcaggcagctgcactgggttcctctatcggaacagcagttgttggaggtctgatgacaggtttaattctaaagttgcctctctggggacagccatctgaccagaactgctatgatgattctgtttattggaaggtccctaagacgagataacttgacaatcagttccatggacatggtgaccacagccagctggaacctgaagtctaaacaccattcctgctctccagcttcctttcccattatccagaatcaagtccaaataaacaaaaagggagtaaccaaagagagtatggaccagagtgaatagatcctaagtcccaaatggccagtgtaaaaatgtccttatgtctgatgctgtctcttgctcttcaatgattaattgaggggatgttactcataaaacagataatcaaatagatcttctccaggattcccaaaaagcttttggcagtgagtaaatacagagtaaacatgtcagtttcttaatgtagacactatgtcttcaatcccaaaaattataaaactgaaacccatgaagcaagaatagatgtgagaaatctatgtaaaaaaataattaaagaaatgcatgtgtgtaaagtagtaatatgatgattttaggtagtgctttttattttaaaaatagtctagttagtaatgttgtatccttgcatgaatattattcttaattccttttgcatgttgactatttgcaacgagctcaaatgctatctgatcaaagtctattttgcataaaatgtccaataattaaatattgttataaaataaaacatcagtctttgactct

SEQ ID NO: 445878 - DNA, 2894 bp, Homo sapiens
agcggacggccgtcgtgccgctcgtgtcagtcaacatggaggcagaggaatcggagaaggccgcaacggagcaagagccgctggaagggacagaacagacactagatgcggaggaggagcaggaggaatccgaagaagcggcctgtggcagcaagaagcgggtagtgccaggtattgtgtacctgggccatatcccgccgcgcttccggcccctgcacgtccgcaaccttctcagcgcctatggcgaggtcggacgcgtcttctttcaggctgaggaccggttcgtgagacgcaagaagaaggcagcagcagctgccggagggaaaaagcggtcctacaccaaggactacaccgagggatgggtggagttccgtgacaagcgcatagccaagcgcgtggcggccagtctacacaacacgcctatgggtgcccgcaggcgcagccccttccgttatgatctttggaacctcaagtacttgcaccgtttcacctggtcccacctcagcgagcacctcgcctttgagcgccaggtgcgcaggcagcgcttgagagcggaggttgctcaagccaagcgtgagaccgacttctatcttcaaagtgtggaacggggacaacgctttcttgcggccgatggggaccctgctcgcccagatggctcctggacatttgcccagcgtcctactgagcaggaactgagggcccgtaaagcagcacggccagggggacgtgaacgggctcgcctggcaactgcccaggacaaggcccgctccaacaaagggctcctggccaggatctttggagccccgccaccctcagagagcatggagggaccttcccttgtcagggactcctgagggcctgggtggccccttccatttcctggccctgctctgcttcctgtctacctcatactagaatgatcgtgactacccgggcagacattttactgtgtttctcagaccaagtgtctactgatggcccaaacatggagttttgtgggcttccactgtccccactccgaactcctgtatgtgcctggctgagtcacctaattcatactgtcatactagcataattatgactattgcatatgcttgttttgtttgactcttggctgcctacgtctgtagggtcccctgaaaatcccacttcctgcccccagaaagggcctttatttccaactaggaggataatgcctagtccaggcaatctttctctgtttagcagtcacaggtgagggtggtattagcatcttttttatgtagaaaaaattgagttaatggggtggactgggttgggaagaaatacatttcctaatgtatttatagaaaataaaaatatttttatgtgcctttttatttttgttggtggggaggtcattggacaagttccaactttcatcttgtgttcccttcaccttcatatcctgatcttagagcccccctccccctgccacccaccttactgtttaacctggatttttttttctatttaatttttgtctaatatcttagcccagtttatcaatcagttatcttaagtcagcattttctaagccattgtttgaggaaacagtgacaataggtaataacacatcttagtattaagagttttacaggccactagtataagataggcatcgtggtagatgcatataaagggtggaatgggagccatggcaggtcatagagtcctctcaatgggaacctgattgatgatcacagtcttcagtggtgagtcagtcctcaccaagttttccagatcattcctacaaagtaaactgggagaataataagtctgaaagagtgtggagtgctcccacaattacaaagaatgcttcctgggtggagtgttgagttggaaccattgtaaaggtgggcaaagcctagtagagaaaccagtgcacctcaggtgcacttacatatggtggggctgaggcaaagcagccctgtaggcttcaaagaatcagtgtaagccactaaaaggaactgaaaacctaggtgtcacaataaacagtctacacagtctcacgtagaccaaaattctgatcattttccaggctgttgcatgaagtgatagagtatgattataatttctgtttgcttgtgctgtttgtttttgtttttcatctgtcaatgtgatgatctgtgttttatagggtagagtggatttgtctactttggctgtaaaataccctaatcacattatgatcttgacaggtgcactttactggggagaataaaaaggaccatacggtaaagctggtataacatttctcacaacccacatacctcttatacttggcacacaaactacgtttccatttagaaactttcgtcttgtttctgtttttaattcttgtgggtttgtttcatgtgaattgtttcctcagatcattgatgtcttaaagtgaaacagaaatgcccattgctacttctgctagataaagagataccaaggtgaagaagaaactttccctctagttgctaacagcttagaaagtacagtagacatactggggttttatttaagactttcttgaatgaagaaataaattgcattcccacggtggacagcgttagataacagtatgttcaagggctggtatttcagggtccatctccaaaacagttctgtacaaagagctcacacctgcggccaggcaagctaagtaagtcacaggtggagtgaggaatgagaataaatgggtggaagaaaatatcctaggaactttcatcttgactttaagcccattgagtgtaggaaaataattttttacatccacaattttgtttctatttaaacagcacttgtttttttatatgaagtaactcatttaatccacaactatataatattgttatccccccattaaaactgagctcagagagatg

SEQ ID NO: 445879 - DNA, 2897 bp, Homo sapiens
agcggacggccgtcgtgccgctcgtgtcagtcaacatggaggcagaggaatcggagaaggccgcaacggagcaagagccgctggaagggacagaacagacactagatgcggaggaggagcaggaggaatccgaagaagcggcctgtggcagcaagaagcgggtagtgccaggtattgtgtacctgggccatatcccgccgcgcttccggcccctgcacgtccgcaaccttctcagcgcctatggcgaggtcggacgcgtcttctttcaggctgaggaccggttcgtgagacgcaagaagaaggcagcagcagctgccggagggaaaaagcggtcctacaccaaggactacaccgagggatgggtggagttccgtgacaagcgcatagccaagcgcgtggcggccagtctacacaacacgcctatgggtgcccgcaggcgcagccccttccgttatgatctttggaacctcaagtacttgcaccgtttcacctggtcccacctcagcgagcacctcgcctttgagcgccaggtgcgcaggcagcgcttgagagcggaggttgctcaagccaagcgtgagaccgacttctatcttcaaagtgtggaacggggacaacgctttcttgcggccgatggggaccctgctcgcccagatggctcctggacatttgcccagcgtcctactgagcaggaactgagggcccgtaaagcagcacggccagggggacgtgaacgggctcgcctggcaactgcccaggacaaggcccgctccaacaaagggctcctggccaggatctttggagccccgccaccctcagagagcatggagggaccttcccttgtcagggactcctgagggcctgggtggccccttccatttcctggccctgctctgcttcctgtctacctcatactagaatgatcgtgactacccgggcagacattttactgtgtttctcagaccaagtgtctactgatggcccaaacatggagttttgtgggcttccactgtccccactccgaactcctgtatgtgcctggctgagtcacctaattcatactgtcatactagcataattatgactattgcatatgcttgttttgtttgactcttggctgcctacgtctgtagggtcccctgaaaatcccacttcctgcccccagaaagggcctttatttccaactaggaggataatgcctagtccaggcaatctttctctgtttagcagtcacaggtgagggtggtattagcatcttttttatgtagaaaaaattgagttaatggggtggactgggttgggaagaaatacatttcctaatgtatttatagaaaataaaaatatttttatgtgcctttttatttttgttggtggggaggtcattggacaagttccaactttcatcttgtgttcccttcaccttcatatcctgatcttagagcccccctccccctgccacccaccttactgtttaacctggatttttttttctatttaatttttgtctaatatcttagcccagtttatcaatcagttatcttaagtcagcattttctaagccattgtttgaggaaacagtgacaataggtaataacacatcttagtattaagagttttacaggccactagtataagataggcatcgtggtagatgcatataaagggtggaatgggagccatggcaggtcatagagtcctctcaatgggaacctgattgatgatcacagtcttcagtggtgagtcagtcctcaccaagttttccagatcattcctacaaagtaaactgggagaataataagtctgaaagagtgtggagtgctcccacaattacaaagaatgcttcctgggtggagtgttgagttggaaccattgtaaaggtgggcaaagcctagtagagaaaccagtgcacctcaggtgcacttacatatggtggggctgaggcaaagcagccctgtaggcttcaaagaatcagtgtaagccactaaaaggaactgaaaacctaggtgtcacaataaacagtctacacagtctcacgtagaccaaaattctgatcattttccaggctgttgcatgaagtgatagagtatgattataatttctgtttgcttgtgctgtttgtttttgtttttcatctgtcaatgtgatgatctgtgttttatagggtagagtggatttgtctactttggctgtaaaataaggaccatacggtaaagctggtataacatttctcacaacccacatacctcttatacttggcacacaaactacgtttccatttagaaactttcgtcttgtttctgtttttaattcttgtgggtttgtttcatgtgaattgtttcctcagatcattgatgtcttaaagtgaaacagaaaaatccagaatcagaatttgacaggctggcatattcatttattcagaattccaagtgcccattgctacttctgctagataaagagataccaaggtgaagaagaaactttccctctagttgctaacagcttagaaagtacagtagacatactggggttttatttaagactttcttgaatgaagaaataaattgcattcccacggtggacagcgttagataacagtatgttcaagggctggtatttcagggtccatctccaaaacagttctgtacaaagagctcacacctgcggccaggcaagctaagtaagtcacaggtggagtgaggaatgagaataaatgggtggaagaaaatatcctaggaactttcatcttgactttaagcccattgagtgtaggaaaataattttttacatccacaattttgtttctatttaaacagcacttgtttttttatatgaagtaactcatttaatccacaactatataatattgttatccccccattaaaactgagctcagagagatg

SEQ ID NO: 445880 - DNA, 2938 bp, Homo sapiens
  misc_feature (1)..(1): n is a, c, g, or t
nggtccggaattcccgggattcaacatggaggcagaggaatcggagaaggccgcaacggagcaagagccgctggaagggacagaacagacactagatgcggaggaggagcaggaggaatccgaagaagcggcctgtggcagcaagaagcgggtagtgccaggtattgtgtacctgggccatatcccgccgcgcttccggcccctgcacgtccgcaaccttctcagcgcctatggcgaggtcggacgcgtcttctttcaggctgaggaccggttcgtgagacgcaagaagaaggcagcagcagctgccggagggaaaaagcggtcctacaccaaggactacaccgagggatgggtggagttccgtgacaagcgcatagccaagcgcgtggcggccagtctacacaacacgcctatgggtgcccgcaggcgcagccccttccgttatgatctttggaacctcaagtacttgcaccgtttcacctggtcccacctcagcgagcacctcgcctttgagcgccaggtgcgcaggcagcgcttgagagcggaggttgctcaagccaagcgtgagaccgacttctatcttcaaagtgtggaacggggacaacgctttcttgcggccgatggggaccctgctcgcccagatggctcctggacatttgcccagcgtcctactgagcaggaactgagggcccgtaaagcagcacggccagggggacgtgaacgggctcgcctggcaactgcccaggacaaggcccgctccaacaaagggctcctggccaggatctttggagccccgccaccctcagagagcatggagggaccttcccttgtcagggactcctgagggcctgggtggccccttccatttcctggccctgctctgcttcctgtctacctcatactagaatgatcgtgactacccgggcagacattttactgtgtttctcagaccaagtgtctactgatggcccaaacatggagttttgtgggcttccactgtccccactccgaactcctgtatgtgcctggctgagtcacctaattcatactgtcatactagcataattatgactattgcatatgcttgttttgtttgactcttggctgcctacgtctgtagggtcccctgaaaatcccacttcctgcccccagaaagggcctttatttccaactaggaggataatgcctagtccaggcaatctttctctgtttagcagtcacaggtgagggtggtattagcatcttttttatgtagaaaaaattgagttaatggggtggactgggttgggaagaaatacatttcctaatgtatttatagaaaataaaaatatttttatgtgcctttttatttttgttggtggggaggtcattggacaagttccaactttcatcttgtgttcccttcaccttcatatcctgatcttagagcccccctccccctgccacccaccttactgtttaacctggatttttttttctatttaatttttgtctaatatcttagcccagtttatcaatcagttatcttaagtcagcattttctaagccattgtttgaggaaacagtgacaataggtaataacacatcttagtattaagagttttacaggccactagtataagataggcatcgtggtagatgcatataaagggtggaatgggagccatggcaggtcatagagtcctctcaatgggaacctgattgatgatcacagtcttcagtggtgagtcagtcctcaccaagttttccagatcattcctacaaagtaaactgggagaataataagtctgaaagagtgtggagtgctcccacaattacaaagaatgcttcctgggtggagtgttgagttggaaccattgtaaaggtgggcaaagcctagtagagaaaccagtgcacctcaggtgcacttacatatggtggggctgaggcaaagcagccctgtaggcttcaaagaatcagtgtaagccactaaaaggaactgaaaacctaggtgtcacaataaacagtctacacagtctcacgtagaccaaaattctgatcattttccaggctgttgcatgaagtgatagagtatgattataatttctgtttgcttgtgctgtttgtttttgtttttcatctgtcaatgtgatgatctgtgttttatagggtagagtggatttgtctactttggctgtaaaataccctaatcacattatgatcttgacaggtgcactttactggggagaataaaaaggaccatacggtaaagctggtataacatttctcacaacccacatacctcttatacttggcacacaaactacgtttccatttagaaactttcgtcttgtttctgtttttaattcttgtgggtttgtttcatgtgaattgtttcctcagatcattgatgtcttaaagtgaaacagaaaaatccagaatcagaatttgacaggctggcatattcatttattcagaattccaagtgcccattgctacttctgctagataaagagataccaaggtgaagaagaaactttccctctagttgctaacagcttagaaagtacagtagacatactggggttttatttaagactttcttgaatgaagaaataaattgcattcccacggtggacagcgttagataacagtatgttcaagggctggtatttcagggtccatctccaaaacagttctgtacaaagagctcacacctgcggccaggcaagctaagtaagtcacaggtggagtgaggaatgagaataaatgggtggaagaaaatatcctaggaactttcatcttgactttaagcccattgagtgtaggaaaataattttttacatccacaattttgtttctatttaaacagcacttgtttttttatatgaagtaactcatttaatccacaactatataatattgttatccccccattaaaactgagctcagagagatg

SEQ ID NO: 445881 - DNA, 3628 bp, Homo sapiens
  misc_feature (1)..(1): n is a, c, g, or t
nggtccggaattcccgggattcaacatggaggcagaggaatcggagaaggccgcaacggagcaagagccgctggaagggacagaacagacactagatgcggaggaggagcaggaggaatccgaagaagcggcctgtggcagcaagaagcgggtagtgccaggtattgtgtacctgggccatatcccgccgcgcttccggcccctgcacgtccgcaaccttctcagcgcctatggcgaggtcggacgcgtcttctttcaggctgagggtaagtatgcaggccctgacggtgacaggaggaggttgtcgctcgctggcggggtgcaagcatgcatgtcctgttgcttcgctgcgcgaggctgaggcacgagttgctggatttcgggggtggggagtgcggtgcttggctcctggctggtgaatcagtctgtgaggatgctggggtgggcgggcggaggggatatggggagagtgggtagcgcagtgtgtctggtggttctttagttctcggattgttactatttgtgttcttatcccggctctgttcacctctctttccggacctgtttactggtttgttacatgaatacaacctgagtaaaagtctcgtcagcttttctacaaaactgaacataactctttagcattgctgcctaggtcaagaaactatttgatcaaccgcccctcttctttccaccctcaattttacattgaggctgaggacttgtgccggttttaagcagcgttcagggctggccagattaaggagtggacaattaaggaaagaattgagttagctagaggaaagggtgcgatttacagttcccttcctcctgggcaaaaactcttcaggtgggactcccactggcagatgtgaagaacgttgcgggcagtgggaggtgcttttgagtgagtgctgcataggcgtcctggacgggtctttgtctttggcgcgcagaccggttcgtgagacgcaagaagaaggcagcagcagctgccggagggaaaaagcggtcctacaccaaggactacaccgagggatgggtggagttccgtgacaagcgcatagccaagcgcgtggcggccagtctacacaacacgcctatgggtgcccgcaggcgcagccccttccgttatgatctttggaacctcaagtacttgcaccgtttcacctggtcccacctcagcgagcacctcgcctttgagcgccaggtgcgcaggcagcgcttgagagcggaggttgctcaagccaagcgtgagaccgacttctatcttcaaagtgtggaacggggacaacgctttcttgcggccgatggggaccctgctcgcccagatggctcctggacatttgcccagcgtcctactgagcaggaactgagggcccgtaaagcagcacggccagggggacgtgaacgggctcgcctggcaactgcccaggacaaggcccgctccaacaaagggctcctggccaggatctttggagccccgccaccctcagagagcatggagggaccttcccttgtcagggactcctgagggcctgggtggccccttccatttcctggccctgctctgcttcctgtctacctcatactagaatgatcgtgactacccgggcagacattttactgtgtttctcagaccaagtgtctactgatggcccaaacatggagttttgtgggcttccactgtccccactccgaactcctgtatgtgcctggctgagtcacctaattcatactgtcatactagcataattatgactattgcatatgcttgttttgtttgactcttggctgcctacgtctgtagggtcccctgaaaatcccacttcctgcccccagaaagggcctttatttccaactaggaggataatgcctagtccaggcaatctttctctgtttagcagtcacaggtgagggtggtattagcatcttttttatgtagaaaaaattgagttaatggggtggactgggttgggaagaaatacatttcctaatgtatttatagaaaataaaaatatttttatgtgcctttttatttttgttggtggggaggtcattggacaagttccaactttcatcttgtgttcccttcaccttcatatcctgatcttagagcccccctccccctgccacccaccttactgtttaacctggatttttttttctatttaatttttgtctaatatcttagcccagtttatcaatcagttatcttaagtcagcattttctaagccattgtttgaggaaacagtgacaataggtaataacacatcttagtattaagagttttacaggccactagtataagataggcatcgtggtagatgcatataaagggtggaatgggagccatggcaggtcatagagtcctctcaatgggaacctgattgatgatcacagtcttcagtggtgagtcagtcctcaccaagttttccagatcattcctacaaagtaaactgggagaataataagtctgaaagagtgtggagtgctcccacaattacaaagaatgcttcctgggtggagtgttgagttggaaccattgtaaaggtgggcaaagcctagtagagaaaccagtgcacctcaggtgcacttacatatggtggggctgaggcaaagcagccctgtaggcttcaaagaatcagtgtaagccactaaaaggaactgaaaacctaggtgtcacaataaacagtctacacagtctcacgtagaccaaaattctgatcattttccaggctgttgcatgaagtgatagagtatgattataatttctgtttgcttgtgctgtttgtttttgtttttcatctgtcaatgtgatgatctgtgttttatagggtagagtggatttgtctactttggctgtaaaataccctaatcacattatgatcttgacaggtgcactttactggggagaataaaaaggaccatacggtaaagctggtataacatttctcacaacccacatacctcttatacttggcacacaaactacgtttccatttagaaactttcgtcttgtttctgtttttaattcttgtgggtttgtttcatgtgaattgtttcctcagatcattgatgtcttaaagtgaaacagaaaaatccagaatcagaatttgacaggctggcatattcatttattcagaattccaagtgcccattgctacttctgctagataaagagataccaaggtgaagaagaaactttccctctagttgctaacagcttagaaagtacagtagacatactggggttttatttaagactttcttgaatgaagaaataaattgcattcccacggtggacagcgttagataacagtatgttcaagggctggtatttcagggtccatctccaaaacagttctgtacaaagagctcacacctgcggccaggcaagctaagtaagtcacaggtggagtgaggaatgagaataaatgggtggaagaaaatatcctaggaactttcatcttgactttaagcccattgagtgtaggaaaataattttttacatccacaattttgtttctatttaaacagcacttgtttttttatatgaagtaactcatttaatccacaactatataatattgttatccccccattaaaactgagctcagagagatg

SEQ ID NO: 445882 - DNA, 2741 bp, Homo sapiens
  misc_feature (1)..(1): n is a, c, g, or t
nggtccggaattcccgggattcaacatggaggcagaggaatcggagaaggccgcaacggagcaagagccgctggaagggacagaacagacactagatgcggaggaggagcaggaggaatccgaagaagcggcctgtggcagcaagaagcgggtagtgccaggtattgtgtacctgggccatatcccgccgcgcttccggcccctgcacgtccgcaaccttctcagcgcctatggcgaggtcggacgcgtcttctttcaggctgaggtacttgcaccgtttcacctggtcccacctcagcgagcacctcgcctttgagcgccaggtgcgcaggcagcgcttgagagcggaggttgctcaagccaagcgtgagaccgacttctatcttcaaagtgtggaacggggacaacgctttcttgcggccgatggggaccctgctcgcccagatggctcctggacatttgcccagcgtcctactgagcaggaactgagggcccgtaaagcagcacggccagggggacgtgaacgggctcgcctggcaactgcccaggacaaggcccgctccaacaaagggctcctggccaggatctttggagccccgccaccctcagagagcatggagggaccttcccttgtcagggactcctgagggcctgggtggccccttccatttcctggccctgctctgcttcctgtctacctcatactagaatgatcgtgactacccgggcagacattttactgtgtttctcagaccaagtgtctactgatggcccaaacatggagttttgtgggcttccactgtccccactccgaactcctgtatgtgcctggctgagtcacctaattcatactgtcatactagcataattatgactattgcatatgcttgttttgtttgactcttggctgcctacgtctgtagggtcccctgaaaatcccacttcctgcccccagaaagggcctttatttccaactaggaggataatgcctagtccaggcaatctttctctgtttagcagtcacaggtgagggtggtattagcatcttttttatgtagaaaaaattgagttaatggggtggactgggttgggaagaaatacatttcctaatgtatttatagaaaataaaaatatttttatgtgcctttttatttttgttggtggggaggtcattggacaagttccaactttcatcttgtgttcccttcaccttcatatcctgatcttagagcccccctccccctgccacccaccttactgtttaacctggatttttttttctatttaatttttgtctaatatcttagcccagtttatcaatcagttatcttaagtcagcattttctaagccattgtttgaggaaacagtgacaataggtaataacacatcttagtattaagagttttacaggccactagtataagataggcatcgtggtagatgcatataaagggtggaatgggagccatggcaggtcatagagtcctctcaatgggaacctgattgatgatcacagtcttcagtggtgagtcagtcctcaccaagttttccagatcattcctacaaagtaaactgggagaataataagtctgaaagagtgtggagtgctcccacaattacaaagaatgcttcctgggtggagtgttgagttggaaccattgtaaaggtgggcaaagcctagtagagaaaccagtgcacctcaggtgcacttacatatggtggggctgaggcaaagcagccctgtaggcttcaaagaatcagtgtaagccactaaaaggaactgaaaacctaggtgtcacaataaacagtctacacagtctcacgtagaccaaaattctgatcattttccaggctgttgcatgaagtgatagagtatgattataatttctgtttgcttgtgctgtttgtttttgtttttcatctgtcaatgtgatgatctgtgttttatagggtagagtggatttgtctactttggctgtaaaataccctaatcacattatgatcttgacaggtgcactttactggggagaataaaaaggaccatacggtaaagctggtataacatttctcacaacccacatacctcttatacttggcacacaaactacgtttccatttagaaactttcgtcttgtttctgtttttaattcttgtgggtttgtttcatgtgaattgtttcctcagatcattgatgtcttaaagtgaaacagaaaaatccagaatcagaatttgacaggctggcatattcatttattcagaattccaagtgcccattgctacttctgctagataaagagataccaaggtgaagaagaaactttccctctagttgctaacagcttagaaagtacagtagacatactggggttttatttaagactttcttgaatgaagaaataaattgcattcccacggtggacagcgttagataacagtatgttcaagggctggtatttcagggtccatctccaaaacagttctgtacaaagagctcacacctgcggccaggcaagctaagtaagtcacaggtggagtgaggaatgagaataaatgggtggaagaaaatatcctaggaactttcatcttgactttaagcccattgagtgtaggaaaataattttttacatccacaattttgtttctatttaaacagcacttgtttttttatatgaagtaactcatttaatccacaactatataatattgttatccccccattaaaactgagctcagagagatg

SEQ ID NO: 445883 - DNA, 2948 bp, Homo sapiens
agcggacggccgtcgtgccgctcgtgtcagtcaacatggaggcagaggaatcggagaaggccgcaacggagcaagagccgctggaagggacagaacagacactagatgcggaggaggagcaggaggaatccgaagaagcggcctgtggcagcaagaagcgggtagtgccaggtattgtgtacctgggccatatcccgccgcgcttccggcccctgcacgtccgcaaccttctcagcgcctatggcgaggtcggacgcgtcttctttcaggctgaggaccggttcgtgagacgcaagaagaaggcagcagcagctgccggagggaaaaagcggtcctacaccaaggactacaccgagggatgggtggagttccgtgacaagcgcatagccaagcgcgtggcggccagtctacacaacacgcctatgggtgcccgcaggcgcagccccttccgttatgatctttggaacctcaagtacttgcaccgtttcacctggtcccacctcagcgagcacctcgcctttgagcgccaggtgcgcaggcagcgcttgagagcggaggttgctcaagccaagcgtgagaccgacttctatcttcaaagtgtggaacggggacaacgctttcttgcggccgatggggaccctgctcgcccagatggctcctggacatttgcccagcgtcctactgagcaggaactgagggcccgtaaagcagcacggccagggggacgtgaacgggctcgcctggcaactgcccaggacaaggcccgctccaacaaagggctcctggccaggatctttggagccccgccaccctcagagagcatggagggaccttcccttgtcagggactcctgagggcctgggtggccccttccatttcctggccctgctctgcttcctgtctacctcatactagaatgatcgtgactacccgggcagacattttactgtgtttctcagaccaagtgtctactgatggcccaaacatggagttttgtgggcttccactgtccccactccgaactcctgtatgtgcctggctgagtcacctaattcatactgtcatactagcataattatgactattgcatatgcttgttttgtttgactcttggctgcctacgtctgtagggtcccctgaaaatcccacttcctgcccccagaaagggcctttatttccaactaggaggataatgcctagtccaggcaatctttctctgtttagcagtcacaggtgagggtggtattagcatcttttttatgtagaaaaaattgagttaatggggtggactgggttgggaagaaatacatttcctaatgtatttatagaaaataaaaatatttttatgtgcctttttatttttgttggtggggaggtcattggacaagttccaactttcatcttgtgttcccttcaccttcatatcctgatcttagagcccccctccccctgccacccaccttactgtttaacctggatttttttttctatttaatttttgtctaatatcttagcccagtttatcaatcagttatcttaagtcagcattttctaagccattgtttgaggaaacagtgacaataggtaataacacatcttagtattaagagttttacaggccactagtataagataggcatcgtggtagatgcatataaagggtggaatgggagccatggcaggtcatagagtcctctcaatgggaacctgattgatgatcacagtcttcagtggtgagtcagtcctcaccaagttttccagatcattcctacaaagtaaactgggagaataataagtctgaaagagtgtggagtgctcccacaattacaaagaatgcttcctgggtggagtgttgagttggaaccattgtaaaggtgggcaaagcctagtagagaaaccagtgcacctcaggtgcacttacatatggtggggctgaggcaaagcagccctgtaggcttcaaagaatcagtgtaagccactaaaaggaactgaaaacctaggtgtcacaataaacagtctacacagtctcacgtagaccaaaattctgatcattttccaggctgttgcatgaagtgatagagtatgattataatttctgtttgcttgtgctgtttgtttttgtttttcatctgtcaatgtgatgatctgtgttttatagggtagagtggatttgtctactttggctgtaaaataccctaatcacattatgatcttgacaggtgcactttactggggagaataaaaaggaccatacggtaaagctggtataacatttctcacaacccacatacctcttatacttggcacacaaactacgtttccatttagaaactttcgtcttgtttctgtttttaattcttgtgggtttgtttcatgtgaattgtttcctcagatcattgatgtcttaaagtgaaacagaaaaatccagaatcagaatttgacaggctggcatattcatttattcagaattccaagtgcccattgctacttctgctagataaagagataccaaggtgaagaagaaactttccctctagttgctaacagcttagaaagtacagtagacatactggggttttatttaagactttcttgaatgaagaaataaattgcattcccacggtggacagcgttagataacagtatgttcaagggctggtatttcagggtccatctccaaaacagttctgtacaaagagctcacacctgcggccaggcaagctaagtaagtcacaggtggagtgaggaatgagaataaatgggtggaagaaaatatcctaggaactttcatcttgactttaagcccattgagtgtaggaaaataattttttacatccacaattttgtttctatttaaacagcacttgtttttttatatgaagtaactcatttaatccacaactatataatattgttatccccccattaaaactgagctcagagagatg

SEQ ID NO: 445884 - DNA, 2896 bp, Homo sapiens
agcggacggccgtcgtgccgctcgtgtcagtcaacatggaggcagaggaatcggagaaggccgcaacggagcaagagccgctggaagggacagaacagacactagatgcggaggaggagcaggaggaatccgaagaagcggcctgtggcagcaagaagcgggtagtgccaggtattgtgtacctgggccatatcccgccgcgcttccggcccctgcacgtccgcaaccttctcagcgcctatggcgaggtcggacgcgtcttctttcaggctgaggaccggttcgtgagacgcaagaagaaggcagcagcagctgccggagggaaaaagcggtcctacaccaaggactacaccgagggatgggtggagttccgtgacaagcgcatagccaagcgcgtggcggccagtctacacaacacgcctatgggtgcccgcaggcgcagccccttccgttatgatctttggaacctcaagtacttgcaccgtttcacctggtcccacctcagcgagcacctcgcctttgagcgccaggtgcgcaggcagcgcttgagagcggaggttgctcaagccaagcgtgagaccgacttctatcttcaaagtgtggaacggggacaacgctttcttgcggccgatggggaccctgctcgcccagatggctcctggacatttgcccagcgtcctactgagcaggaactgagggcccgtaaagcagcacggccagggggacgtgaacgggctcgcctggcaactgcccaggacaaggcccgctccaacaaagggctcctggccaggatctttggagccccgccaccctcagagagcatggagggaccttcccttgtcagggactcctgagggcctgggtggccccttccatttcctggccctgctctgcttcctgtctacctcatactagaatgatcgtgactacccgggcagacattttactgtgtttctcagaccaagtgtctactgatggcccaaacatggagttttgtgggcttccactgtccccactccgaactcctgtatgtgcctggctgagtcacctaattcatactgtcatactagcataattatgactattgcatatgcttgttttgtttgactcttggctgcctacgtctgtagggtcccctgaaaatcccacttcctgcccccagaaagggcctttatttccaactaggaggataatgcctagtccaggcaatctttctctgtttagcagtcacaggtgagggtggtattagcatcttttttatgtagaaaaaattgagttaatggggtggactgggttgggaagaaatacatttcctaatgtatttatagaaaataaaaatatttttatgtgcctttttatttttgttggtggggaggtcattggacaagttccaactttcatcttgtgttcccttcaccttcatatcctgatcttagagcccccctccccctgccacccaccttactgtttaacctggatttttttttctatttaatttttgtctaatatcttagcccagtttatcaatcagttatcttaagtcagcattttctaagccattgtttgaggaaacagtgacaataggtaataacacatcttagtattaagagttttacaggccactagtataagataggcatcgtggtagatgcatataaagggtggaatgggagccatggcaggtcatagagtcctctcaatgggaacctgattgatgatcacagtcttcagtggtgagtcagtcctcaccaagttttccagatcattcctacaaagtaaactgggagaataataagtctgaaagagtgtggagtgctcccacaattacaaagaatgcttcctgggtggagtgttgagttggaaccattgtaaaggtgggcaaagcctagtagagaaaccagtgcacctcaggtgcacttacatatggtggggctgaggcaaagcagccctgtaggcttcaaagaatcagtgtaagccactaaaaggaactgaaaacctaggtgtcacaataaacagtctacacagtctcacgtagaccaaaattctgatcattttccaggctgttgcatgaagtgatagagtatgattataatttctgtttgcttgtgctgtttgtttttgtttttcatctgtcaatgtgatgatctgtgttttatagggtagagtggatttgtctactttggctgtaaaataccctaatcacattatgatcttgacaggtgcactttactggggagaataaatatacttggcacacaaactacgtttccatttagaaactttcgtcttgtttctgtttttaattcttgtgggtttgtttcatgtgaattgtttcctcagatcattgatgtcttaaagtgaaacagaaaaatccagaatcagaatttgacaggctggcatattcatttattcagaattccaagtgcccattgctacttctgctagataaagagataccaaggtgaagaagaaactttccctctagttgctaacagcttagaaagtacagtagacatactggggttttatttaagactttcttgaatgaagaaataaattgcattcccacggtggacagcgttagataacagtatgttcaagggctggtatttcagggtccatctccaaaacagttctgtacaaagagctcacacctgcggccaggcaagctaagtaagtcacaggtggagtgaggaatgagaataaatgggtggaagaaaatatcctaggaactttcatcttgactttaagcccattgagtgtaggaaaataattttttacatccacaattttgtttctatttaaacagcacttgtttttttatatgaagtaactcatttaatccacaactatataatattgttatccccccattaaaactgagctcagagagatg

SEQ ID NO: 445885 - DNA, 2894 bp, Homo sapiens
agcggacggccgtcgtgccgctcgtgtcagtcaacatggaggcagaggaatcggagaaggccgcaacggagcaagagccgctggaagggacagaacagacactagatgcggaggaggagcaggaggaatccgaagaagcggcctgtggcagcaagaagcgggtagtgccaggtattgtgtacctgggccatatcccgccgcgcttccggcccctgcacgtccgcaaccttctcagcgcctatggcgaggtcggacgcgtcttctttcaggctgaggaccggttcgtgagacgcaagaagaaggcagcagcagctgccggagggaaaaagcggtcctacaccaaggactacaccgagggatgggtggagttccgtgacaagcgcatagccaagcgcgtggcggccagtctacacaacacgcctatgggtgcccgcaggcgcagccccttccgttatgatctttggaacctcaagtacttgcaccgtttcacctggtcccacctcagcgagcacctcgcctttgagcgccaggtgcgcaggcagcgcttgagagcggaggttgctcaagccaagcgtgagaccgacttctatcttcaaagtgtggaacggggacaacgctttcttgcggccgatggggaccctgctcgcccagatggctcctggacatttgcccagcgtcctactgagcaggaactgagggcccgtaaagcagcacggccagggggacgtgaacgggctcgcctggcaactgcccaggacaaggcccgctccaacaaagggctcctggccaggatctttggagccccgccaccctcagagagcatggagggaccttcccttgtcagggactcctgagggcctgggtggccccttccatttcctggccctgctctgcttcctgtctacctcatactagaatgatcgtgactacccgggcagacattttactgtgtttctcagaccaagtgtctactgatggcccaaacatggagttttgtgggcttccactgtccccactccgaactcctgtatgtgcctggctgagtcacctaattcatactgtcatactagcataattatgactattgcatatgcttgttttgtttgactcttggctgcctacgtctgtagggtcccctgaaaatcccacttcctgcccccagaaagggcctttatttccaactaggaggataatgcctagtccaggcaatctttctctgtttagcagtcacaggtgagggtggtattagcatcttttttatgtagaaaaaattgagttaatggggtggactgggttgggaagaaatacatttcctaatgtatttatagaaaatattccaactttcatcttgtgttcccttcaccttcatatcctgatcttagagcccccctccccctgccacccaccttactgtttaacctggatttttttttctatttaatttttgtctaatatcttagcccagtttatcaatcagttatcttaagtcagcattttctaagccattgtttgaggaaacagtgacaataggtaataacacatcttagtattaagagttttacaggccactagtataagataggcatcgtggtagatgcatataaagggtggaatgggagccatggcaggtcatagagtcctctcaatgggaacctgattgatgatcacagtcttcagtggtgagtcagtcctcaccaagttttccagatcattcctacaaagtaaactgggagaataataagtctgaaagagtgtggagtgctcccacaattacaaagaatgcttcctgggtggagtgttgagttggaaccattgtaaaggtgggcaaagcctagtagagaaaccagtgcacctcaggtgcacttacatatggtggggctgaggcaaagcagccctgtaggcttcaaagaatcagtgtaagccactaaaaggaactgaaaacctaggtgtcacaataaacagtctacacagtctcacgtagaccaaaattctgatcattttccaggctgttgcatgaagtgatagagtatgattataatttctgtttgcttgtgctgtttgtttttgtttttcatctgtcaatgtgatgatctgtgttttatagggtagagtggatttgtctactttggctgtaaaataccctaatcacattatgatcttgacaggtgcactttactggggagaataaaaaggaccatacggtaaagctggtataacatttctcacaacccacatacctcttatacttggcacacaaactacgtttccatttagaaactttcgtcttgtttctgtttttaattcttgtgggtttgtttcatgtgaattgtttcctcagatcattgatgtcttaaagtgaaacagaaaaatccagaatcagaatttgacaggctggcatattcatttattcagaattccaagtgcccattgctacttctgctagataaagagataccaaggtgaagaagaaactttccctctagttgctaacagcttagaaagtacagtagacatactggggttttatttaagactttcttgaatgaagaaataaattgcattcccacggtggacagcgttagataacagtatgttcaagggctggtatttcagggtccatctccaaaacagttctgtacaaagagctcacacctgcggccaggcaagctaagtaagtcacaggtggagtgaggaatgagaataaatgggtggaagaaaatatcctaggaactttcatcttgactttaagcccattgagtgtaggaaaataattttttacatccacaattttgtttctatttaaacagcacttgtttttttatatgaagtaactcatttaatccacaactatataatattgttatccccccattaaaactgagctcagagagatg

SEQ ID NO: 445886 - DNA, 2884 bp, Homo sapiens
  misc_feature (1)..(1): n is a, c, g, or t
nggtccggaattcccgggattcaacatggaggcagaggaatcggagaaggccgcaacggagcaagagccgctggaagggacagaacagacactagatgcggaggaggagcaggaggaatccgaagaagcggcctgtggcagcaagaagcgggtagtgccaggtattgtgtacctgggccatatcccgccgcgcttccggcccctgcacgtccgcaaccttctcagcgcctatggcgaggtcggacgcgtcttctttcaggctgaggaccggttcgtgagacgcaagaagaaggcagcagcagctgccggagggaagcgcatagccaagcgcgtggcggccagtctacacaacacgcctatgggtgcccgcaggcgcagccccttccgttatgatctttggaacctcaagtacttgcaccgtttcacctggtcccacctcagcgagcacctcgcctttgagcgccaggtgcgcaggcagcgcttgagagcggaggttgctcaagccaagcgtgagaccgacttctatcttcaaagtgtggaacggggacaacgctttcttgcggccgatggggaccctgctcgcccagatggctcctggacatttgcccagcgtcctactgagcaggaactgagggcccgtaaagcagcacggccagggggacgtgaacgggctcgcctggcaactgcccaggacaaggcccgctccaacaaagggctcctggccaggatctttggagccccgccaccctcagagagcatggagggaccttcccttgtcagggactcctgagggcctgggtggccccttccatttcctggccctgctctgcttcctgtctacctcatactagaatgatcgtgactacccgggcagacattttactgtgtttctcagaccaagtgtctactgatggcccaaacatggagttttgtgggcttccactgtccccactccgaactcctgtatgtgcctggctgagtcacctaattcatactgtcatactagcataattatgactattgcatatgcttgttttgtttgactcttggctgcctacgtctgtagggtcccctgaaaatcccacttcctgcccccagaaagggcctttatttccaactaggaggataatgcctagtccaggcaatctttctctgtttagcagtcacaggtgagggtggtattagcatcttttttatgtagaaaaaattgagttaatggggtggactgggttgggaagaaatacatttcctaatgtatttatagaaaataaaaatatttttatgtgcctttttatttttgttggtggggaggtcattggacaagttccaactttcatcttgtgttcccttcaccttcatatcctgatcttagagcccccctccccctgccacccaccttactgtttaacctggatttttttttctatttaatttttgtctaatatcttagcccagtttatcaatcagttatcttaagtcagcattttctaagccattgtttgaggaaacagtgacaataggtaataacacatcttagtattaagagttttacaggccactagtataagataggcatcgtggtagatgcatataaagggtggaatgggagccatggcaggtcatagagtcctctcaatgggaacctgattgatgatcacagtcttcagtggtgagtcagtcctcaccaagttttccagatcattcctacaaagtaaactgggagaataataagtctgaaagagtgtggagtgctcccacaattacaaagaatgcttcctgggtggagtgttgagttggaaccattgtaaaggtgggcaaagcctagtagagaaaccagtgcacctcaggtgcacttacatatggtggggctgaggcaaagcagccctgtaggcttcaaagaatcagtgtaagccactaaaaggaactgaaaacctaggtgtcacaataaacagtctacacagtctcacgtagaccaaaattctgatcattttccaggctgttgcatgaagtgatagagtatgattataatttctgtttgcttgtgctgtttgtttttgtttttcatctgtcaatgtgatgatctgtgttttatagggtagagtggatttgtctactttggctgtaaaataccctaatcacattatgatcttgacaggtgcactttactggggagaataaaaaggaccatacggtaaagctggtataacatttctcacaacccacatacctcttatacttggcacacaaactacgtttccatttagaaactttcgtcttgtttctgtttttaattcttgtgggtttgtttcatgtgaattgtttcctcagatcattgatgtcttaaagtgaaacagaaaaatccagaatcagaatttgacaggctggcatattcatttattcagaattccaagtgcccattgctacttctgctagataaagagataccaaggtgaagaagaaactttccctctagttgctaacagcttagaaagtacagtagacatactggggttttatttaagactttcttgaatgaagaaataaattgcattcccacggtggacagcgttagataacagtatgttcaagggctggtatttcagggtccatctccaaaacagttctgtacaaagagctcacacctgcggccaggcaagctaagtaagtcacaggtggagtgaggaatgagaataaatgggtggaagaaaatatcctaggaactttcatcttgactttaagcccattgagtgtaggaaaataattttttacatccacaattttgtttctatttaaacagcacttgtttttttatatgaagtaactcatttaatccacaactatataatattgttatccccccattaaaactgagctcagagagatg

SEQ ID NO: 445887 - DNA, 2402 bp, Homo sapiens
  misc_feature (409)..(409): n is a, c, g, or t
tttgatgaaatgtgttcttactgggggttaattttatcactgacagccatttgtcctttagggatacactcctgaatgctggtataaagaaccacagtttcactaatatggattgacaaagactgtcttgaaagaactggttaaatgtgatagggaacatgtaggctgactgcaggtgaacaattaatttggaagtacaggtgaggtgtcttagaaccataaatgaaaaaagataggtcctggaaaatagctttaaaataagcattagccactaatggtatgcatttctaagtcatctttatttgattttgaactagaattttgtataacatgctctattttgttagtagagagatagatgttcgagattcccacaaacaggcaaacctacctataaacataggtattnagatttagtctttaagcacttgtcttaacacttgtttctctctctctaagaggagctatctataagcagcctatgtgattgaggatagagcagcaggaggaagcgagaaattagaaatcgaggatcctgaattcccaaataaggaaggtttcttgttcttacatttaaatgtgggtttgtctgagctgagaatttataatgcttcagaatagtagggtgtgttttactgaaatcattaggaagattatttttttctatcaaaattgccttcttaactgatacaacaaccttagtacagagcattcacagtaaaacatatgctctgtttaatacacattacactgtaaagcagtgagcaaattccattaattttgtagctgtatcataaagccaatgatgttattagactacttggttatgaaactgaattagatactttaaaaattattgaaatgaaagtcagtaattcaaacaagtgagtcattgaaggatattttgttgtatataaggaatcaaaatggtaaataattgaaggatatttttattgtatttaaggcaacaaaatttgagataattttcttcaaaattaaaataacttaaaaatagagtaagtattagttaaaatttctttacattagtttaaaatgtgaacttttaaaacctcacaacttggaaatttaattgtaaattttactctgaaaactaaaaacatctttgagacctttctggatagatatctgctggatataagagtgaggcatccttgggagttccttaaaattaggccagtctgggccgggtgtggtggctcacgcttgtaatcccaacactttgggaggccggggtgggccaatcgctttgagctcaggagttcgagaccagcctgggcaacatggcaaaacccgatctctacaaaaaattagctgggcatggtggtgcgtgcctgtagtcccaactacttgggaaactgaggtgaggccatcgcttgaacctaggaggttgaggttgcagtgagccgtgatgccgctgcactacagcctgggcaagagggtgagaccctgtttaaaaaaaaaattatgatggctgagtctgtgtcaaagaaaattaacttattttttggtgttaactaaattatctttaggtaattacattttatatagattgtgatgatatatggcagtagttttcctattactactacttttttttcttgtttttcctttgtgtttttgtaataccagtggagccttttcttaaaatgaaactaggcaaacctaagacaattatgcttaaggaaaaaaaaagggggggaatcttactcagaactgttttttgaaacggatcaaatggaatggctcagagcaggtgtgatggctcctcctgtaatcccaacactttgggaggctgaggtaggaggatcgtttgagcacaggagttcaagatgaagcctgagcaacatagtgagaccctgtctctatgaaaaaagttaaaaaaaaaaaaaaaaaaaaaagctaggcacggtgatacatgcatgtatcccagctacttgggagggtaaagtggaagaattgcttgagccccgggagttcaagcctgcagtaagctgtgatcaggtgactgcactccagcgtgggcgacagagtgaaaccctgtgttaaaaaaaaaaaaaaaaagtaacagcttagattaaaactgtcataattcaaaattgtaaaggaaggctgggtacagcagctcacgccattaacccctccaaggcaggttgatcgcttaagcccaggagtccaagaccaccctgggcaacatggtaaaaccccatctctatgaaaaatacaaaaattagctgggtatggtggcatgcacctgtagtcccagctactcaggaggctgacatgggaggatcatctgatctcagtctgggaggcaaaggccttagtgacccatgatagtgccactgcactccagcctgggggacagagcaagaccctgtctc

SEQ ID NO: 445888 - DNA, 2463 bp, Homo sapiens
agggagacgcgcagggaggggaggggagggaggaggctagacaaggcgggggaagggggagtagcggtggcttaagccgcgcggagcagcgcaacctgggtcgctccctgcttcgccgccgcctccggaccgagccagcggagtcagtgtcctagagaccctgtaacaccacaaagcggacgaaggagtccatgttggggaacttggcagcggagtgactgggacctgggaacctactgtggggccgcggccggaccgagcgcctcgacctcggtctgaggaaacccttttccaaagagaaatgaagaagaaaactgtatgtaccctaaatatgggagataagaagtatgaagacatggaaggtgaagaaaacggagataatactatttccactggtctgttgtacagtgaggctgacagatgcccaatatgtcttaattgtctattagaaaaggaagttggttttccagaaagctgtaatcatgtcttctgtatgacttgtattcttaaatgggcagagaggagctatctataagcagcctatgtgattgaggatagagcagcaggaggaagcgagaaattagaaatcgaggatcctgaattcccaaataaggaaggtttcttgttcttacatttaaatgtgggtttgtctgagctgagaatttataatgcttcagaatagtagggtgtgttttactgaaatcattaggaagattatttttttctatcaaaattgccttcttaactgatacaacaaccttagtacagagcattcacagtaaaacatatgctctgtttaatacacattacactgtaaagcagtgagcaaattccattaattttgtagctgtatcataaagccaatgatgttattagactacttggttatgaaactgaattagatactttaaaaattattgaaatgaaagtcagtaattcaaacaagtgagtcattgaaggatattttgttgtatataaggaatcaaaatggtaaataattgaaggatatttttattgtatttaaggcaacaaaatttgagataattttcttcaaaattaaaataacttaaaaatagagtaagtattagttaaaatttctttacattagtttaaaatgtgaacttttaaaacctcacaacttggaaatttaattgtaaattttactctgaaaactaaaaacatctttgagacctttctggatagatatctgctggatataagagtgaggcatccttgggagttccttaaaattaggccagtctgggccgggtgtggtggctcacgcttgtaatcccaacactttgggaggccggggtgggccaatcgctttgagctcaggagttcgagaccagcctgggcaacatggcaaaacccgatctctacaaaaaattagctgggcatggtggtgcgtgcctgtagtcccaactacttgggaaactgaggtgaggccatcgcttgaacctaggaggttgaggttgcagtgagccgtgatgccgctgcactacagcctgggcaagagggtgagaccctgtttaaaaaaaaaattatgatggctgagtctgtgtcaaagaaaattaacttattttttggtgttaactaaattatctttaggtaattacattttatatagattgtgatgatatatggcagtagttttcctattactactacttttttttcttgtttttcctttgtgtttttgtaataccagtggagccttttcttaaaatgaaactaggcaaacctaagacaattatgcttaaggaaaaaaaaagggggggaatcttactcagaactgttttttgaaacggatcaaatggaatggctcagagcaggtgtgatggctcctcctgtaatcccaacactttgggaggctgaggtaggaggatcgtttgagcacaggagttcaagatgaagcctgagcaacatagtgagaccctgtctctatgaaaaaagttaaaaaaaaaaaaaaaaaaaaaagctaggcacggtgatacatgcatgtatcccagctacttgggagggtaaagtggaagaattgcttgagccccgggagttcaagcctgcagtaagctgtgatcaggtgactgcactccagcgtgggcgacagagtgaaaccctgtgttaaaaaaaaaaaaaaaaagtaacagcttagattaaaactgtcataattcaaaattgtaaaggaaggctgggtacagcagctcacgccattaacccctccaaggcaggttgatcgcttaagcccaggagtccaagaccaccctgggcaacatggtaaaaccccatctctatgaaaaatacaaaaattagctgggtatggtggcatgcacctgtagtcccagctactcaggaggctgacatgggaggatcatctgatctcagtctgggaggcaaaggccttagtgacccatgatagtgccactgcactccagcctgggggacagagcaagaccctgtctc

SEQ ID NO: 445889 - DNA, 651 bp, Homo sapiens
tgtaaaccttgagtaacacctttgggacccacataagtgccattagtgatgtaggaagtgctcccaagaagcaaaattatggctttataagaagaagtttaattccttgataggaacagattgagatctatagctgcagttgcctgccatttcagacagatgattcatcttgtaaacaaatgatataaacttagggtatcaataaatacagtacagcattataatgtattttctcttatgatttttgtaaataacccttttcctttagcttccttttattggtaagaatacagtatgtaacacataacataaaaaatatattaattccactgttatcagtaaggagtctggtgaataacagttaagttttggggagtaaaaactgtttcaatttttgactgtgttgggggttggtgctcctaatccctgtgttgttaaagggtcgactatattgtatttttgaaaattgctagagagtggacgtaaagtgttctcactaaacaaattataactatgtgaggtagtgcatatattaagtagctagatttggtcattccacaatgtatatgtacttcaaaacatcatgttgtacatgagaaacacagttttatctgttagtcagttttaaaaataaaaaatattccaactaga

SEQ ID NO: 445890 - DNA, 813 bp, Homo sapiens
agggagacgcgcagggaggggaggggagggaggaggctagacaaggcgggggaagggggagtagcggtggcttaagccgcgcggagcagcgcaacctgggtcgctccctgcttcgccgccgcctccggaccgagccagcggagtcagtgtcctagagaccctgtaacaccacaaagcggacgaaggagtccatgttggggaacttggcagcggagtgactgggacctgggaacctactgtggggccgcggccggaccgagcgcctcgacctcggtctgaggaaacccttttccaaagagaaatgaagaagaaaactgtatgtaccctaaatatgggagataagaagtatgaagacatggaaggtgaagaaaacggagataatactatttccactggtctgttgtacagtgaggctgacagatgcccaatatgtcttaattgtctattagaaaaggaagttggttttccagaaagctgtaatcatgtcttctgtatgacttgtattcttaaatgggcagaggtaagtctgacacattaatgtattttaatttcctagcatgatttcatttcacctaaagagttgatactgcctttcataaattatttcacagtaatgtattttcttcctactttggacaaatttccttgtattattcaaattctgtcagtcattttcttctaattttcttttatcaggctttgattttgcaaataatattttaaatgcatacttttttaaaaaaagttaataaccttataggaagaacagatcaaactttttttctggtagaaatgcagtaattaatttttcag

SEQ ID NO: 445891 - DNA, 535 bp, Homo sapiens
aaattaactgaggatgtcccagaagatttaatgagtagatgatgtatgagttggtcttaaaggatagttaggaaattgttcaagtaaaaaaacagctgagagaaacaaaagacaagaaaaatgaaaactcatttgagaaacaggtctcctgtcatgaaaattctaaaagctgtataaggttagtgattaactttagaagtggaatgcaaatgagtggaacagaagttaactagtacaaaaaaggtattaaaaaaatgaagtggggtttaaatgtatttaatcacttattcaaaagcacacacttgataatttaaggagggactagctgaaatctgagaatctgatttgagctctactctgtttttggtgaagaattggttctggctgggcatggtggctcactcctataatcccagtgctttgggaggctaaggtgagaggatcacatgagaccaggagtttggtaccagcctggggaacatagtgaggaccgtcctcccctcctctgtctctactaaaaaataacacaaaataa

SEQ ID NO: 445892 - DNA, 898 bp, Homo sapiens
  misc_feature (785)..(785): n is a, c, g, or t
gaaagtgccagaaaagcgacgtcctcagggcgggagcaggggacgccgcaacgtagtctgcgagaatgcaggaaggcggcagtgaagcggtcggtcggcggggccgcggcaaagtggggaggaaactcatcccgggcaggcgtcagggtggctggagagcgcagcacgcgcgaacagaacgggggcaggcgacaggaaaacgtgtgagcgcgcggctgaaagcgactgggacctggaaacccttttccaaagagtaaacagatactgaaaatacgaagaaacagaagaaaaagtgacatccgatctagatgcgtgatgatcctaaattctgcgtgacgaaacgatagacaatggactgtccccaatgtggcataagcagaagaaaagtaaactcgttgggccgtgaatccgaagaagccgagacaatcgcatgagaaatgtttgaagagcagtcgtcattcgaggacagaacaatacgacaattgaacaatttcagggcaacattcgttgtgacatacaagaagcttcgggtatctagcgttggcgcgtattactaaacgcgatgagtaagaatggcagcagtgcaagcctgtgtgctagcagtgcacctatagcaggacagctacgttatgtggccgtagtcaataggattcagaaagtgcaagaatcagggtgagcacaagatccgcaaagaccacgctcttcacgggcacattcacaacgagtctccagggacgtgcaatctgttcaacgttccgctggaaacaagcagatccctactaagncgtagaaacacgtgcaagcaggcacgtcactcaattctcgatagcacgcacgcacgatgcgactctgcgactggaccattctcgcatccaagactgcggaccgctgaggaaca

SEQ ID NO: 445893 - DNA, 545 bp, Homo sapiens
  misc_feature (117)..(117): n is a, c, g, or t
  misc_feature (331)..(331): n is a, c, g, or t
  misc_feature (345)..(345): n is a, c, g, or t
  misc_feature (373)..(373): n is a, c, g, or t
gttcattaatcattgtgaaaaatacagaaaccaaaaccaatatggctggtttctttcccacacccctccaccctgttcaggatagtcatttgttctcacaaccggcagaggcagaanagggttggaatgaagactccgaaggcccccaggatgggaaacatgaggctgctgttgtccgaggcataggggttgggtgtgcgggggcctgactgcacccggttcttattggtctgttttttgagattagacccttcatcatattcttcttcttcttcttcctcttctttcttctccaatcccggatgaggctgaagctttggtacatctaacncaaggaagaaaacnctgttaagacccccagcatttaagtaanagagacccttaaaagcagcaaataagccccaataaagagattgcagtgattgccccagggtccatgagatattgtttgtattatgaagttggagtgctgtctactgaaattatactcttaaataaatatgtatgtagtgtgtaatattttctaataaattcttttgataaac

SEQ ID NO: 445894 - DNA, 684 bp, Homo sapiens
agggagacgcgcagggaggggaggggagggaggaggctagacaaggcgggggaagggggagtagcggtggcttaagccgcgcggagcagcgcaacctgggtcgctccctgcttcgccgccgcctccggaccgagccagcggagtcagtgtcgaaacccttttccaaagagaaatgaagaagaaaactgtatgtaccctaaatatgggagataagaagtatgaagacatggaaggtgaagaaaacggagataatactatttccactggtctgttgtacagtgaggctgacagatgcccaatatgtcttaattgtctattagaaaaggaagttggttttccagaaagctgtaatcatgtcttctgtatgacttgtattcttaaatgggcagaggtaagtctgacacattaatgtattttaatttcctagcatgatttcatttcacctaaagagttgatactgcctttcataaattatttcacagtaatgtattttcttcctactttggacaaatttccttgtattattcaaattctgtcagtcattttcttctaattttcttttatcaggctttgattttgcaaataatattttaaatgcatacttttttaaaaaaagttaataaccttataggaagaacagatcaaactttttttctggtagaaatgcagtaattaatttttcag

SEQ ID NO: 445895 - DNA, 311 bp, Homo sapiens
agggagacgcgcagggaggggaggggagggaggaggctagacaaggcgggggaagggggagtagcggtggcttaagccgcgcggagcagcgcaacctgggtcgctccctgcttcgccgccgcctccggaccgagccagcggagtcagtgtcctagagaccctgtaacaccacaaagcggacgaaggagtccatgttggggaacttggcagcggagtgactgggacctgggaacctactgtggggccgcggccggaccgagcgcctcgacctcggtctgagaaaaaaaaaaaaaaaaaaaaaaaaaaaaaaa

SEQ ID NO: 445896 - DNA, 7869 bp, Homo sapiens
tgtaaaccttgagtaacacctttgggacccacataagtgccattagtgatgtaggaagtgctcccaagaagcaaaattatggctttataagaagaagtttaattccttgataggaacagattgagatctatagctgcagttgcctgccatttcagacagatgattcatcttgtaaacaaatgatataaacttagggtatcaataaatacagtacagcattataatgtattttctcttatgatttttgtaaataacccttttcctttagcttccttttattggtaagaatacagtatgtaacacataacataaaaaatatattaattccactgttatcagtaaggagtctggtgaataacagttaagttttggggagtaaaaactgtttcaatttttgactgtgttgggggttggtgctcctaatccctgtgttgttaaagggtcgactatattgtatttttgaaaattgctagagagtggacgtaaagtgttctcactaaacaaattataactatgtgaggtagtgcatatattaagtagctagatttggtcattccacaatgtatatgtacttcaaaacatcatgttgtacatgagaaacacagttttatctgttagtcagttttaaaaataaaaaatattccaactagaaactctgttgtagtttttgaaattacaacttggaggctttgaggaactgattagaagtctcctttctgtttcaggctttcatatccaaaccatagatctttagaagtaacatctgttaattaattattaataaatagtttgagtctttattaattcatggataacttgaccattttctctctccttttgcttagataatcccagatcatggccgggcacagtagctcacgcctgtattcccagcagtttgggaggccgaggcaggcagatcacttgaactcaggagtttgagaccagcttgggcaacatggcaaaaccctgtctctattaaaaatacaaaaattagctgggcatggtagtgcatgcctgtagtcccagctacctgggaggctgaggtgggaggatcgcttgagcctgggaggttgaggcttctgtgcgcgatgattgctccagtgatcacgccattgcactccagcctgggtgacagagtgagaccctgtctccaaaaaaaaaaaaaattaagcaagtagcagttacaagaccaaaagttattttcctttttttttttctctataaaattgcccatttggaccaaatctagttataacttatttcagtgtcattaagaaagttgatgaataagtcatattactcagatgttagtagctatgcatttattaatagttttatttataagtatttagtttcactctgttgcagactattttatgctaaaattagctaaagccaaattactatttcttaaaacatattttttactttttttttttttttaaatattattaggtacttcttgcaagggatatgcattagcacatactcaagaaggggaagaaaagaagcaaacttctggtacatcaaataccagaggatcaagacgaaaacctgcaatgacaactcctacaaggaggtctacacgtaacacaagagctgaaacagccagtcagtctcagagatccccaatatcagacaattctgggtgtgatgccccaggtaacagtaatccatctttaagtgttccctcttcagctgagtcagaaaagcaaacaagacaggctccaaaacggaagtctgtaagaagaggaagaaaaccacctttactgaaaaagaaacttcggagctctgtagctgcccctgaaaaatcatcttccaatgattcagtagatgaagaaacagcagaatctgacacatcacctgtgttagaaaaagagcaccaaccagatgtagacagtagtaacatttgtactgtgcagactcatgtagaaaaccagtctgctaattgcttgaaaagttgcaatgagcaaatagaagaaagtgagaagcatactgcaaattatgatacagaggaaagagtaggatcttcatcttctgagtcttgtgctcaagatcttcctgtgctagttggtgaggaaggggaagttaaaaaactcgagaatacaggtatagaggctaatgttttgtgtttggaaagtgagatttctgaaaatattcttgaaaaaggaggtgatccattggaaaagcaagaccagatatctggactttcacaatcagaggtaaagacagatgtatgtacagttcatcttccaaatgattttcctacatgtttaacatctgaaagcaaagtgtaccaacctgtatcttgtcccctaagtgacttatctgagaatgtagagtcagtggttaatgaagaaaaaataacagagagttccctagtagaaattactgaacataaagattttacactaaaaacagaggagcttatagagagccccaagttagaatcttctgagggtgaaattatacagacagtggacagacaatctgttaagagcccagaggttcaattgcttgggcatgttgaaactgaagatgtagaaataattgcaacatgtgatacttttgggaatgaagatttcaataatattcaagactctgaaaataacttactaaaaaataatcttctgaacaccaaattggaaaaatctttagaagaaaagaatgaatcgctgaccgaacatcctagatctacagagttgcctaaaacacacattgaacagattcagaagcattttagtgaggacaacaatgaaatgatacctatggagtgtgattcattttgcagtgaccaaaatgaatctgaagttgaaccatctgtaaatgctgatcttaaacaaatgaatgaaaattctgtgacacactgttctgaaaataatatgccgtcttctgatcttgcggatgaaaaggttgaaactgtttctcaaccatctgaaagcccaaaagataccatagataaaaccaaaaagcctcgtactcgaagatctagatttcattctccatctacaacttggtcacccaacaaagacactccacaagaaaagaagcggccccagtctccatctcccagaagagaaactgggaaagaaagcaggaagtctcaatcaccatctcctaagaatgagtcagccagaggccggaaaaaatcccgttctcagtccccaaaaaaggatattgcaagagaaaggaggcaatctcagtctcggtctccaaaaagggatactactagggaaagcagaagatctgaatcactgtccccaagaagagaaacttctagagagaacaaaagatctcagccaagagtgaaagattcttccccaggagaaaaatccaggtcccagagcagagaacgagaaagtgatagagatgggcagaggagagagagagaaaggagaaccagaaagtggtctaggtccagatctcattctaggtccccctcaagatgtagaacaaaaagtaagagttcatcatttggtagaattgacagagatagttactctccccggtggaagggaagatgggcaaatgatggttggagatgtccacgaggaaatgatcggtacagaaagaatgacccagagaaacagaatgaaaatacaagaaaagaaaaaaatgacatccatctagatgctgatgatccaaattctgctgacaaacatagaaatgactgtcccaattggataacagaaaaaataaactctgggcctgatccaagaaccagaaatccagaaaagttgaaagagtctcattgggaagaaaatagaaatgaaaattcaggaaattcttggaataaaaactttggttctggttgggtatctaaccgtggtagaggcagaggcaaccgtggcagaggcacttacagaagtagttttgcctataaagatcagaatgaaaatcggtggcaaaatcgaaaacccctctcagggaattcaaacagttcagggagtgaatctttcaagtttgtggaacagcaatcctataagcgaaaaagtgaacaggagttctcatttgatacaccagcagatagatctggatggacatctgcatccagctgggccgtgagaaagactttgccagcagatgtacaaaactactactcacgacgaggcagaaattcttcaggtccacagtctggatggatgaaacaagaggaggaaacatctggacaggattctagcctaaaagaccaaacaaaccagcaagttgatggttctcagctacctataaatatgatgcaaccgcaaatgaatgtaatgcagcaacaaatgaatgcacaacaccagcctatgaatatcttcccatatccagtgggtgttcatgctcctttgatgaacatccaacgcaatccatttaacattcatcctcagctacccttgcatctccacacaggagtgcccctcatgcaggtagccactcctaccagtgtatctcagggactaccaccaccaccaccccctcccccaccatcccaacaagtcaactacattgcttcacaaccagatggaaagcaattgcagggtattcctagttcttctcatgtaagtaataacatgagtacaccagttttgcctgctccgacagcagccccaggaaatacgggaatggttcagggaccaagttctggtaatacttcgtcatcaagtcacagcaaagcctctaatgctgctgtaaaattggcagaaagcaaagtaagtgttgcagtggaagccagcgcagatagctcgaagacagacaagaaattgcaaattcaagaaaaagcagcacaagaggtaaaattggccatcaagccattttaccaaaataaagatatcaccaaggaagaatataaagaaattgtacggaaagcagtagataaagtttgtcatagtaagagtggagaagtaaattctactaaagtggcaaatctggttaaagcctatgtagacaaatacaaatattcacggaaggggagccaaaagaaaactctggaagaacctgtgtctactgaaaaaaacataggctgaaatggggaacgctgtcaaggacattatcaggatatctgcaaagtgcaatttcaacatgtaccattaactgaaaatcatacataactgtgattgaaatttggttttgataaaattatttttttaacataggatatgatgttttgttctaaataaatataggtctgcactgcaacttctgtatccttccttcccctccaccctcccccacaaaattcaagggaaagtaaagggtttaaaggaatgtgcatctttactaggactgtgttatagtgtggatactggaaaatgtatagctttttgattagggcaatggagtgcataaattagaaacttctaagtgcactggttttcaaagagatatatataatgcatttattctgtcaggttaaaatataaagtatgatctttatgattttttccctctaattatagaaagttaaataatgtattaccatgaaaaatgtttctaatattaaatagaacatatcagttgcaaagttcctaatgtgtatttttaaagcacatatctgaataaattgcctagatagaaaaaaaattatcacgagtaaaatttagtgttcaaaacattgagacactcttcacctattgtatgaccaaataaaggttatgctgcttgtttttcttttgtgcctttgtttacccctaattgagataagcagtttgacttactagattacaactttggcagttcaaagtctttgttgaagactttgaggaaaaagatttggaaaaattgttgactttcggccgggcatgatggctcacgcctgtaatcccagcactttgggaggccgaggtggcggatcacctgaggtcaggagttcgagaccagcctggccaacatggtgaaatcccgtctctactaaaaatacaaaaattagccaggcgtggtggtgggcgcctgtaatcccagctatgcgagaggctgaggcaggagaatcagttgaacccgggaggcggggattgcagtgagccgagaccatgccattgcactccagcctgggcaacaggagcaaatctccgtctcaaaaaaaagaaaaaaaaaagtgttgactttgtagaaattatgttctttcatagtatcttcttctacccgttgcagacgataaattatttgtgccaattcgagaattgctgttaggctgttatcctcccttccttggggctaagaattacaagactcatggcactggcgtaaagttgttgtttatctaatcactgatgaaatattttcacacttgaaaatccccaaatgctttacaatgaatgaagtgttaatttggtgaccaggtggtagccattagccatgttgcaaaattctagacagtaaaacctgtgttttagaaacagaggggaaatttaaataatggagtcctggttagcctttcagggattagggatttgggtttttttttttctctctttttaatactagaatatctcagtttttataaaaggtaagttttctccatgataaactgattccagtaagaattttcagtacataccaagtacctggaaagttcttcagataagttaatagatccaaggagatacatgcctcagtgagataaactgacctttttactagctaaactatttagccagagcaatactctgtagaactgtgcttttctaaagtaaagattatctgtttctcaattttatgtgcataatacttttcctggtgctagctttgataggcaaaatattttgaaatgttggtcccataatgattgtgctagttcataagctttgttgttatgagtgtaatcataaaaatatttccaagcagtttttgacctttattctacatttctgggcatttgtaatatggtattctactggtatatatttttaaagtttgcgtttagattatggtaaagaaatttcaagcatatttcttctaataaagtattaagacagtgtttcagaatatcaaggcacacctccttagttgttttagattagaactctagaaacaattttgtgaacattgaaagtattttgagttaagcctaagctgattaatcacacaatacatacttttcctgcattttctttcagtgacatttgagaattgggtgacattttaaaatgtgttttataccatttagcttttgcaaacaagttctaaagttttggagaaaaagtgatgtggtcaagagttgaagtctcatatatctttagtagcactcccatgaattatttccgtgacagtaacaagtgtgtgttccatgtctgatttggggcactggttagactgcattaatagctacttgattagaattcgaacttttaaaattttgaaatgtttaagaatgtattagaaaatgcatgctttatgttgaaaaaatacattgctttaatattcctcattcttgagttaagaaatttatgttaattttgcatgggcacaaacttaatcagaaacattttgtggagttacatttcctcttattatttatcaaggttcagtattgatctttgaaaccttggtcccgttaacttactagtcacattgaccaatgttttatagaaatgcctagaattttgagactaatagtagttatccattaacattccaaaagttttgtgctttttaaaatttgttttggtaattatcacatttttttctcttaccttcctttaaatggccacagtgtgtactgctggaatgttccatccaaaagatgtagcttcagaagcacagtgattgccccagggtccatgagatattgtttgtattatgaagttggagtgctgtctactgaaattatactcttaaataaatatgtatgtagtgtgtaatattttctaataaattcttttgataaac

SEQ ID NO: 445897 - DNA, 8078 bp, Homo sapiens
tgtaaaccttgagtaacacctttgggacccacataagtgccattagtgatgtaggaagtgctcccaagaagcaaaattatggctttataagaagaagtttaattccttgataggaacagattgagatctatagctgcagttgcctgccatttcagacagatgattcatcttgtaaacaaatgatataaacttagggtatcaataaatacagtacagcattataatgtattttctcttatgatttttgtaaataacccttttcctttagcttccttttattggtaagaatacagtatgtaacacataacataaaaaatatattaattccactgttatcagtaaggagtctggtgaataacagttaagttttggggagtaaaaactgtttcaatttttgactgtgttgggggttggtgctcctaatccctgtgttgttaaagggtcgactatattgtatttttgaaaattgctagagagtggacgtaaagtgttctcactaaacaaattataactatgtgaggtagtgcatatattaagtagctagatttggtcattccacaatgtatatgtacttcaaaacatcatgttgtacatgagaaacacagttttatctgttagtcagttttaaaaataaaaaatattccaactagaaactctgttgtagtttttgaaattacaacttggaggctttgaggaactgattagaagtctcctttctgtttcaggctttcatatccaaaccatagatctttagaagtaacatctgttaattaattattaataaatagtttgagtctttattaattcatggataacttgaccattttctctctccttttgcttagataatcccagatcatggccgggcacagtagctcacgcctgtattcccagcagtttgggaggccgaggcaggcagatcacttgaactcaggagtttgagaccagcttgggcaacatggcaaaaccctgtctctattaaaaatacaaaaattagctgggcatggtagtgcatgcctgtagtcccagctacctgggaggctgaggtgggaggatcgcttgagcctgggaggttgaggcttctgtgcgcgatgattgctccagtgatcacgccattgcactccagcctgggtgacagagtgagaccctgtctccaaaaaaaaaaaaaattaagcaagtagcagttacaagaccaaaagttattttcctttttttttttctctataaaattgcccatttggaccaaatctagttataacttatttcagtgtcattaagaaagttgatgaataagtcatattactcagatgttagtagctatgcatttattaatagttttatttataagtatttagtttcactctgttgcagactattttatgctaaaattagctaaagccaaattactatttcttaaaacatattttttactttttttttttttttaaatattattaggtacttcttgcaagggatatgcattagcacatactcaagaaggggaagaaaagaagcaaacttctggtacatcaaataccagaggatcaagacgaaaacctgcaatgacaactcctacaaggaggtctacacgtaacacaagagctgaaacagccagtcagtctcagagatccccaatatcagacaattctgggtgtgatgccccaggtaacagtaatccatctttaagtgttccctcttcagctgagtcagaaaagcaaacaagacaggctccaaaacggaagtctgtaagaagaggaagaaaaccacctttactgaaaaagaaacttcggagctctgtagctgcccctgaaaaatcatcttccaatgattcagtagatgaagaaacagcagaatctgacacatcacctgtgttagaaaaagagcaccaaccagatgtagacagtagtaacatttgtactgtgcagactcatgtagaaaaccagtctgctaattgcttgaaaagttgcaatgagcaaatagaagaaagtgagaagcatactgcaaattatgatacagaggaaagagtaggatcttcatcttctgagtcttgtgctcaagatcttcctgtgctagttggtgaggaaggggaagttaaaaaactcgagaatacaggtatagaggctaatgttttgtgtttggaaagtgagatttctgaaaatattcttgaaaaaggaggtgatccattggaaaagcaagaccagatatctggactttcacaatcagaggtaaagacagatgtatgtacagttcatcttccaaatgattttcctacatgtttaacatctgaaagcaaagtgtaccaacctgtatcttgtcccctaagtgacttatctgagaatgtagagtcagtggttaatgaagaaaaaataacagagagttccctagtagaaattactgaacataaagattttacactaaaaacagaggagcttatagagagccccaagttagaatcttctgagggtgaaattatacagacagtggacagacaatctgttaagagcccagaggttcaattgcttgggcatgttgaaactgaagatgtagaaataattgcaacatgtgatacttttgggaatgaagatttcaataatattcaagactctgaaaataacttactaaaaaataatcttctgaacaccaaattggaaaaatctttagaagaaaagaatgaatcgctgaccgaacatcctagatctacagagttgcctaaaacacacattgaacagattcagaagcattttagtgaggacaacaatgaaatgatacctatggagtgtgattcattttgcagtgaccaaaatgaatctgaagttgaaccatctgtaaatgctgatcttaaacaaatgaatgaaaattctgtgacacactgttctgaaaataatatgccgtcttctgatcttgcggatgaaaaggttgaaactgtttctcaaccatctgaaagcccaaaagataccatagataaaaccaaaaagcctcgtactcgaagatctagatttcattctccatctacaacttggtcacccaacaaagacactccacaagaaaagaagcggccccagtctccatctcccagaagagaaactgggaaagaaagcaggaagtctcaatcaccatctcctaagaatgagtcagccagaggccggaaaaaatcccgttctcagtccccaaaaaaggatattgcaagagaaaggaggcaatctcagtctcggtctccaaaaagggatactactagggaaagcagaagatctgaatcactgtccccaagaagagaaacttctagagagaacaaaagatctcagccaagagtgaaagattcttccccaggagaaaaatccaggtcccagagcagagaacgagaaagtgatagagatgggcagaggagagagagagaaaggagaaccagaaagtggtctaggtccagatctcattctaggtccccctcaagatgtagaacaaaaagtaagagttcatcatttggtagaattgacagagatagttactctccccggtggaagggaagatgggcaaatgatggttggagatgtccacgaggaaatgatcggtacagaaagaatgacccagagaaacagaatgaaaatacaagaaaagaaaaaaatgacatccatctagatgctgatgatccaaattctgctgacaaacatagaaatgactgtcccaattggataacagaaaaaataaactctgggcctgatccaagaaccagaaatccagaaaagttgaaagagtctcattgggaagaaaatagaaatgaaaattcaggaaattcttggaataaaaactttggttctggttgggtatctaaccgtggtagaggcagaggcaaccgtggcagaggcacttacagaagtagttttgcctataaagatcagaatgaaaatcggtggcaaaatcgaaaacccctctcagggaattcaaacagttcagggagtgaatctttcaagtttgtggaacagcaatcctataagcgaaaaagtgaacaggagttctcatttgatacaccagcagatagatctggatggacatctgcatccagctgggccgtgagaaagactttgccagcagatgtacaaaactactactcacgacgaggcagaaattcttcaggtccacagtctggatggatgaaacaagaggaggaaacatctggacaggattctagcctaaaagaccaaacaaaccagcaagttgatggttctcagctacctataaatatgatgcaaccgcaaatgaatgtaatgcagcaacaaatgaatgcacaacaccagcctatgaatatcttcccatatccagtgggtgttcatgctcctttgatgaacatccaacgcaatccatttaacattcatcctcagctacccttgcatctccacacaggagtgcccctcatgcaggtagccactcctaccagtgtatctcagggactaccaccaccaccaccccctcccccaccatcccaacaagtcaactacattgcttcacaaccagatggaaagcaattgcagggtattcctagttcttctcatgtaagtaataacatgagtacaccagttttgcctgctccgacagcagccccaggaaatacgggaatggttcagggaccaagttctggtaatacttcgtcatcaagtcacagcaaagcctctaatgctgctgtaaaattggcagaaagcaaagtaagtgttgcagtggaagccagcgcagatagctcgaagacagacaagaaattgcaaattcaagaaaaagcagcacaagaggtaaaattggccatcaagccattttaccaaaataaagatatcaccaaggaagaatataaagaaattgtacggaaagcagtagataaagtttgtcatagtaagagtggagaagtaaattctactaaagtggcaaatctggttaaagcctatgtagacaaatacaaatattcacggaaggggagccaaaagaaaactctggaagaacctgtgtctactgaaaaaaacataggctgaaatggggaacgctgtcaaggacattatcaggatatctgcaaagtgcaatttcaacatgtaccattaactgaaaatcatacataactgtgattgaaatttggttttgataaaattatttttttaacataggatatgatgttttgttctaaataaatataggtctgcactgcaacttctgtatccttccttcccctccaccctcccccacaaaattcaagggaaagtaaagggtttaaaggaatgtgcatctttactaggactgtgttatagtgtggatactggaaaatgtatagctttttgattagggcaatggagtgcataaattagaaacttctaagtgcactggttttcaaagagatatatataatgcatttattctgtcaggttaaaatataaagtatgatctttatgattttttccctctaattatagaaagttaaataatgtattaccatgaaaaatgtttctaatattaaatagaacatatcagttgcaaagttcctaatgtgtatttttaaagcacatatctgaataaattgcctagatagaaaaaaaattatcacgagtaaaatttagtgttcaaaacattgagacactcttcacctattgtatgaccaaataaaggttatgctgcttgtttttcttttgtgcctttgtttacccctaattgagataagcagtttgacttactagattacaactttggcagttcaaagtctttgttgaagactttgaggaaaaagatttggaaaaattgttgactttcggccgggcatgatggctcacgcctgtaatcccagcactttgggaggccgaggtggcggatcacctgaggtcaggagttcgagaccagcctggccaacatggtgaaatcccgtctctactaaaaatacaaaaattagccaggcgtggtggtgggcgcctgtaatcccagctatgcgagaggctgaggcaggagaatcagttgaacccgggaggcggggattgcagtgagccgagaccatgccattgcactccagcctgggcaacaggagcaaatctccgtctcaaaaaaaagaaaaaaaaaagtgttgactttgtagaaattatgttctttcatagtatcttcttctacccgttgcagacgataaattatttgtgccaattcgagaattgctgttaggctgttatcctcccttccttggggctaagaattacaagactcatggcactggcgtaaagttgttgtttatctaatcactgatgaaatattttcacacttgaaaatccccaaatgctttacaatgaatgaagtgttaatttggtgaccaggtggtagccattagccatgttgcaaaattctagacagtaaaacctgtgttttagaaacagaggggaaatttaaataatggagtcctggttagcctttcagggattagggatttgggtttttttttttctctctttttaatactagaatatctcagtttttataaaaggtaagtttaaaatgtttattgtgccattattttaactggcatcttgaaagaacagtaggttttctccatgataaactgattccagtaagaattttcagtacataccaagtacctggaaagttcttcagataagttaatagatccaaggagatacatgcctcagtgagataaactgacctttttactagctaaactatttagccagagcaatactctgtagaactgtgcttttctaaagtaaagattatctgtttctcaattttatgtgcataatacttttcctggtgctagctttgataggcaaaatattttgaaatgttggtcccataatgattgtgctagttcataagctttgttgttatgagtgtaatcataaaaatatttccaagcagtttttgacctttattctacatttctgggcatttgtaatatggtattctactggtatatatttttaaagtttgcgtttagattatggtaaagaaatttcaagcatatttcttctaataaagtattaagacagtgtttcagaatatcaaggcacacctccttagttgttttagattagaactctagaaacaattttgtgaacattgaaagtattttgagttaagcctaagctgattaatcacacaatacatacttttcctgcattttctttcagtgacatttgagaattgggtgacattttaaaatgtgttttataccatttagcttttgcaaacaagttctaaagttttggagaaaaagtgatgtggtcaagagttgaagtctcatatatctttagtagcactcccatgaattatttccgtgacagtaacaagtgtgtgttccatgtctgatttggggcactggttagactgcattaatagctacttgattagaattcgaacttttaaaattttgaaatgtttaagaatgtattagaaaatgcatgctttatgttgaaaaaatacattgctttaatattcctcattcttgagttaagaaatttatgttaattttgcatgggcacaaacttaatcagaaacattttgtggagttacatttcctcttattatttatcaaggttcagtattgatctttgaaaccttggtcccgttaacttactagtcacattgaccaatgttttatagaaatgcctagaattttgagactaatagtagttatccattaacattccaaaagttttgtgctttttaaaatttgttttggtaattatcacatttttttctcttaccttcctttaaatggccacagtgtgtactgctggaatgttccatccaaaagatgtagcttcagaagcacagtgattgccccagggtccatgagatattgtttgtattatgaagttggagtgctgtctactgaaattatactcttaaataaatatgtatgtagtgtgtaatattttctaataaattcttttgataaacaaaaaaaaaaaaaaagggcggccgcccttttttttttttttttctcatttaacttttttaatgggtctcaaaattctgtgacaaatttttggtcaagttgtttccattaaaaagtactgattttaaaaactaataacttaaaactgccacacgca

SEQ ID NO: 445898 - DNA, 7946 bp, Homo sapiens
gaaagtgccagaaaagcgacgtcctcagggcgggagcaggggacgccgcaacgtagtctgcgagaatgcaggaaggcggcagtgaagcggtcggtcggcggggccgcggcaaagtggggaggaaactcatcccgggcaggcgtcagggtggctggagagcgcagcacgcgcgaacagaacgggggcaggcgacaggaaaacgtgtgagcgcgcggctgaaagcgactgggacctgggaaacccttttccaaagagaaatgaagaagaaaactgtatgtaccctaaatatgggagataagaagtatgaagacatggaaggtgaagaaaacggagataatactatttccactggtctgttgtacagtgaggctgacagatgcccaatatgtcttaattgtctattagaaaaggaagttggttttccagaaagctgtaatcatgtcttctgtatgacttgtattcttaaatgggcagaggaattatttattcccataaaaaccttagagacactggcttcatgtcctattgaccgtaaaccttttcaggcagtgtttaaattcagtgcattggaaggttatgttaaggttcaagtaaaaaaacagctgagagaaacaaaagacaagaaaaatgaaaactcatttgagaaacaggtctcctgtcatgaaaattctaaaagctgtataagaagaaaagccatcgtaagagaagatctattaagtgcaaaagtttgtgacttgaagtggatacatagaaactctttatacagtgaaacaggaggaaagaaaaatgcagcaataaagataaataagcctcagagatcaaattggagtacaaatcagtgcttcagaaattttttctccaatatgttttcttctgttagccactctggagaatcttcctttacctatagagcttattgtacagaatttatagaagccagtgaaatcagtgcattgattaggcagaagagacatgaactggaattgtcatggtttcctgatacattacctggaattggaagaattggttttataccctggaatgttgaaacagaagtccttcctctcatttcttctgtgttgccaagaactatttttccaacaagtaccatatctttcgaacattttggtacttcttgcaagggatatgcattagcacatactcaagaaggggaagaaaagaagcaaacttctggtacatcaaataccagaggatcaagacgaaaacctgcaatgacaactcctacaaggaggtctacacgtaacacaagagctgaaacagccagtcagtctcagagatccccaatatcagacaattctgggtgtgatgccccaggtaacagtaatccatctttaagtgttccctcttcagctgagtcagaaaagcaaacaagacaggctccaaaacggaagtctgtaagaagaggaagaaaaccacctttactgaaaaagaaacttcggagctctgtagctgcccctgaaaaatcatcttccaatgattcagtagatgaagaaacagcagaatctgacacatcacctgtgttagaaaaagagcaccaaccagatgtagacagtagtaacatttgtactgtgcagactcatgtagaaaaccagtctgctaattgcttgaaaagttgcaatgagcaaatagaagaaagtgagaagcatactgcaaattatgatacagaggaaagagtaggatcttcatcttctgagtcttgtgctcaagatcttcctgtgctagttggtgaggaaggggaagttaaaaaactcgagaatacaggtatagaggctaatgttttgtgtttggaaagtgagatttctgaaaatattcttgaaaaaggaggtgatccattggaaaagcaagaccagatatctggactttcacaatcagaggtaaagacagatgtatgtacagttcatcttccaaatgattttcctacatgtttaacatctgaaagcaaagtgtaccaacctgtatcttgtcccctaagtgacttatctgagaatgtagagtcagtggttaatgaagaaaaaataacagagagttccctagtagaaattactgaacataaagattttacactaaaaacagaggagcttatagagagccccaagttagaatcttctgagggtgaaattatacagacagtggacagacaatctgttaagagcccagaggttcaattgcttgggcatgttgaaactgaagatgtagaaataattgcaacatgtgatacttttgggaatgaagatttcaataatattcaagactctgaaaataacttactaaaaaataatcttctgaacaccaaattggaaaaatctttagaagaaaagaatgaatcgctgaccgaacatcctagatctacagagttgcctaaaacacacattgaacagattcagaagcattttagtgaggacaacaatgaaatgatacctatggagtgtgattcattttgcagtgaccaaaatgaatctgaagttgaaccatctgtaaatgctgatcttaaacaaatgaatgaaaattctgtgacacactgttctgaaaataatatgccgtcttctgatcttgcggatgaaaaggttgaaactgtttctcaaccatctgaaagcccaaaagataccatagataaaaccaaaaagcctcgtactcgaagatctagatttcattctccatctacaacttggtcacccaacaaagacactccacaagaaaagaagcggccccagtctccatctcccagaagagaaactgggaaagaaagcaggaagtctcaatcaccatctcctaagaatgagtcagccagaggccggaaaaaatcccgttctcagtccccaaaaaaggatattgcaagagaaaggaggcaatctcagtctcggtctccaaaaagggatactactagggaaagcagaagatctgaatcactgtccccaagaagagaaacttctagagagaacaaaagatctcagccaagagtgaaagattcttccccaggagaaaaatccaggtcccagagcagagaacgagaaagtgatagagatgggcagaggagagagagagaaaggagaaccagaaagtggtctaggtccagatctcattctaggtccccctcaagatgtagaacaaaaagtaagagttcatcatttggtagaattgacagagatagttactctccccggtggaagggaagatgggcaaatgatggttggagatgtccacgaggaaatgatcggtacagaaagaatgacccagagaaacagaatgaaaatacaagaaaagaaaaaaatgacatccatctagatgctgatgatccaaattctgctgacaaacatagaaatgactgtcccaattggataacagaaaaaataaactctgggcctgatccaagaaccagaaatccagaaaagttgaaagagtctcattgggaagaaaatagaaatgaaaattcaggaaattcttggaataaaaactttggttctggttgggtatctaaccgtggtagaggcagaggcaaccgtggcagaggcacttacagaagtagttttgcctataaagatcagaatgaaaatcggtggcaaaatcgaaaacccctctcagggaattcaaacagttcagggagtgaatctttcaagtttgtggaacagcaatcctataagcgaaaaagtgaacaggagttctcatttgatacaccagcagatagatctggatggacatctgcatccagctgggccgtgagaaagactttgccagcagatgtacaaaactactactcacgacgaggcagaaattcttcaggtccacagtctggatggatgaaacaagaggaggaaacatctggacaggattctagcctaaaagaccaaacaaaccagcaagttgatggttctcagctacctataaatatgatgcaaccgcaaatgaatgtaatgcagcaacaaatgaatgcacaacaccagcctatgaatatcttcccatatccagtgggtgttcatgctcctttgatgaacatccaacgcaatccatttaacattcatcctcagctacccttgcatctccacacaggagtgcccctcatgcaggtagccactcctaccagtgtatctcagggactaccaccaccaccaccccctcccccaccatcccaacaagtcaactacattgcttcacaaccagatggaaagcaattgcagggtattcctagttcttctcatgtaagtaataacatgagtacaccagttttgcctgctccgacagcagccccaggaaatacgggaatggttcagggaccaagttctggtaatacttcgtcatcaagtcacagcaaagcctctaatgctgctgtaaaattggcagaaagcaaagtaagtgttgcagtggaagccagcgcagatagctcgaagacagacaaggcaagttcaaggttgagagcaaccttcataattctgtatatgataaaggagaaaaaatatcagctttttattgtatgagtggtgaagggaatttcttattggctgtctaaatgccattattatttgaaggattctctctagatgtgttgatgtccagtaaattactggtaatattttataattgtttttagaaatgtttgatatgttttagtaaataaactgttttatatttgtcacgttaatagttggagagtctcttattgtaaatatgaagtattttcaatttcttgtttgggattttgtgagagcagtatgactggcaaataataaattatacattttcttctcatcagaaattgcaaattcaagaaaaagcagcacaagaggtaaaattggccatcaagccattttaccaaaataaagatatcaccaaggaagaatataaagaaattgtacggaaagcagtagataaagtttgtcatagtaagagtggagaagtaaattctactaaagtggcaaatctggttaaagcctatgtagacaaatacaaatattcacggaaggggagccaaaagaaaactctggaagaacctgtgtctactgaaaaaaacataggctgaaatggggaacgctgtcaaggacattatcaggatatctgcaaagtgcaatttcaacatgtaccattaactgaaaatcatacataactgtgattgaaatttggttttgataaaattatttttttaacataggatatgatgttttgttctaaataaatataggtctgcactgcaacttctgtatccttccttcccctccaccctcccccacaaaattcaagggaaagtaaagggtttaaaggaatgtgcatctttactaggactgtgttatagtgtggatactggaaaatgtatagctttttgattagggcaatggagtgcataaattagaaacttctaagtgcactggttttcaaagagatatatataatgcatttattctgtcaggttaaaatataaagtatgatctttatgattttttccctctaattatagaaagttaaataatgtattaccatgaaaaatgtttctaatattaaatagaacatatcagttgcaaagttcctaatgtgtatttttaaagcacatatctgaataaattgcctagatagaaaaaaaattatcacgagtaaaatttagtgttcaaaacattgagacactcttcacctattgtatgaccaaataaaggttatgctgcttgtttttcttttgtgcctttgtttacccctaattgagataagcagtttgacttactagattacaactttggcagttcaaagtctttgttgaagactttgaggaaaaagatttggaaaaattgttgactttcggccgggcatgatggctcacgcctgtaatcccagcactttgggaggccgaggtggcggatcacctgaggtcaggagttcgagaccagcctggccaacatggtgaaatcccgtctctactaaaaatacaaaaattagccaggcgtggtggtgggcgcctgtaatcccagctatgcgagaggctgaggcaggagaatcagttgaacccgggaggcggggattgcagtgagccgagaccatgccattgcactccagcctgggcaacaggagcaaatctccgtctcaaaaaaaagaaaaaaaaaagtgttgactttgtagaaattatgttctttcatagtatcttcttctacccgttgcagacgataaattatttgtgccaattcgagaattgctgttaggctgttatcctcccttccttggggctaagaattacaagactcatggcactggcgtaaagttgttgtttatctaatcactgatgaaatattttcacacttgaaaatccccaaatgctttacaatgaatgaagtgttaatttggtgaccaggtggtagccattagccatgttgcaaaattctagacagtaaaacctgtgttttagaaacagaggggaaatttaaataatggagtcctggttagcctttcagggattagggatttgggtttttttttttctctctttttaatactagaatatctcagtttttataaaaggtaagtttaaaatgtttattgtgccattattttaactggcatcttgaaagaacagtaggttttctccatgataaactgattccagtaagaattttcagtacataccaagtacctggaaagttcttcagataagttaatagatccaaggagatacatgcctcagtgagataaactgacctttttactagctaaactatttagccagagcaatactctgtagaactgtgcttttctaaagtaaagattatctgtttctcaattttatgtgcataatacttttcctggtgctagctttgataggcaaaatattttgaaatgttggtcccataatgattgtgctagttcataagctttgttgttatgagtgtaatcataaaaatatttccaagcagtttttgacctttattctacatttctgggcatttgtaatatggtattctactggtatatatttttaaagtttgcgtttagattatggtaaagaaatttcaagcatatttcttctaataaagtattaagacagtgtttcagaatatcaaggcacacctccttagttgttttagattagaactctagaaacaattttgtgaacattgaaagtattttgagttaagcctaagctgattaatcacacaatacatacttttcctgcattttctttcagtgacatttgagaattgggtgacattttaaaatgtgttttataccatttagcttttgcaaacaagttctaaagttttggagaaaaagtgatgtggtcaagagttgaagtctcatatatctttagtagcactcccatgaattatttccgtgacagtaacaagtgtgtgttccatgtctgatttggggcactggttagactgcattaatagctacttgattagaattcgaacttttaaaattttgaaatgtttaagaatgtattagaaaatgcatgctttatgttgaaaaaatacattgctttaatattcctcattcttgagttaagaaatttatgttaattttgcatgggcacaaacttaatcagaaacattttgtggagttacatttcctcttattatttatcaaggttcagtattgatctttgaaaccttggtcccgttaacttactagtcacattgaccaatgttttatagaaatgcctagaattttgagactaatagtagttatccattaacattccaaaagttttgtgctttttaaaatttgttttggtaattatcacatttttttctcttaccttcctttaaatggccacagtgtgtactgctggaatgttccatccaaaagatgtagcttcagaagcacagtgattgccccagggtccatgagatattgtttgtattatgaagttggagtgctgtctactgaaattatactcttaaataaatatgtatgtagtgtgtaatattttctaataaattcttttgataaac

SEQ ID NO: 445899 - DNA, 7637 bp, Homo sapiens
agggagacgcgcagggaggggaggggagggaggaggctagacaaggcgggggaagggggagtagcggtggcttaagccgcgcggagcagcgcaacctgggtcgctccctgcttcgccgccgcctccggaccgagccagcggagtcagtgtcctagagaccctgtaacaccacaaagcggacgaaggagtccatgttggggaacttggcagcggagtgactgggacctgggaacctactgtggggccgcggccggaccgagcgcctcgacctcggtctgaggaaacccttttccaaagagaaatgaagaagaaaactgtatgtaccctaaatatgggagataagaagtatgaagacatggaaggtgaagaaaacggagataatactatttccactggtctgttgtacagtgaggctgacagatgcccaatatgtcttaattgtctattagaaaaggaagttggttttccagaaagctgtaatcatgtcttctgtatgacttgtattcttaaatgggcagaggaattatttattcccataaaaaccttagagacactggcttcatgtcctattgaccgtaaaccttttcaggcagtgtttaaattcagtgcattggaaggttatgttaaggttcaagtaaaaaaacagctgagagaaacaaaagacaagaaaaatgaaaactcatttgagaaacaggtctcctgtcatgaaaattctaaaagctgtataagaagaaaagccatcgtaagagaagatctattaagtgcaaaagtttgtgacttgaagtggatacatagaaactctttatacagtgaaacaggaggaaagaaaaatgcagcaataaagataaataagcctcagagatcaaattggagtacaaatcagtgcttcagaaattttttctccaatatgttttcttctgttagccactctggagaatcttcctttacctatagagcttattgtacagaatttatagaagccagtgaaatcagtgcattgattaggcagaagagacatgaactggaattgtcatggtttcctgatacattacctggaattggaagaattggttttataccctggaatgttgaaacagaagtccttcctctcatttcttctgtgttgccaagaactatttttccaacaagtaccatatctttcgaacattttggtacttcttgcaagggatatgcattagcacatactcaagaaggggaagaaaagaagcaaacttctggtacatcaaataccagaggatcaagacgaaaacctgcaatgacaactcctacaaggaggtctacacgtaacacaagagctgaaacagccagtcagtctcagagatccccaatatcagacaattctgggtgtgatgccccaggtaacagtaatccatctttaagtgttccctcttcagctgagtcagaaaagcaaacaagacaggctccaaaacggaagtctgtaagaagaggaagaaaaccacctttactgaaaaagaaacttcggagctctgtagctgcccctgaaaaatcatcttccaatgattcagtagatgaagaaacagcagaatctgacacatcacctgtgttagaaaaagagcaccaaccagatgtagacagtagtaacatttgtactgtgcagactcatgtagaaaaccagtctgctaattgcttgaaaagttgcaatgagcaaatagaagaaagtgagaagcatactgcaaattatgatacagaggaaagagtaggatcttcatcttctgagtcttgtgctcaagatcttcctgtgctagttggtgaggaaggggaagttaaaaaactcgagaatacaggtatagaggctaatgttttgtgtttggaaagtgagatttctgaaaatattcttgaaaaaggaggtgatccattggaaaagcaagaccagatatctggactttcacaatcagaggtaaagacagatgtatgtacagttcatcttccaaatgattttcctacatgtttaacatctgaaagcaaagtgtaccaacctgtatcttgtcccctaagtgacttatctgagaatgtagagtcagtggttaatgaagaaaaaataacagagagttccctagtagaaattactgaacataaagattttacactaaaaacagaggagcttatagagagccccaagttagaatcttctgagggtgaaattatacagacagtggacagacaatctgttaagagcccagaggttcaattgcttgggcatgttgaaactgaagatgtagaaataattgcaacatgtgatacttttgggaatgaagatttcaataatattcaagactctgaaaataacttactaaaaaataatcttctgaacaccaaattggaaaaatctttagaagaaaagaatgaatcgctgaccgaacatcctagatctacagagttgcctaaaacacacattgaacagattcagaagcattttagtgaggacaacaatgaaatgatacctatggagtgtgattcattttgcagtgaccaaaatgaatctgaagttgaaccatctgtaaatgctgatcttaaacaaatgaatgaaaattctgtgacacactgttctgaaaataatatgccgtcttctgatcttgcggatgaaaaggttgaaactgtttctcaaccatctgaaagcccaaaagataccatagataaaaccaaaaagcctcgtactcgaagatctagatttcattctccatctacaacttggtcacccaacaaagacactccacaagaaaagaagcggccccagtctccatctcccagaagagaaactgggaaagaaagcaggaagtctcaatcaccatctcctaagaatgagtcagccagaggccggaaaaaatcccgttctcagtccccaaaaaaggatattgcaagagaaaggaggcaatctcagtctcggtctccaaaaagggatactactagggaaagcagaagatctgaatcactgtccccaagaagagaaacttctagagagaacaaaagatctcagccaagagtgaaagattcttccccaggagaaaaatccaggtcccagagcagagaacgagaaagtgatagagatgggcagaggagagagagagaaaggagaaccagaaagtggtctaggtccagatctcattctaggtccccctcaagatgtagaacaaaaagtaagagttcatcatttggtagaattgacagagatagttactctccccggtggaagggaagatgggcaaatgatggttggagatgtccacgaggaaatgatcggtacagaaagaatgacccagagaaacagaatgaaaatacaagaaaagaaaaaaatgacatccatctagatgctgatgatccaaattctgctgacaaacatagaaatgactgtcccaattggataacagaaaaaataaactctgggcctgatccaagaaccagaaatccagaaaagttgaaagagtctcattgggaagaaaatagaaatgaaaattcaggaaattcttggaataaaaactttggttctggttgggtatctaaccgtggtagaggcagaggcaaccgtggcagaggcacttacagaagtagttttgcctataaagatcagaatgaaaatcggtggcaaaatcgaaaacccctctcagggaattcaaacagttcagggagtgaatctttcaagtttgtggaacagcaatcctataagcgaaaaagtgaacaggagttctcatttgatacaccagcagatagatctggatggacatctgcatccagctgggccgtgagaaagactttgccagcagatgtacaaaactactactcacgacgaggcagaaattcttcaggtccacagtctggatggatgaaacaagaggaggaaacatctggacaggattctagcctaaaagaccaaacaaaccagcaagttgatggttctcagctacctataaatatgatgcaaccgcaaatgaatgtaatgcagcaacaaatgaatgcacaacaccagcctatgaatatcttcccatatccagtgggtgttcatgctcctttgatgaacatccaacgcaatccatttaacattcatcctcagctacccttgcatctccacacaggagtgcccctcatgcaggtagccactcctaccagtgtatctcagggactaccaccaccaccaccccctcccccaccatcccaacaagtcaactacattgcttcacaaccagatggaaagcaattgcagggtattcctagttcttctcatgtaagtaataacatgagtacaccagttttgcctgctccgacagcagccccaggaaatacgggaatggttcagggaccaagttctggtaatacttcgtcatcaagtcacagcaaagcctctaatgctgctgtaaaattggcagaaagcaaagtaagtgttgcagtggaagccagcgcagatagctcgaagacagacaagaaattgcaaattcaagaaaaagcagcacaagaggtaaaattggccatcaagccattttaccaaaataaagatatcaccaaggaagaatataaagaaattgtacggaaagcagtagataaagtttgtcatagtaagagtggagaagtaaattctactaaagtggcaaatctggttaaagcctatgtagacaaatacaaatattcacggaaggggagccaaaagaaaactctggaagaacctgtgtctactgaaaaaaacataggctgaaatggggaacgctgtcaaggacattatcaggatatctgcaaagtgcaatttcaacatgtaccattaactgaaaatcatacataactgtgattgaaatttggttttgataaaattatttttttaacataggatatgatgttttgttctaaataaatataggtctgcactgcaacttctgtatccttccttcccctccaccctcccccacaaaattcaagggaaagtaaagggtttaaaggaatgtgcatctttactaggactgtgttatagtgtggatactggaaaatgtatagctttttgattagggcaatggagtgcataaattagaaacttctaagtgcactggttttcaaagagatatatataatgcatttattctgtcaggttaaaatataaagtatgatctttatgattttttccctctaattatagaaagttaaataatgtattaccatgaaaaatgtttctaatattaaatagaacatatcagttgcaaagttcctaatgtgtatttttaaagcacatatctgaataaattgcctagatagaaaaaaaattatcacgagtaaaatttagtgttcaaaacattgagacactcttcacctattgtatgaccaaataaaggttatgctgcttgtttttcttttgtgcctttgtttacccctaattgagataagcagtttgacttactagattacaactttggcagttcaaagtctttgttgaagactttgaggaaaaagatttggaaaaattgttgactttcggccgggcatgatggctcacgcctgtaatcccagcactttgggaggccgaggtggcggatcacctgaggtcaggagttcgagaccagcctggccaacatggtgaaatcccgtctctactaaaaatacaaaaattagccaggcgtggtggtgggcgcctgtaatcccagctatgcgagaggctgaggcaggagaatcagttgaacccgggaggcggggattgcagtgagccgagaccatgccattgcactccagcctgggcaacaggagcaaatctccgtctcaaaaaaaagaaaaaaaaaagtgttgactttgtagaaattatgttctttcatagtatcttcttctacccgttgcagacgataaattatttgtgccaattcgagaattgctgttaggctgttatcctcccttccttggggctaagaattacaagactcatggcactggcgtaaagttgttgtttatctaatcactgatgaaatattttcacacttgaaaatccccaaatgctttacaatgaatgaagtgttaatttggtgaccaggtggtagccattagccatgttgcaaaattctagacagtaaaacctgtgttttagaaacagaggggaaatttaaataatggagtcctggttagcctttcagggattagggatttgggtttttttttttctctctttttaatactagaatatctcagtttttataaaaggtaagtttaaaatgtttattgtgccattattttaactggcatcttgaaagaacagtaggttttctccatgataaactgattccagtaagaattttcagtacataccaagtacctggaaagttcttcagataagttaatagatccaaggagatacatgcctcagtgagataaactgacctttttactagctaaactatttagccagagcaatactctgtagaactgtgcttttctaaagtaaagattatctgtttctcaattttatgtgcataatacttttcctggtgctagctttgataggcaaaatattttgaaatgttggtcccataatgattgtgctagttcataagctttgttgttatgagtgtaatcataaaaatatttccaagcagtttttgacctttattctacatttctgggcatttgtaatatggtattctactggtatatatttttaaagtttgcgtttagattatggtaaagaaatttcaagcatatttcttctaataaagtattaagacagtgtttcagaatatcaaggcacacctccttagttgttttagattagaactctagaaacaattttgtgaacattgaaagtattttgagttaagcctaagctgattaatcacacaatacatacttttcctgcattttctttcagtgacatttgagaattgggtgacattttaaaatgtgttttataccatttagcttttgcaaacaagttctaaagttttggagaaaaagtgatgtggtcaagagttgaagtctcatatatctttagtagcactcccatgaattatttccgtgacagtaacaagtgtgtgttccatgtctgatttggggcactggttagactgcattaatagctacttgattagaattcgaacttttaaaattttgaaatgtttaagaatgtattagaaaatgcatgctttatgttgaaaaaatacattgctttaatattcctcattcttgagttaagaaatttatgttaattttgcatgggcacaaacttaatcagaaacattttgtggagttacatttcctcttattatttatcaaggttcagtattgatctttgaaaccttggtcccgttaacttactagtcacattgaccaatgttttatagaaatgcctagaattttgagactaatagtagttatccattaacattccaaaagttttgtgctttttaaaatttgttttggtaattatcacatttttttctcttaccttcctttaaatggccacagtgtgtactgctggaatgttccatccaaaagatgtagcttcagaagcacagtgattgccccagggtccatgagatattgtttgtattatgaagttggagtgctgtctactgaaattatactcttaaataaatatgtatgtagtgtgtaatattttctaataaattcttttgataaac

SEQ ID NO: 445900 - DNA, 5276 bp, Homo sapiens
agggagacgcgcagggaggggaggggagggaggaggctagacaaggcgggggaagggggagtagcggtggcttaagccgcgcggagcagcgcaacctgggtcgctccctgcttcgccgccgcctccggaccgagccagcggagtcagtgtcctagagaccctgtaacaccacaaagcggacgaaggagtccatgttggggaacttggcagcggagtgactgggacctgggaacctactgtggggccgcggccggaccgagcgcctcgacctcggtctgaggaaacccttttccaaagagaaatgaagaagaaaactgtatgtaccctaaatatgggagataagaagtatgaagacatggaaggtgaagaaaacggagataatactatttccactggtctgttgtacagtgaggctgacagatgcccaatatgtcttaattgtctattagaaaaggaagttggttttccagaaagctgtaatcatgtcttctgtatgacttgtattcttaaatgggcagaggaattatttattcccataaaaaccttagagacactggcttcatgtcctattgaccgtaaaccttttcaggcagtgtttaaattcagtgcattggaaggttatgttaaggttcaagtaaaaaaacagctgagagaaacaaaagacaagaaaaatgaaaactcatttgagaaacaggtctcctgtcatgaaaattctaaaagctgtataagaagaaaagccatcgtaagagaagatctattaagtgcaaaagtttgtgacttgaagtggatacatagaaactctttatacagtgaaacaggaggaaagaaaaatgcagcaataaagataaataagcctcagagatcaaattggagtacaaatcagtgcttcagaaattttttctccaatatgttttcttctgttagccactctggagaatcttcctttacctatagagcttattgtacagaatttatagaagccagtgaaatcagtgcattgattaggcagaagagacatgaactggaattgtcatggtttcctgatacattacctggaattggaagaattggttttataccctggaatgttgaaacagaagtccttcctctcatttcttctgtgttgccaagaactatttttccaacaagtaccatatctttcgaacattttggtacttcttgcaagggatatgcattagcacatactcaagaaggggaagaaaagaagcaaacttctggtacatcaaataccagaggatcaagacgaaaacctgcaatgacaactcctacaaggaggtctacacgtaacacaagagctgaaacagccagtcagtctcagagatccccaatatcagacaattctgggtgtgatgccccagcagatagatctggatggacatctgcatccagctgggccgtgagaaagactttgccagcagatgtacaaaactactactcacgacgaggcagaaattcttcaggtccacagtctggatggatgaaacaagaggaggaaacatctggacaggattctagcctaaaagaccaaacaaaccagcaagttgatggttctcagctacctataaatatgatgcaaccgcaaatgaatgtaatgcagcaacaaatgaatgcacaacaccagcctatgaatatcttcccatatccagtgggtgttcatgctcctttgatgaacatccaacgcaatccatttaacattcatcctcagctacccttgcatctccacacaggagtgcccctcatgcaggtagccactcctaccagtgtatctcagggactaccaccaccaccaccccctcccccaccatcccaacaagtcaactacattgcttcacaaccagatggaaagcaattgcagggtattcctagttcttctcatgtaagtaataacatgagtacaccagttttgcctgctccgacagcagccccaggaaatacgggaatggttcagggaccaagttctggtaatacttcgtcatcaagtcacagcaaagcctctaatgctgctgtaaaattggcagaaagcaaagtaagtgttgcagtggaagccagcgcagatagctcgaagacagacaagaaattgcaaattcaagaaaaagcagcacaagaggtaaaattggccatcaagccattttaccaaaataaagatatcaccaaggaagaatataaagaaattgtacggaaagcagtagataaagtttgtcatagtaagagtggagaagtaaattctactaaagtggcaaatctggttaaagcctatgtagacaaatacaaatattcacggaaggggagccaaaagaaaactctggaagaacctgtgtctactgaaaaaaacataggctgaaatggggaacgctgtcaaggacattatcaggatatctgcaaagtgcaatttcaacatgtaccattaactgaaaatcatacataactgtgattgaaatttggttttgataaaattatttttttaacataggatatgatgttttgttctaaataaatataggtctgcactgcaacttctgtatccttccttcccctccaccctcccccacaaaattcaagggaaagtaaagggtttaaaggaatgtgcatctttactaggactgtgttatagtgtggatactggaaaatgtatagctttttgattagggcaatggagtgcataaattagaaacttctaagtgcactggttttcaaagagatatatataatgcatttattctgtcaggttaaaatataaagtatgatctttatgattttttccctctaattatagaaagttaaataatgtattaccatgaaaaatgtttctaatattaaatagaacatatcagttgcaaagttcctaatgtgtatttttaaagcacatatctgaataaattgcctagatagaaaaaaaattatcacgagtaaaatttagtgttcaaaacattgagacactcttcacctattgtatgaccaaataaaggttatgctgcttgtttttcttttgtgcctttgtttacccctaattgagataagcagtttgacttactagattacaactttggcagttcaaagtctttgttgaagactttgaggaaaaagatttggaaaaattgttgactttcggccgggcatgatggctcacgcctgtaatcccagcactttgggaggccgaggtggcggatcacctgaggtcaggagttcgagaccagcctggccaacatggtgaaatcccgtctctactaaaaatacaaaaattagccaggcgtggtggtgggcgcctgtaatcccagctatgcgagaggctgaggcaggagaatcagttgaacccgggaggcggggattgcagtgagccgagaccatgccattgcactccagcctgggcaacaggagcaaatctccgtctcaaaaaaaagaaaaaaaaaagtgttgactttgtagaaattatgttctttcatagtatcttcttctacccgttgcagacgataaattatttgtgccaattcgagaattgctgttaggctgttatcctcccttccttggggctaagaattacaagactcatggcactggcgtaaagttgttgtttatctaatcactgatgaaatattttcacacttgaaaatccccaaatgctttacaatgaatgaagtgttaatttggtgaccaggtggtagccattagccatgttgcaaaattctagacagtaaaacctgtgttttagaaacagaggggaaatttaaataatggagtcctggttagcctttcagggattagggatttgggtttttttttttctctctttttaatactagaatatctcagtttttataaaaggtaagtttaaaatgtttattgtgccattattttaactggcatcttgaaagaacagtaggttttctccatgataaactgattccagtaagaattttcagtacataccaagtacctggaaagttcttcagataagttaatagatccaaggagatacatgcctcagtgagataaactgacctttttactagctaaactatttagccagagcaatactctgtagaactgtgcttttctaaagtaaagattatctgtttctcaattttatgtgcataatacttttcctggtgctagctttgataggcaaaatattttgaaatgttggtcccataatgattgtgctagttcataagctttgttgttatgagtgtaatcataaaaatatttccaagcagtttttgacctttattctacatttctgggcatttgtaatatggtattctactggtatatatttttaaagtttgcgtttagattatggtaaagaaatttcaagcatatttcttctaataaagtattaagacagtgtttcagaatatcaaggcacacctccttagttgttttagattagaactctagaaacaattttgtgaacattgaaagtattttgagttaagcctaagctgattaatcacacaatacatacttttcctgcattttctttcagtgacatttgagaattgggtgacattttaaaatgtgttttataccatttagcttttgcaaacaagttctaaagttttggagaaaaagtgatgtggtcaagagttgaagtctcatatatctttagtagcactcccatgaattatttccgtgacagtaacaagtgtgtgttccatgtctgatttggggcactggttagactgcattaatagctacttgattagaattcgaacttttaaaattttgaaatgtttaagaatgtattagaaaatgcatgctttatgttgaaaaaatacattgctttaatattcctcattcttgagttaagaaatttatgttaattttgcatgggcacaaacttaatcagaaacattttgtggagttacatttcctcttattatttatcaaggttcagtattgatctttgaaaccttggtcccgttaacttactagtcacattgaccaatgttttatagaaatgcctagaattttgagactaatagtagttatccattaacattccaaaagttttgtgctttttaaaatttgttttggtaattatcacatttttttctcttaccttcctttaaatggccacagtgtgtactgctggaatgttccatccaaaagatgtagcttcagaagcacagtgattgccccagggtccatgagatattgtttgtattatgaagttggagtgctgtctactgaaattatactcttaaataaatatgtatgtagtgtgtaatattttctaataaattcttttgataaac

SEQ ID NO: 445901 - DNA, 3793 bp, Homo sapiens
ttactacaagccatttgactttactgccttattttttccaggctttaaagtgagggcactttaatatttgttaatattcctaaagatccttgcaggaaagatataattctttaaatgctattctcctccttgtgtttagtattgctgtcaaaatgttacaatacatatatataatttaaaagtcatcttgacatatctaaataaggccccgtttaagaatgttactcatttttctttaaagggccctttagatataattacctgaaatatgcatttttctttagtactaaggttggtttgctttgtgttttttaatgttatttctaatgcatcactaaaagacttctatcgagtacaagtaattcattaactgatgataactctttaaaacagggtattcctagttcttctcatgtaagtaataacatgagtacaccagttttgcctgctccgacagcagccccaggaaatacgggaatggttcagggaccaagttctggtaatacttcgtcatcaagtcacagcaaagcctctaatgctgctgtaaaattggcagaaagcaaagtaagtgttgcagtggaagccagcgcagatagctcgaagacagacaagaaattgcaaattcaagaaaaagcagcacaagaggtaaaattggccatcaagccattttaccaaaataaagatatcaccaaggaagaatataaagaaattgtacggaaagcagtagataaagtttgtcatagtaagagtggagaagtaaattctactaaagtggcaaatctggttaaagcctatgtagacaaatacaaatattcacggaaggggagccaaaagaaaactctggaagaacctgtgtctactgaaaaaaacataggctgaaatggggaacgctgtcaaggacattatcaggatatctgcaaagtgcaatttcaacatgtaccattaactgaaaatcatacataactgtgattgaaatttggttttgataaaattatttttttaacataggatatgatgttttgttctaaataaatataggtctgcactgcaacttctgtatccttccttcccctccaccctcccccacaaaattcaagggaaagtaaagggtttaaaggaatgtgcatctttactaggactgtgttatagtgtggatactggaaaatgtatagctttttgattagggcaatggagtgcataaattagaaacttctaagtgcactggttttcaaagagatatatataatgcatttattctgtcaggttaaaatataaagtatgatctttatgattttttccctctaattatagaaagttaaataatgtattaccatgaaaaatgtttctaatattaaatagaacatatcagttgcaaagttcctaatgtgtatttttaaagcacatatctgaataaattgcctagatagaaaaaaaattatcacgagtaaaatttagtgttcaaaacattgagacactcttcacctattgtatgaccaaataaaggttatgctgcttgtttttcttttgtgcctttgtttacccctaattgagataagcagtttgacttactagattacaactttggcagttcaaagtctttgttgaagactttgaggaaaaagatttggaaaaattgttgactttcggccgggcatgatggctcacgcctgtaatcccagcactttgggaggccgaggtggcggatcacctgaggtcaggagttcgagaccagcctggccaacatggtgaaatcccgtctctactaaaaatacaaaaattagccaggcgtggtggtgggcgcctgtaatcccagctatgcgagaggctgaggcaggagaatcagttgaacccgggaggcggggattgcagtgagccgagaccatgccattgcactccagcctgggcaacaggagcaaatctccgtctcaaaaaaaagaaaaaaaaaagtgttgactttgtagaaattatgttctttcatagtatcttcttctacccgttgcagacgataaattatttgtgccaattcgagaattgctgttaggctgttatcctcccttccttggggctaagaattacaagactcatggcactggcgtaaagttgttgtttatctaatcactgatgaaatattttcacacttgaaaatccccaaatgctttacaatgaatgaagtgttaatttggtgaccaggtggtagccattagccatgttgcaaaattctagacagtaaaacctgtgttttagaaacagaggggaaatttaaataatggagtcctggttagcctttcagggattagggatttgggtttttttttttctctctttttaatactagaatatctcagtttttataaaaggtaagtttaaaatgtttattgtgccattattttaactggcatcttgaaagaacagtaggttttctccatgataaactgattccagtaagaattttcagtacataccaagtacctggaaagttcttcagataagttaatagatccaaggagatacatgcctcagtgagataaactgacctttttactagctaaactatttagccagagcaatactctgtagaactgtgcttttctaaagtaaagattatctgtttctcaattttatgtgcataatacttttcctggtgctagctttgataggcaaaatattttgaaatgttggtcccataatgattgtgctagttcataagctttgttgttatgagtgtaatcataaaaatatttccaagcagtttttgacctttattctacatttctgggcatttgtaatatggtattctactggtatatatttttaaagtttgcgtttagattatggtaaagaaatttcaagcatatttcttctaataaagtattaagacagtgtttcagaatatcaaggcacacctccttagttgttttagattagaactctagaaacaattttgtgaacattgaaagtattttgagttaagcctaagctgattaatcacacaatacatacttttcctgcattttctttcagtgacatttgagaattgggtgacattttaaaatgtgttttataccatttagcttttgcaaacaagttctaaagttttggagaaaaagtgatgtggtcaagagttgaagtctcatatatctttagtagcactcccatgaattatttccgtgacagtaacaagtgtgtgttccatgtctgatttggggcactggttagactgcattaatagctacttgattagaattcgaacttttaaaattttgaaatgtttaagaatgtattagaaaatgcatgctttatgttgaaaaaatacattgctttaatattcctcattcttgagttaagaaatttatgttaattttgcatgggcacaaacttaatcagaaacattttgtggagttacatttcctcttattatttatcaaggttcagtattgatctttgaaaccttggtcccgttaacttactagtcacattgaccaatgttttatagaaatgcctagaattttgagactaatagtagttatccattaacattccaaaagttttgtgctttttaaaatttgttttggtaattatcacatttttttctcttaccttcctttaaatggccacagtgtgtactgctggaatgttccatccaaaagatgtagcttcagaagcacagtgattgccccagggtccatgagatattgtttgtattatgaagttggagtgctgtctactgaaattatactcttaaataaatatgtatgtagtgtgtaatattttctaataaattcttttgataaac

SEQ ID NO: 445902 - DNA, 4708 bp, Homo sapiens
gaaagtgccagaaaagcgacgtcctcagggcgggagcaggggacgccgcaacgtagtctgcgagaatgcaggaaggcggcagtgaagcggtcggtcggcggggccgcggcaaagtggggaggaaactcatcccgggcaggcgtcagggtggctggagagcgcagcacgcgcgaacagaacgggggcaggcgacaggaaaacgtgtgagcgcgcggctgaaagcgactgggacctgggaaacccttttccaaagagaaatgaagaagaaaactgtatgtaccctaaatatgggagataagaagtatgaagacatggaaggtgaagaaaacggagataatactatttccactggtctgttgtacagtgaggctgacagatgcccaatatgtcttaattgtctattagaaaaggaagttggttttccagaaagctgtaatcatgtcttctgtatgacttgtattcttaaatgggcagaggaattatttattcccataaaaaccttagagacactggcttcatgtcctattgaccgtaaaccttttcaggcagtgtttaaattcagtgcattggaaggttatgttaaggttcaagtaaaaaaacagctgagagaaacaaaagacaagaaaaatgaaaactcatttgagaaacaggtctcctgtcatgaaaattctaaaagctgtataagaagaaaagccatcgtaagagaagatctattaagtgcaaaagtttgtgacttgaagtggatacatagaaactctttatacagtgaaacaggaggaaagaaaaatgcagcaataaagataaataagcctcagagatcaaattggagtacaaatcagtgcttcagaaattttttctccaatatgttttcttctgttagccactctggagaatcttcctttacctatagagcttattgtacagaatttatagaagccagtgaaatcagtgcattgattaggcagaagagacatgaactggaattgtcatggtttcctgatacattacctggaattggaagaattggttttataccctggaatgttgaaacagaagtccttcctctcatttcttctgtgttgccaagaactatttttccaacaagtaccatatctttcgaacattttggtacttcttgcaagggatatgcattagcacatactcaagaaggggaagaaaagaagcaaacttctggtacatcaaataccagaggatcaagacgaaaacctgcaatgacaactcctacaaggaggtctacacgtaacacaagagctgaaacagccagtcagtctcagagatccccaatatcagacaattctgggtgtgatgccccaggtaacagtaatccatctttaagtgttccctcttcagctgagtcagaaaagcaaacaagacaggctccaaaacggaagtctgtaagaagaggaagaaaaccacctttactgaaaaagaaacttcggagctctgtagctgcccctgaaaaatcatcttccaatgattcagtagatgaagaaacagcagaatctgacacatcacctgtgttagaaaaagagcaccaaccagatgtagacagtagtaacatttgtactgtgcagactcatgtagaaaaccagtctgctaattgcttgaaaagttgcaatgagcaaatagaagaaagtgagaagcatactgcaaattatgatacagaggaaagagtaggatcttcatcttctgagtcttgtgctcaagatcttcctgtgctagttggtgaggaaggggaagttaaaaaactcgagaatacaggtatagaggctaatgttttgtgtttggaaagtgagatttctgaaaatattcttgaaaaaggaggtgatccattggaaaagcaagaccagatatctggactttcacaatcagaggtaaagacagatgtatgtacagttcatcttccaaatgattttcctacatgtttaacatctgaaagcaaagtgtaccaacctgtatcttgtcccctaagtgacttatctgagaatgtagagtcagtggttaatgaagaaaaaataacagagagttccctagtagaaattactgaacataaagattttacactaaaaacagaggagcttatagagagccccaagttagaatcttctgagggtgaaattatacagacagtggacagacaatctgttaagagcccagaggttcaattgcttgggcatgttgaaactgaagatgtagaaataattgcaacatgtgatacttttgggaatgaagatttcaataatattcaagactctgaaaataacttactaaaaaataatcttctgaacaccaaattggaaaaatctttagaagaaaagaatgaatcgctgaccgaacatcctagatctacagagttgcctaaaacacacattgaacagattcagaagcattttagtgaggacaacaatgaaatgatacctatggagtgtgattcattttgcagtgaccaaaatgaatctgaagttgaaccatctgtaaatgctgatcttaaacaaatgaatgaaaattctgtgacacactgttctgaaaataatatgccgtcttctgatcttgcggatgaaaaggttgaaactgtttctcaaccatctgaaagcccaaaagataccatagataaaaccaaaaagcctcgtactcgaagatctagatttcattctccatctacaacttggtcacccaacaaagacactccacaagaaaagaagcggccccagtctccatctcccagaagagaaactgggaaagaaagcaggaagtctcaatcaccatctcctaagaatgagtcagccagaggccggaaaaaatcccgttctcagtccccaaaaaaggatattgcaagagaaaggaggcaatctcagtctcggtctccaaaaagggatactactagggaaagcagaagatctgaatcactgtccccaagaagagaaacttctagagagaacaaaagatctcagccaagagtgaaagattcttccccaggagaaaaatccaggtcccagagcagagaacgagaaagtgatagagatgggcagaggagagagagagaaaggagaaccagaaagtggtctaggtccagatctcattctaggtccccctcaagatgtagaacaaaaagtaagagttcatcatttggtagaattgacagagatagttactctccccggtggaagggaagatgggcaaatgatggttggagatgtccacgaggaaatgatcggtacagaaagaatgacccagagaaacagaatgaaaatacaagaaaagaaaaaaatgacatccatctagatgctgatgatccaaattctgctgacaaacatagaaatgactgtcccaattggataacagaaaaaataaactctgggcctgatccaagaaccagaaatccagaaaagttgaaagagtctcattgggaagaaaatagaaatgaaaattcaggaaattcttggaataaaaactttggttctggttgggtatctaaccgtggtagaggcagaggcaaccgtggcagaggcacttacagaagtagttttgcctataaagatcagaatgaaaatcggtggcaaaatcgaaaacccctctcagggaattcaaacagttcagggagtgaatctttcaagtttgtggaacagcaatcctataagcgaaaaagtgaacaggagttctcatttgatacaccagcagatagatctggatggacatctgcatccagctgggccgtgagaaagactttgccagcagatgtacaaaactactactcacgacgaggcagaaattcttcaggtccacagtctggatggatgaaacaagaggaggaaacatctggacaggattctagcctaaaagaccaaacaaaccagcaagttgatggttctcagctacctataaatatgatgcaaccgcaaatgaatgtaatgcagcaacaaatgaatgcacaacaccagcctatgaatatcttcccatatccagtgggtgttcatgctcctttgatgaacatccaacgcaatccatttaacattcatcctcagctacccttgcatctccacacaggagtgcccctcatgcaggtagccactcctaccagtgtatctcagggactaccaccaccaccaccccctcccccaccatcccaacaagtcaactacattgcttcacaaccagatggaaagcaattgcagggtattcctagttcttctcatgtaagtaataacatgagtacaccagttttgcctgctccgacagcagccccaggaaatacgggaatggttcagggaccaagttctggtaatacttcgtcatcaagtcacagcaaagcctctaatgctgctgtaaaattggcagaaagcaaagtaagtgttgcagtggaagccagcgcagatagctcgaagacagacaagaaattgcaaattcaagaaaaagcagcacaagaggtaaaattggccatcaagccattttaccaaaataaagatatcaccaaggaagaatataaagaaattgtacggaaagcagtagataaatgtgtactgctggaatgttccatccaaaagatgtagcttcagaagcacagtgattgccccagggtccatgagatattgtttgtattatgaagttggagtgctgtctactgaaattatactcttaaataaatatgtatgtagtgtgtaatattttctaataaattcttttgataaac

SEQ ID NO: 445903 - DNA, 4991 bp, Homo sapiens
gaaagtgccagaaaagcgacgtcctcagggcgggagcaggggacgccgcaacgtagtctgcgagaatgcaggaaggcggcagtgaagcggtcggtcggcggggccgcggcaaagtggggaggaaactcatcccgggcaggcgtcagggtggctggagagcgcagcacgcgcgaacagaacgggggcaggcgacaggaaaacgtgtgagcgcgcggctgaaagcgactgggacctgggaaacccttttccaaagagaaatgaagaagaaaactgtatgtaccctaaatatgggagataagaagtatgaagacatggaaggtgaagaaaacggagataatactatttccactggtctgttgtacagtgaggctgacagatgcccaatatgtcttaattgtctattagaaaaggaagttggttttccagaaagctgtaatcatgtcttctgtatgacttgtattcttaaatgggcagaggaattatttattcccataaaaaccttagagacactggcttcatgtcctattgaccgtaaaccttttcaggcagtgtttaaattcagtgcattggaaggttatgttaaggttcaagtaaaaaaacagctgagagaaacaaaagacaagaaaaatgaaaactcatttgagaaacaggtctcctgtcatgaaaattctaaaagctgtataagaagaaaagccatcgtaagagaagatctattaagtgcaaaagtttgtgacttgaagtggatacatagaaactctttatacagtgaaacaggaggaaagaaaaatgcagcaataaagataaataagcctcagagatcaaattggagtacaaatcagtgcttcagaaattttttctccaatatgttttcttctgttagccactctggagaatcttcctttacctatagagcttattgtacagaatttatagaagccagtgaaatcagtgcattgattaggcagaagagacatgaactggaattgtcatggtttcctgatacattacctggaattggaagaattggttttataccctggaatgttgaaacagaagtccttcctctcatttcttctgtgttgccaagaactatttttccaacaagtaccatatctttcgaacattttggtacttcttgcaagggatatgcattagcacatactcaagaaggggaagaaaagaagcaaacttctggtacatcaaataccagaggatcaagacgaaaacctgcaatgacaactcctacaaggaggtctacacgtaacacaagagctgaaacagccagtcagtctcagagatccccaatatcagacaattctgggtgtgatgccccaggtaacagtaatccatctttaagtgttccctcttcagctgagtcagaaaagcaaacaagacaggctccaaaacggaagtctgtaagaagaggaagaaaaccacctttactgaaaaagaaacttcggagctctgtagctgcccctgaaaaatcatcttccaatgattcagtagatgaagaaacagcagaatctgacacatcacctgtgttagaaaaagagcaccaaccagatgtagacagtagtaacatttgtactgtgcagactcatgtagaaaaccagtctgctaattgcttgaaaagttgcaatgagcaaatagaagaaagtgagaagcatactgcaaattatgatacagaggaaagagtaggatcttcatcttctgagtcttgtgctcaagatcttcctgtgctagttggtgaggaaggggaagttaaaaaactcgagaatacaggtatagaggctaatgttttgtgtttggaaagtgagatttctgaaaatattcttgaaaaaggaggtgatccattggaaaagcaagaccagatatctggactttcacaatcagaggtaaagacagatgtatgtacagttcatcttccaaatgattttcctacatgtttaacatctgaaagcaaagtgtaccaacctgtatcttgtcccctaagtgacttatctgagaatgtagagtcagtggttaatgaagaaaaaataacagagagttccctagtagaaattactgaacataaagattttacactaaaaacagaggagcttatagagagccccaagttagaatcttctgagggtgaaattatacagacagtggacagacaatctgttaagagcccagaggttcaattgcttgggcatgttgaaactgaagatgtagaaataattgcaacatgtgatacttttgggaatgaagatttcaataatattcaagactctgaaaataacttactaaaaaataatcttctgaacaccaaattggaaaaatctttagaagaaaagaatgaatcgctgaccgaacatcctagatctacagagttgcctaaaacacacattgaacagattcagaagcattttagtgaggacaacaatgaaatgatacctatggagtgtgattcattttgcagtgaccaaaatgaatctgaagttgaaccatctgtaaatgctgatcttaaacaaatgaatgaaaattctgtgacacactgttctgaaaataatatgccgtcttctgatcttgcggatgaaaaggttgaaactgtttctcaaccatctgaaagcccaaaagataccatagataaaaccaaaaagcctcgtactcgaagatctagatttcattctccatctacaacttggtcacccaacaaagacactccacaagaaaagaagcggccccagtctccatctcccagaagagaaactgggaaagaaagcaggaagtctcaatcaccatctcctaagaatgagtcagccagaggccggaaaaaatcccgttctcagtccccaaaaaaggatattgcaagagaaaggaggcaatctcagtctcggtctccaaaaagggatactactagggaaagcagaagatctgaatcactgtccccaagaagagaaacttctagagagaacaaaagatctcagccaagagtgaaagattcttccccaggagaaaaatccaggtcccagagcagagaacgagaaagtgatagagatgggcagaggagagagagagaaaggagaaccagaaagtggtctaggtccagatctcattctaggtccccctcaagatgtagaacaaaaagtaagagttcatcatttggtagaattgacagagatagttactctccccggtggaagggaagatgggcaaatgatggttggagatgtccacgaggaaatgatcggtacagaaagaatgacccagagaaacagaatgaaaatacaagaaaagaaaaaaatgacatccatctagatgctgatgatccaaattctgctgacaaacatagaaatgactgtcccaattggataacagaaaaaataaactctgggcctgatccaagaaccagaaatccagaaaagttgaaagagtctcattgggaagaaaatagaaatgaaaattcaggaaattcttggaataaaaactttggttctggttgggtatctaaccgtggtagaggcagaggcaaccgtggcagaggcacttacagaagtagttttgcctataaagatcagaatgaaaatcggtggcaaaatcgaaaacccctctcagggaattcaaacagttcagggagtgaatctttcaagtttgtggaacagcaatcctataagcgaaaaagtgaacaggagttctcatttgatacaccagcagatagatctggatggacatctgcatccagctgggccgtgagaaagactttgccagcagatgtacaaaactactactcacgacgaggcagaaattcttcaggtccacagtctggatggatgaaacaagaggaggaaacatctggacaggattctagcctaaaagaccaaacaaaccagcaagttgatggttctcagctacctataaatatgatgcaaccgcaaatgaatgtaatgcagcaacaaatgaatgcacaacaccagcctatgaatatcttcccatatccagtgggtgttcatgctcctttgatgaacatccaacgcaatccatttaacattcatcctcagctacccttgcatctccacacaggagtgcccctcatgcaggtagccactcctaccagtgtatctcagggactaccaccaccaccaccccctcccccaccatcccaacaagtcaactacattgcttcacaaccagatggaaagcaattgcagggtattcctagttcttctcatgtaagtaataacatgagtacaccagttttgcctgctccgacagcagccccaggaaatacgggaatggttcagggaccaagttctggtaatacttcgtcatcaagtcacagcaaagcctctaatgctgctgtaaaattggcagaaagcaaagtaagtgttgcagtggaagccagcgcagatagctcgaagacagacaaggcaagttcaaggttgagagcaaccttcataattctgtatatgataaaggagaaaaaatatcagctttttattgtatgagtggtgaagggaatttcttattggctgtctaaatgccattattatttgaaggattctctctagatgtgttgatgtccagtaaattactggtaatattttataattgtttttagaaatgtttgatatgttttagtaaataaactgttttatatttgtcacgttaatagttggagagtctcttattgtaaatatgaagtattttcaatttcttgtttgggattttgtgagagcagtatgactggcaaataataaattatacattttcttctcatcagaaattgcaaattcaagaaaaagcagcacaagaggtaaaattggccatcaagccattttaccaaaataaagatatcaccaaggaagaatataaagaaattgtacggaaagcagtagataaagtaagttatggctttagtggagtatgtgcacgttgttttgaaccacctctgttttaataaatgaatgctgaagtttaattaaaataataaaagctagctcctacta

SEQ ID NO: 445904 - DNA, 1403 bp, Homo sapiens
agggagacgcgcagggaggggaggggagggaggaggctagacaaggcgggggaagggggagtagcggtggcttaagccgcgcggagcagcgcaacctgggtcgctccctgcttcgccgccgcctccggaccgagccagcggagtcagtgtcctagagaccctgtaacaccacaaagcggacgaaggagtccatgttggggaacttggcagcggagtgactgggacctgggaacctactgtggggccgcggccggaccgagcgcctcgacctcggtctgaggaaacccttttccaaagagaaatgaagaagaaaactgtatgtaccctaaatatgggagataagaagtatgaagacatggaaggtgaagaaaacggagataatactatttccactggtctgttgtacagtgaggctgacagatgcccaatatgtcttaattgtctattagaaaaggaagttggttttccagaaagctgtaatcatgtcttctgtatgacttgtattcttaaatgggcagagggacttttcacataggttatttgatttcttctttatatcagccttgtggaataaccagagcagatacgatagtgtccttccattttacagatgaggaaacttggattttatgttctatgacttggtcaagatctcatagtttaagaggcagaagtgaatttagaactgattttctaattcctgtttttaatttagtgtggactaatttcagagtctgaattagagatattaccgtcatagacagtgaataagaaacaagacattcgtgacttttaatgtattatgttgactcaatttgggccaaatactttgaagtaaatattaatttaatataagccttattgttatgaaatgttaagtaaaaaattattggtcatattatgctatattttctaagttaatatttgtcagtctgtaaaattagtaaagaagataatatcttaaaaatattttaacattagctgcattccaattgttaatgttcttaaatatgttggaattaattgcatattacataattggggttttcaaagcgctatgttttgcttaaattttcattaatagtgtggaaaggagaatgtaactgtatagtgactctggctgagttctcaaaagaaggaagagaagatttgttatacaaattgaattaataatagtatacatataaactattttaatttagtaaaacctaaactggtctttaacaagaagtgacaggataggtgaaaatgtattttggggaaaagtattttgagttttgctgaattaatatggttggtaaatctctctctgtgtaggatcactgtttaatgaaataatgcatattttttttctgccacccaaataaagatttttatctgtgttgaatttagtgcacatggtt

SEQ ID NO: 445905 - DNA, 2209 bp, Homo sapiens
agggagacgcgcagggaggggaggggagggaggaggctagacaaggcgggggaagggggagtagcggtggcttaagccgcgcggagcagcgcaacctgggtcgctccctgcttcgccgccgcctccggaccgagccagcggagtcagtgtcctagagaccctgtaacaccacaaagcggacgaaggagtccatgttggggaacttggcagcggagtgactgggacctgggaacctactgtggggccgcggccggaccgagcgcctcgacctcggtctgaggaaacccttttccaaagagaaatgaagaagaaaactgtatgtaccctaaatatgggagataagaagtatgaagacatggaaggtgaagaaaacggagataatactatttccactggtctgttgtacagtgaggctgacagatgcccaatatgtcttaattgtctattagaaaaggaagttggttttccagaaagctgtaatcatgtcttctgtatgacttgtattcttaaatgggcagaggaattatttattcccataaaaaccttagagacactggcttcatgtcctattgaccgtaaaccttttcaggcagtgtttaaattcagtgcattggaaggttatgttaaggttcaagtaaaaaaacagctgagagaaacaaaagacaagaaaaatgaaaactcatttgagaaacaggtctcctgtcatgaaaattctaaaagctgtataagaagaaaagccatcgtaagagaagatctattaagtgcaaaagtttgtgacttgaagtggatacatagaaactctttatacagtgaaacaggaggaaagaaaaatgcagcaataaagataaataagcctcagagatcaaattggagtacaaatcagtgcttcagaaattttttctccaatatgttttcttctgttagccactctggagaatcttcctttacctatagagcttattgtacagaatttatagaagccagtgaaatcagtgcattgattaggcagaagagacatgaactggaattgtcatggtttcctgatacattacctggaattggaagaattggttttataccctggaatgttgaaacagaagtccttcctctcatttcttctgtgttgccaagaactatttttccaacaagtaccatatctttcgaacattttggtaaagttgtgaaatcattttctattttaaaaattattattattagtttcttccagtttcataaaaatgtgtgtttgatgacttagaaaagctgtaaagtaaggcatagtaacttgtaaatacgtctataaatatttggacaatgacttaactttagaattgcttcaactagagtgtatgtatatatagatagatagatacatagtctctccatatatctatatacacacacaatggaatattattctgccacaaaaagaaggaaatcttgtttgtgccaacgtggatgaacctggaggacattaggctaagtgaataaggcaggcacagaaaggcacataaccacatgatctcacttatatgtggaatctaaaaaagttgatctcgtagaactagattgtagattagggggtggggtaggtgtggtggggtggaggttgttggtcagaggatacagtttcagctggatagaataagttctaaagatcaattgtgaaacgtgatgactataataatacagttgacccttgaacaacataggttttaactgggtggcgacattatacatgaattttaaaaaataaatatatcggaaaatgtttggagatttgcaacactgaaaaaacagaaaaatcgcataacctataaatagtgaaaaaaattaagaaaaaggtatgtcattaatgtataaaatatatgtaggtactagtctatttcatcatttactaccataaaatatatacaaatctatgataacaagttaaaatttatcaaaacatatacacactcaaaccacatggttccaccatttgcagtcataagaaatgtaaacagctgtaaagatacagtattaaatcatagctgtgtaaaattaaatatagtacgtatttaccagtgtaacaatttttgtggccgccacctgttgctattctggtgtactcaagtgttgtgaatgtctgggaggttgaggctacaatgagccatgattgcaccactgcactccagcctgtgcaacagaacaacagcctgtctcaaaa

SEQ ID NO: 445906 - DNA, 1859 bp, Homo sapiens
agggagacgcgcagggaggggaggggagggaggaggctagacaaggcgggggaagggggagtagcggtggcttaagccgcgcggagcagcgcaacctgggtcgctccctgcttcgccgccgcctccggaccgagccagcggagtcagtgtcctagagaccctgtaacaccacaaagcggacgaaggagtccatgttggggaacttggcagcggagtgactgggacctgggaacctactgtggggccgcggccggaccgagcgcctcgacctcggtctgaggaaacccttttccaaagagaaatgaagaagaaaactgtatgtaccctaaatatgggagataagaagtatgaagacatggaaggtgaagaaaacggagataatactatttccactggtctgttgtacagtgaggctgacagatgcccaatatgtcttaattgtctattagaaaaggaagttggttttccagaaagctgtaatcatgtcttctgtatgacttgtattcttaaatgggcagaggaattatttattcccataaaaaccttagagacactggcttcatgtcctattgaccgtaaaccttttcaggcagtgtttaaattcagtgcattggaaggttatgttaaggttcaagtaaaaaaacagctgagagaaacaaaagacaagaaaaatgaaaactcatttgagaaacaggtctcctgtcatgaaaattctaaaagctgtataagaagaaaagccatcgtaagagaagatctattaagtgcaaaagtttgtgacttgaagtggatacatagaaactctttatacagtgaaacaggaggaaagaaaaatgcagcaataaagataaataagcctcagagatcaaattggagtacaaatcagtgcttcagaaattttttctccaatatgttttcttctgttagccactctggagaatcttcctttacctatagagcttattgtacagaatttatagaagccagtgaaatcagtgcattgattaggcagaagagacatgaactggaattgtcatggtttcctgatacattacctggaattggaagaattggttttataccctggaatgttgaaacagaagtccttcctctcatttcttctgtgttgccaagaactatttttccaacaagtaccatatctttcgaacattttggtaaagttgtgaaatcattttctattttaaaaattattattattagtttcttccagtttcataaaaatgtgtgtttgatgacttagaaaagctgtaaagtaaggcatagtaacttgtaaatacgtctataaatatttggacaatgacttaactttagaattgcttcaactagagtgtatgtatatatagatagatagatacatagtctctccatatatctatatacacacacaatggaatattattctgccacaaaaagaaggaaatcttgtttgtgccaacgtggatgaacctggaggacattaggctaagtgaataaggcaggcacagaaaggcacataaccacatgatctcacttatatgtggaatctaaaaaagttgatctcgtagaactagattgtagattagggggtggggtaggtgtggtggggtggaggttgttggtcagaggatacagtttcagctggatagaataagttctaaagatcaattgtgaaacgtgatgactataataatacagttgacccttgaacaacataggttttaactgggtggcgacattatacatgaattttaaaccaatcccacaccaccgcgacaaactgtttcgacagaattctgctaatcacctgcaacaaacactagcaaataatctgcatatacccctatcaataggagtgcaataat

SEQ ID NO: 445907 - DNA, 961 bp, Homo sapiens
agggagacgcgcagggaggggaggggagggaggaggctagacaaggcgggggaagggggagtagcggtggcttaagccgcgcggagcagcgcaacctgggtcgctccctgcttcgccgccgcctccggaccgagccagcggagtcagtgtcctagagaccctgtaacaccacaaagcggacgaaggagtccatgttggggaacttggcagcggagtgactgggacctgggaacctactgtggggccgcggccggaccgagcgcctcgacctcggtctgaggaaacccttttccaaagagaaatgaagaagaaaactgtatgtaccctaaatatgggagataagaagtatgaagacatggaaggtgaagaaaacggagataatactatttccactggtctgttgtacagtgaggctgacagatgcccaatatgtcttaattgtctattagaaaaggaagttggttttccagaaagctgtaatcatgtcttctgtatgacttgtattcttaaatgggcagaggaattatttattcccataaaaaccttagagacactggcttcatgtcctattgaccgtaaaccttttcaggcagtgtttaaattcagtgcattggaaggttatgttaaggttcaagtaaaaaaacagctgagagaaacaaaagacaagaaaaatgaaaactcatttgagaaacaggtctcctgtcatgaaaattctaaaagctgtataagaagaaaagccatcgtaagagaagatctattaagtgcaaaagtttgtgacttgaagtggatacatagtaagttactttttgcttgtggattctacctttttttttgttgttttttaatttaatggttgtgtcagagttctcatcagtaacacttcaggctggaaaatagtcctcagaactctgtacattgtgttaaatcctacataaattttgttttcatggagcaatttata

SEQ ID NO: 445908 - DNA, 531 bp, Homo sapiens
tctccagcctcctgactagctgggattacaggcgctcaccaccacgcctggctaatttttgtatttttttagtagagacggggtttcaccatgttggccaggctgctctcgaacacctgacctcaggtgatctgcccgccttggcctcccaaagtgctgggattacaggcttgagccaccgtgcctcgccaaatgttttctttcattagaaagtcagtccacattatttagaaatgacaggattaaattaagcaattggagattggtattggtatactgagcctattaattgctatttaattttactgtaaccagtggttctttgtttctctgtctaaagagatttataacatgatttttttcacaagctttttttcttttgatagattctagcctaaaagaccaaacaaaccagcaagttgatggttctcagctacctataaatatgatgcaaccgcaaatgaatgtaatgcagcaacaaatgaatgcacaacaccagcctatgaatatcttcccatatccagtgggtgt

SEQ ID NO: 445909 - DNA, 420 bp, Homo sapiens
cacagaactactgctgtcagcccaactcatctttcactatactagtagttctcaaccgggcagcatatcttaatgggattttaataacagattctgtctcgttcatcattgtattccaactatctagcatacaagaggtattcagtaaatgtttgaatgaatgaaacaaatttaaggtataaaaatatttttttctttcgaagatagagataaaaataattttatggaaaatttataattgtatttataattttgatctaaagaaacatttgtaaagatataatttgttaatcacttttcagacactggcttcatgtcctattgaccgtaaaccttttcaggcagtgtttaaattcagtgcattggaaggttatgttaaggtaagtctttttattctgcaacatgaattatatagaaatt

SEQ ID NO: 445910 - DNA, 430 bp, Homo sapiens
agaactactgctgtcagcccaactcatctttcactatactagtagttctcaaccgggcagcatatcttaatgggattttaataacagattctgtctcgttcatcattgtattccaactatctagcatacaagaggtattcagtaaatgtttgaatgaatgaaacaaatttaaggtataaaaatatttttttctttcgaagatagagataaaaataattttatggaaaatttataattgtatttataattttgatctaaagaaacatttgtaaagatataatttgttaatcacttttcagacactggcttcatgtcctattgaccgtaaaccttttcaggcagtgtttaaattcagtgcattggaaggttatgttaaggtaagtctttttattctgcaacatgaattatatagaaattaattgaagctgtt

SEQ ID NO: 445911 - DNA, 717 bp, Homo sapiens
gaacatgatgaaagctggaaaaattcttgacaaaatactacataaattatttcaaagagaaacatctgtgttaagttgctttcatcttttctttgccatgaatttatcagaaaaacatacttttaaaggtttttttctgaattttagccaattggtagctatctttagacaaggagtaaccttgaatttacatttttagctatttgggcaaaaaacatttaagcactgtattttaatattgctaacctgatttagagaattaatacttttaaattggtggtttaattttttaaaccatttaaacaaaaatgtctttattatgttttcagaattggttttataccctggaatgttgaaacagaagtccttcctctcatttcttctgtgttgccaagaactatttttccaacaagtaccatatctttcgaacattttggtaaagttgtgaaatcattttctattttaaaaattattattattagtttcttccagtttcataaaaatgtgtgtttgatgacttagaaaagctgtaaagtaaggcatagtaacttgtaaatacgtctataaatatttggacaatgacttaactttagaattgcttcaactagagtgtatgtatatatagatagatagatacatagtctctccatatatctatatacacacacaatggaatattattctgccacaaaaagaaggaaatcttgtttgtgccaa

SEQ ID NO: 445912 - DNA, 5331 bp, Homo sapiens
agggagacgcgcagggaggggaggggagggaggaggctagacaaggcgggggaagggggagtagcggtggcttaagccgcgcggagcagcgcaacctgggtcgctccctgcttcgccgccgcctccggaccgagccagcggagtcagtgtcctagagaccctgtaacaccacaaagcggacgaaggagtccatgttggggaacttggcagcggagtgactgggacctgggaacctactgtggggccgcggccggaccgagcgcctcgacctcggtctgaggaaacccttttccaaagagaaatgaagaagaaaactgtatgtaccctaaatatgggagataagaagtatgaagacatggaaggtgaagaaaacggagataatactatttccactggtctgttgtacagtgaggctgacagatgcccaatatgtcttaattgtctattagaaaaggaagttggttttccagaaagctgtaatcatgtcttctgtatgacttgtattcttaaatgggcagagacactggcttcatgtcctattgaccgtaaaccttttcaggcagtgtttaaattcagtgcattggaaggttatgttaaggttcaagtaaaaaaacagctgagagaaacaaaagacaagaaaaatgaaaactcatttgagaaacaggtctcctgtcatgaaaattctaaaagctgtataagaagaaaagccatcgtaagagaagatctattaagtgcaaaagtttgtgacttgaagtggatacatagaaactctttatacagtgaaacaggaggaaagaaaaatgcagcaataaagataaataagcctcagagatcaaattggagtacaaatcagtgcttcagaaattttttctccaatatgttttcttctgttagccactctggagaatcttcctttacctatagagcttattgtacagaatttatagaagccagtgaaatcagtgcattgattaggcagaagagacatgaactggaattgtcatggtttcctgatacattacctggaattggaagaattggttttataccctggaatgttgaaacagaagtccttcctctcatttcttctgtgttgccaagaactatttttccaacaagtaccatatctttcgaacattttggtacttcttgcaagggatatgcattagcacatactcaagaaggggaagaaaagaagcaaacttctggtacatcaaataccagaggatcaagacgaaaacctgcaatgacaactcctacaaggaggtctacacgtaacacaagagctgaaacagccagtcagtctcagagatccccaatatcagacaattctgggtgtgatgccccaggtaacagtaatccatctttaagtgttccctcttcagctgagtcagaaaagcaaacaagacaggctccaaaacggaagtctgtaagaagaggaagaaaaccacctttactgaaaaagaaacttcggagctctgtagctgcccctgaaaaatcatcttccaatgattcagtagatgaagaaacagcagaatctgacacatcacctgtgttagaaaaagagcaccaaccagatgtagacagtagtaacatttgtactgtgcagactcatgtagaaaaccagtctgctaattgcttgaaaagttgcaatgagcaaatagaagaaagtgagaagcatactgcaaattatgatacagaggaaagagtaggatcttcatcttctgagtcttgtgctcaagatcttcctgtgctagttggtgaggaaggggaagttaaaaaactcgagaatacaggtatagaggctaatgttttgtgtttggaaagtgagatttctgaaaatattcttgaaaaaggaggtgatccattggaaaagcaagaccagatatctggactttcacaatcagaggtaaagacagatgtatgtacagttcatcttccaaatgattttcctacatgtttaacatctgaaagcaaagtgtaccaacctgtatcttgtcccctaagtgacttatctgagaatgtagagtcagtggttaatgaagaaaaaataacagagagttccctagtagaaattactgaacataaagattttacactaaaaacagaggagcttatagagagccccaagttagaatcttctgagggtgaaattatacagacagtggacagacaatctgttaagagcccagaggttcaattgcttgggcatgttgaaactgaagatgtagaaataattgcaacatgtgatacttttgggaatgaagatttcaataatattcaagactctgaaaataacttactaaaaaataatcttctgaacaccaaattggaaaaatctttagaagaaaagaatgaatcgctgaccgaacatcctagatctacagagttgcctaaaacacacattgaacagattcagaagcattttagtgaggacaacaatgaaatgatacctatggagtgtgattcattttgcagtgaccaaaatgaatctgaagttgaaccatctgtaaatgctgatcttaaacaaatgaatgaaaattctgtgacacactgttctgaaaataatatgccgtcttctgatcttgcggatgaaaaggttgaaactgtttctcaaccatctgaaagcccaaaagataccatagataaaaccaaaaagcctcgtactcgaagatctagatttcattctccatctacaacttggtcacccaacaaagacactccacaagaaaagaagcggccccagtctccatctcccagaagagaaactgggaaagaaagcaggaagtctcaatcaccatctcctaagaatgagtcagccagaggccggaaaaaatcccgttctcagtccccaaaaaaggatattgcaagagaaaggaggcaatctcagtctcggtctccaaaaagggatactactagggaaagcagaagatctgaatcactgtccccaagaagagaaacttctagagagaacaaaagatctcagccaagagtgaaagattcttccccaggagaaaaatccaggtcccagagcagagaacgagaaagtgatagagatgggcagaggagagagagagaaaggagaaccagaaagtggtctaggtccagatctcattctaggtccccctcaagatgtagaacaaaaagtaagagttcatcatttggtagaattgacagagatagttactctccccggtggaagggaagatgggcaaatgatggttggagatgtccacgaggaaatgatcggtacagaaagaatgacccagagaaacagaatgaaaatacaagaaaagaaaaaaatgacatccatctagatgctgatgatccaaattctgctgacaaacatagaaatgactgtcccaattggataacagaaaaaataaactctgggcctgatccaagaaccagaaatccagaaaagttgaaagagtctcattgggaagaaaatagaaatgaaaattcaggaaattcttggaataaaaactttggttctggttgggtatctaaccgtggtagaggcagaggcaaccgtggcagaggcacttacagaagtagttttgcctataaagatcagaatgaaaatcggtggcaaaatcgaaaacccctctcagggaattcaaacagttcagggagtgaatctttcaagtttgtggaacagcaatcctataagcgaaaaagtgaacaggagttctcatttgatacaccagcagatagatctggatggacatctgcatccagctgggccgtgagaaagactttgccagcagatgtacaaaactactactcacgacgaggcagaaattcttcaggtccacagtctggatggatgaaacaagaggaggaaacatctggacaggattctagcctaaaagaccaaacaaaccagcaagttgatggttctcagctacctataaatatgatgcaaccgcaaatgaatgtaatgcagcaacaaatgaatgcacaacaccagcctatgaatatcttcccatatccagtgggtgttcatgctcctttgatgaacatccaacgcaatccatttaacattcatcctcagctacccttgcatctccacacaggagtgcccctcatgcaggtagccactcctaccagtgtatctcagggactaccaccaccaccaccccctcccccaccatcccaacaagtcaactacattgcttcacaaccagatggaaagcaattgcagggtattcctagttcttctcatgtaagtaataacatgagtacaccagttttgcctgctccgacagcagccccaggaaatacgggaatggttcagggaccaagttctggtaatacttcgtcatcaagtcacagcaaagcctctaatgctgctgtaaaattggcagaaagcaaagtaagtgttgcagtggaagccagcgcagatagctcgaagacagacaagaaattgcaaattcaagaaaaagcagcacaagaggtaaaattggccatcaagccattttaccaaaataaagatatcaccaaggaagaatataaagaaattgtacggaaagcagtagataaagtttgtcatagtaagagtggagaagtaaattctactaaagtggcaaatctggttaaagcctatgtagacaaatacaaatattcacggaaggggagccaaaagaaaactctggaagaacctgtgtctactgaaaaaaacataggctgaaatggggaacgctgtcaaggacattatcaggatatctgcaaagtgcaatttcaacatgtaccattaactgaaaatcatacataactgtgattgaaatttggttttgataaaattatttttttaacataggatatgatgttttgttctaaataaatataggtctgcactgcaacttctgtatccttccttcccctccaccctcccccacaaaattcaagggaaagtaaagggtttaaaggaatgtgcatctttactaggactgtgttatagtgtggatactggaaaatgtatagctttttgattagggcaatggagtgcataaattagaaacttctaagtgcactggttttcaaagagatatatataatgcatttattctgtcaggttaaaatataaagtatgatctttatgattttttccctctaattatagaaagttaaataatgtattaccatgaaaaatgtttctaatattaaatagaacatatcagttgcaaagttcctaatgtgtatttttaaagcacatatctgaataaattgcctagatagaaaaaaaattatcacgagtaaaatttagtgttcaaaacattgagacactcttcacctattgtatgaccaaataaaggttatgctgcttgt

SEQ ID NO: 445913 - DNA, 7923 bp, Homo sapiens
tgtaaaccttgagtaacacctttgggacccacataagtgccattagtgatgtaggaagtgctcccaagaagcaaaattatggctttataagaagaagtttaattccttgataggaacagattgagatctatagctgcagttgcctgccatttcagacagatgattcatcttgtaaacaaatgatataaacttagggtatcaataaatacagtacagcattataatgtattttctcttatgatttttgtaaataacccttttcctttagcttccttttattggtaagaatacagtatgtaacacataacataaaaaatatattaattccactgttatcagtaaggagtctggtgaataacagttaagttttggggagtaaaaactgtttcaatttttgactgtgttgggggttggtgctcctaatccctgtgttgttaaagggtcgactatattgtatttttgaaaattgctagagagtggacgtaaagtgttctcactaaacaaattataactatgtgaggtagtgcatatattaagtagctagatttggtcattccacaatgtatatgtacttcaaaacatcatgttgtacatgagaaacacagttttatctgttagtcagttttaaaaataaaaaatattccaactagaaactctgttgtagtttttgaaattacaacttggaggctttgaggaactgattagaagtctcctttctgtttcaggctttcatatccaaaccatagatctttagaagtaacatctgttaattaattattaataaatagtttgagtctttattaattcatggataacttgaccattttctctctccttttgcttagataatcccagatcatggccgggcacagtagctcacgcctgtattcccagcagtttgggaggccgaggcaggcagatcacttgaactcaggagtttgagaccagcttgggcaacatggcaaaaccctgtctctattaaaaatacaaaaattagctgggcatggtagtgcatgcctgtagtcccagctacctgggaggctgaggtgggaggatcgcttgagcctgggaggttgaggcttctgtgcgcgatgattgctccagtgatcacgccattgcactccagcctgggtgacagagtgagaccctgtctccaaaaaaaaaaaaaattaagcaagtagcagttacaagaccaaaagttattttcctttttttttttctctataaaattgcccatttggaccaaatctagttataacttatttcagtgtcattaagaaagttgatgaataagtcatattactcagatgttagtagctatgcatttattaatagttttatttataagtatttagtttcactctgttgcagactattttatgctaaaattagctaaagccaaattactatttcttaaaacatattttttactttttttttttttttaaatattattaggtacttcttgcaagggatatgcattagcacatactcaagaaggggaagaaaagaagcaaacttctggtacatcaaataccagaggatcaagacgaaaacctgcaatgacaactcctacaaggaggtctacacgtaacacaagagctgaaacagccagtcagtctcagagatccccaatatcagacaattctgggtgtgatgccccaggtaacagtaatccatctttaagtgttccctcttcagctgagtcagaaaagcaaacaagacaggctccaaaacggaagtctgtaagaagaggaagaaaaccacctttactgaaaaagaaacttcggagctctgtagctgcccctgaaaaatcatcttccaatgattcagtagatgaagaaacagcagaatctgacacatcacctgtgttagaaaaagagcaccaaccagatgtagacagtagtaacatttgtactgtgcagactcatgtagaaaaccagtctgctaattgcttgaaaagttgcaatgagcaaatagaagaaagtgagaagcatactgcaaattatgatacagaggaaagagtaggatcttcatcttctgagtcttgtgctcaagatcttcctgtgctagttggtgaggaaggggaagttaaaaaactcgagaatacaggtatagaggctaatgttttgtgtttggaaagtgagatttctgaaaatattcttgaaaaaggaggtgatccattggaaaagcaagaccagatatctggactttcacaatcagaggtaaagacagatgtatgtacagttcatcttccaaatgattttcctacatgtttaacatctgaaagcaaagtgtaccaacctgtatcttgtcccctaagtgacttatctgagaatgtagagtcagtggttaatgaagaaaaaataacagagagttccctagtagaaattactgaacataaagattttacactaaaaacagaggagcttatagagagccccaagttagaatcttctgagggtgaaattatacagacagtggacagacaatctgttaagagcccagaggttcaattgcttgggcatgttgaaactgaagatgtagaaataattgcaacatgtgatacttttgggaatgaagatttcaataatattcaagactctgaaaataacttactaaaaaataatcttctgaacaccaaattggaaaaatctttagaagaaaagaatgaatcgctgaccgaacatcctagatctacagagttgcctaaaacacacattgaacagattcagaagcattttagtgaggacaacaatgaaatgatacctatggagtgtgattcattttgcagtgaccaaaatgaatctgaagttgaaccatctgtaaatgctgatcttaaacaaatgaatgaaaattctgtgacacactgttctgaaaataatatgccgtcttctgatcttgcggatgaaaaggttgaaactgtttctcaaccatctgaaagcccaaaagataccatagataaaaccaaaaagcctcgtactcgaagatctagatttcattctccatctacaacttggtcacccaacaaagacactccacaagaaaagaagcggccccagtctccatctcccagaagagaaactgggaaagaaagcaggaagtctcaatcaccatctcctaagaatgagtcagccagaggccggaaaaaatcccgttctcagtccccaaaaaaggatattgcaagagaaaggaggcaatctcagtctcggtctccaaaaagggatactactagggaaagcagaagatctgaatcactgtccccaagaagagaaacttctagagagaacaaaagatctcagccaagagtgaaagattcttccccaggagaaaaatccaggtcccagagcagagaacgagaaagtgatagagatgggcagaggagagagagagaaaggagaaccagaaagtggtctaggtccagatctcattctaggtccccctcaagatgtagaacaaaaagtaagagttcatcatttggtagaattgacagagatagttactctccccggtggaagggaagatgggcaaatgatggttggagatgtccacgaggaaatgatcggtacagaaagaatgacccagagaaacagaatgaaaatacaagaaaagaaaaaaatgacatccatctagatgctgatgatccaaattctgctgacaaacatagaaatgactgtcccaattggataacagaaaaaataaactctgggcctgatccaagaaccagaaatccagaaaagttgaaagagtctcattgggaagaaaatagaaatgaaaattcaggaaattcttggaataaaaactttggttctggttgggtatctaaccgtggtagaggcagaggcaaccgtggcagaggcacttacagaagtagttttgcctataaagatcagaatgaaaatcggtggcaaaatcgaaaacccctctcagggaattcaaacagttcagggagtgaatctttcaagtttgtggaacagcaatcctataagcgaaaaagtgaacaggagttctcatttgatacaccagcagatagatctggatggacatctgcatccagctgggccgtgagaaagactttgccagcagatgtacaaaactactactcacgacgaggcagaaattcttcaggtccacagtctggatggatgaaacaagaggaggaaacatctggacaggattctagcctaaaagaccaaacaaaccagcaagttgatggttctcagctacctataaatatgatgcaaccgcaaatgaatgtaatgcagcaacaaatgaatgcacaacaccagcctatgaatatcttcccatatccagtgggtgttcatgctcctttgatgaacatccaacgcaatccatttaacattcatcctcagctacccttgcatctccacacaggagtgcccctcatgcaggtagccactcctaccagtgtatctcagggactaccaccaccaccaccccctcccccaccatcccaacaagtcaactacattgcttcacaaccagatggaaagcaattgcagggtattcctagttcttctcatgtaagtaataacatgagtacaccagttttgcctgctccgacagcagccccaggaaatacgggaatggttcagggaccaagttctggtaatacttcgtcatcaagtcacagcaaagcctctaatgctgctgtaaaattggcagaaagcaaagtaagtgttgcagtggaagccagcgcagatagctcgaagacagacaagaaattgcaaattcaagaaaaagcagcacaagaggtaaaattggccatcaagccattttaccaaaataaagatatcaccaaggaagaatataaagaaattgtacggaaagcagtagataaagtttgtcatagtaagagtggagaagtaaattctactaaagtggcaaatctggttaaagcctatgtagacaaatacaaatattcacggaaggggagccaaaagaaaactctggaagaacctgtgtctactgaaaaaaacataggctgaaatggggaacgctgtcaaggacattatcaggatatctgcaaagtgcaatttcaacatgtaccattaactgaaaatcatacataactgtgattgaaatttggttttgataaaattatttttttaacataggatatgatgttttgttctaaataaatataggtctgcactgcaacttctgtatccttccttcccctccaccctcccccacaaaattcaagggaaagtaaagggtttaaaggaatgtgcatctttactaggactgtgttatagtgtggatactggaaaatgtatagctttttgattagggcaatggagtgcataaattagaaacttctaagtgcactggttttcaaagagatatatataatgcatttattctgtcaggttaaaatataaagtatgatctttatgattttttccctctaattatagaaagttaaataatgtattaccatgaaaaatgtttctaatattaaatagaacatatcagttgcaaagttcctaatgtgtatttttaaagcacatatctgaataaattgcctagatagaaaaaaaattatcacgagtaaaatttagtgttcaaaacattgagacactcttcacctattgtatgaccaaataaaggttatgctgcttgtttttcttttgtgcctttgtttacccctaattgagataagcagtttgacttactagattacaactttggcagttcaaagtctttgttgaagactttgaggaaaaagatttggaaaaattgttgactttcggccgggcatgatggctcacgcctgtaatcccagcactttgggaggccgaggtggcggatcacctgaggtcaggagttcgagaccagcctggccaacatggtgaaatcccgtctctactaaaaatacaaaaattagccaggcgtggtggtgggcgcctgtaatcccagctatgcgagaggctgaggcaggagaatcagttgaacccgggaggcggggattgcagtgagccgagaccatgccattgcactccagcctgggcaacaggagcaaatctccgtctcaaaaaaaagaaaaaaaaaagtgttgactttgtagaaattatgttctttcatagtatcttcttctacccgttgcagacgataaattatttgtgccaattcgagaattgctgttaggctgttatcctcccttccttggggctaagaattacaagactcatggcactggcgtaaagttgttgtttatctaatcactgatgaaatattttcacacttgaaaatccccaaatgctttacaatgaatgaagtgttaatttggtgaccaggtggtagccattagccatgttgcaaaattctagacagtaaaacctgtgttttagaaacagaggggaaatttaaataatggagtcctggttagcctttcagggattagggatttgggtttttttttttctctctttttaatactagaatatctcagtttttataaaaggtaagtttaaaatgtttattgtgccattattttaactggcatcttgaaagaacagtaggttttctccatgataaactgattccagtaagaattttcagtacataccaagtacctggaaagttcttcagataagttaatagatccaaggagatacatgcctcagtgagataaactgacctttttactagctaaactatttagccagagcaatactctgtagaactgtgcttttctaaagtaaagattatctgtttctcaattttatgtgcataatacttttcctggtgctagctttgataggcaaaatattttgaaatgttggtcccataatgattgtgctagttcataagctttgttgttatgagtgtaatcataaaaatatttccaagcagtttttgacctttattctacatttctgggcatttgtaatatggtattctactggtatatatttttaaagtttgcgtttagattatggtaaagaaatttcaagcatatttcttctaataaagtattaagacagtgtttcagaatatcaaggcacacctccttagttgttttagattagaactctagaaacaattttgtgaacattgaaagtattttgagttaagcctaagctgattaatcacacaatacatacttttcctgcattttctttcagtgacatttgagaattgggtgacattttaaaatgtgttttataccatttagcttttgcaaacaagttctaaagttttggagaaaaagtgatgtggtcaagagttgaagtctcatatatctttagtagcactcccatgaattatttccgtgacagtaacaagtgtgtgttccatgtctgatttggggcactggttagactgcattaatagctacttgattagaattcgaacttttaaaattttgaaatgtttaagaatgtattagaaaatgcatgctttatgttgaaaaaatacattgctttaatattcctcattcttgagttaagaaatttatgttaattttgcatgggcacaaacttaatcagaaacattttgtggagttacatttcctcttattatttatcaaggttcagtattgatctttgaaaccttggtcccgttaacttactagtcacattgaccaatgttttatagaaatgcctagaattttgagactaatagtagttatccattaacattccaaaagttttgtgctttttaaaatttgttttggtaattatcacatttttttctcttaccttcctttaaatggccacagtgtgtactgctggaatgttccatccaaaagatgtagcttcagaagcacagtgattgccccagggtccatgagatattgtttgtattatgaagttggagtgctgtctactgaaattatactcttaaataaatatgtatgtagtgtgtaatattttctaataaattcttttgataaac

SEQ ID NO: 445914 - DNA, 7593 bp, Homo sapiens
gaaagtgccagaaaagcgacgtcctcagggcgggagcaggggacgccgcaacgtagtctgcgagaatgcaggaaggcggcagtgaagcggtcggtcggcggggccgcggcaaagtggggaggaaactcatcccgggcaggcgtcagggtggctggagagcgcagcacgcgcgaacagaacgggggcaggcgacaggaaaacgtgtgagcgcgcggctgaaagcgactgggacctgggaaacccttttccaaagagaaatgaagaagaaaactgtatgtaccctaaatatgggagataagaagtatgaagacatggaaggtgaagaaaacggagataatactatttccactggtctgttgtacagtgaggctgacagatgcccaatatgtcttaattgtctattagaaaaggaagttggttttccagaaagctgtaatcatgtcttctgtatgacttgtattcttaaatgggcagaggaattatttattcccataaaaaccttagagacactggcttcatgtcctattgaccgtaaaccttttcaggcagtgtttaaattcagtgcattggaaggttatgttaaggttcaagtaaaaaaacagctgagagaaacaaaagacaagaaaaatgaaaactcatttgagaaacaggtctcctgtcatgaaaattctaaaagctgtataagaagaaaagccatcgtaagagaagatctattaagtgcaaaagtttgtgacttgaagtggatacatagaaactctttatacagtgaaacaggaggaaagaaaaatgcagcaataaagataaataagcctcagagatcaaattggagtacaaatcagtgcttcagaaattttttctccaatatgttttcttctgttagccactctggagaatcttcctttacctatagagcttattgtacagaatttatagaagccagtgaaatcagtgcattgattaggcagaagagacatgaactggaattgtcatggtttcctgatacattacctggaattggaagaattggttttataccctggaatgttgaaacagaagtccttcctctcatttcttctgtgttgccaagaactatttttccaacaagtaccatatctttcgaacattttggtacttcttgcaagggatatgcattagcacatactcaagaaggggaagaaaagaagcaaacttctggtacatcaaataccagaggatcaagacgaaaacctgcaatgacaactcctacaaggaggtctacacgtaacacaagagctgaaacagccagtcagtctcagagatccccaatatcagacaattctgggtgtgatgccccaggtaacagtaatccatctttaagtgttccctcttcagctgagtcagaaaagcaaacaagacaggctccaaaacggaagtctgtaagaagaggaagaaaaccacctttactgaaaaagaaacttcggagctctgtagctgcccctgaaaaatcatcttccaatgattcagtagatgaagaaacagcagaatctgacacatcacctgtgttagaaaaagagcaccaaccagatgtagacagtagtaacatttgtactgtgcagactcatgtagaaaaccagtctgctaattgcttgaaaagttgcaatgagcaaatagaagaaagtgagaagcatactgcaaattatgatacagaggaaagagtaggatcttcatcttctgagtcttgtgctcaagatcttcctgtgctagttggtgaggaaggggaagttaaaaaactcgagaatacaggtatagaggctaatgttttgtgtttggaaagtgagatttctgaaaatattcttgaaaaaggaggtgatccattggaaaagcaagaccagatatctggactttcacaatcagaggtaaagacagatgtatgtacagttcatcttccaaatgattttcctacatgtttaacatctgaaagcaaagtgtaccaacctgtatcttgtcccctaagtgacttatctgagaatgtagagtcagtggttaatgaagaaaaaataacagagagttccctagtagaaattactgaacataaagattttacactaaaaacagaggagcttatagagagccccaagttagaatcttctgagggtgaaattatacagacagtggacagacaatctgttaagagcccagaggttcaattgcttgggcatgttgaaactgaagatgtagaaataattgcaacatgtgatacttttgggaatgaagatttcaataatattcaagactctgaaaataacttactaaaaaataatcttctgaacaccaaattggaaaaatctttagaagaaaagaatgaatcgctgaccgaacatcctagatctacagagttgcctaaaacacacattgaacagattcagaagcattttagtgaggacaacaatgaaatgatacctatggagtgtgattcattttgcagtgaccaaaatgaatctgaagttgaaccatctgtaaatgctgatcttaaacaaatgaatgaaaattctgtgacacactgttctgaaaataatatgccgtcttctgatcttgcggatgaaaaggttgaaactgtttctcaaccatctgaaagcccaaaagataccatagataaaaccaaaaagcctcgtactcgaagatctagatttcattctccatctacaacttggtcacccaacaaagacactccacaagaaaagaagcggccccagtctccatctcccagaagagaaactgggaaagaaagcaggaagtctcaatcaccatctcctaagaatgagtcagccagaggccggaaaaaatcccgttctcagtccccaaaaaaggatattgcaagagaaaggaggcaatctcagtctcggtctccaaaaagggatactactagggaaagcagaagatctgaatcactgtccccaagaagagaaacttctagagagaacaaaagatctcagccaagagtgaaagattcttccccaggagaaaaatccaggtcccagagcagagaacgagaaagtgatagagatgggcagaggagagagagagaaaggagaaccagaaagtggtctaggtccagatctcattctaggtccccctcaagatgtagaacaaaaagtaagagttcatcatttggtagaattgacagagatagttactctccccggtggaagggaagatgggcaaatgatggttggagatgtccacgaggaaatgatcggtacagaaagaatgacccagagaaacagaatgaaaatacaagaaaagaaaaaaatgacatccatctagatgctgatgatccaaattctgctgacaaacatagaaatgactgtcccaattggataacagaaaaaataaactctgggcctgatccaagaaccagaaatccagaaaagttgaaagagtctcattgggaagaaaatagaaatgaaaattcaggaaattcttggaataaaaactttggttctggttgggtatctaaccgtggtagaggcagaggcaaccgtggcagaggcacttacagaagtagttttgcctataaagatcagaatgaaaatcggtggcaaaatcgaaaacccctctcagggaattcaaacagttcagggagtgaatctttcaagtttgtggaacagcaatcctataagcgaaaaagtgaacaggagttctcatttgatacaccagcagatagatctggatggacatctgcatccagctgggccgtgagaaagactttgccagcagatgtacaaaactactactcacgacgaggcagaaattcttcaggtccacagtctggatggatgaaacaagaggaggaaacatctggacaggattctagcctaaaagaccaaacaaaccagcaagttgatggttctcagctacctataaatatgatgcaaccgcaaatgaatgtaatgcagcaacaaatgaatgcacaacaccagcctatgaatatcttcccatatccagtgggtgttcatgctcctttgatgaacatccaacgcaatccatttaacattcatcctcagctacccttgcatctccacacaggagtgcccctcatgcaggtagccactcctaccagtgtatctcagggactaccaccaccaccaccccctcccccaccatcccaacaagtcaactacattgcttcacaaccagatggaaagcaattgcagggtattcctagttcttctcatgtaagtaataacatgagtacaccagttttgcctgctccgacagcagccccaggaaatacgggaatggttcagggaccaagttctggtaatacttcgtcatcaagtcacagcaaagcctctaatgctgctgtaaaattggcagaaagcaaagtaagtgttgcagtggaagccagcgcagatagctcgaagacagacaagaaattgcaaattcaagaaaaagcagcacaagaggtaaaattggccatcaagccattttaccaaaataaagatatcaccaaggaagaatataaagaaattgtacggaaagcagtagataaagtttgtcatagtaagagtggagaagtaaattctactaaagtggcaaatctggttaaagcctatgtagacaaatacaaatattcacggaaggggagccaaaagaaaactctggaagaacctgtgtctactgaaaaaaacataggctgaaatggggaacgctgtcaaggacattatcaggatatctgcaaagtgcaatttcaacatgtaccattaactgaaaatcatacataactgtgattgaaatttggttttgataaaattatttttttaacataggatatgatgttttgttctaaataaatataggtctgcactgcaacttctgtatccttccttcccctccaccctcccccacaaaattcaagggaaagtaaagggtttaaaggaatgtgcatctttactaggactgtgttatagtgtggatactggaaaatgtatagctttttgattagggcaatggagtgcataaattagaaacttctaagtgcactggttttcaaagagatatatataatgcatttattctgtcaggttaaaatataaagtatgatctttatgattttttccctctaattatagaaagttaaataatgtattaccatgaaaaatgtttctaatattaaatagaacatatcagttgcaaagttcctaatgtgtatttttaaagcacatatctgaataaattgcctagatagaaaaaaaattatcacgagtaaaatttagtgttcaaaacattgagacactcttcacctattgtatgaccaaataaaggttatgctgcttgtttttcttttgtgcctttgtttacccctaattgagataagcagtttgacttactagattacaactttggcagttcaaagtctttgttgaagactttgaggaaaaagatttggaaaaattgttgactttcggccgggcatgatggctcacgcctgtaatcccagcactttgggaggccgaggtggcggatcacctgaggtcaggagttcgagaccagcctggccaacatggtgaaatcccgtctctactaaaaatacaaaaattagccaggcgtggtggtgggcgcctgtaatcccagctatgcgagaggctgaggcaggagaatcagttgaacccgggaggcggggattgcagtgagccgagaccatgccattgcactccagcctgggcaacaggagcaaatctccgtctcaaaaaaaagaaaaaaaaaagtgttgactttgtagaaattatgttctttcatagtatcttcttctacccgttgcagacgataaattatttgtgccaattcgagaattgctgttaggctgttatcctcccttccttggggctaagaattacaagactcatggcactggcgtaaagttgttgtttatctaatcactgatgaaatattttcacacttgaaaatccccaaatgctttacaatgaatgaagtgttaatttggtgaccaggtggtagccattagccatgttgcaaaattctagacagtaaaacctgtgttttagaaacagaggggaaatttaaataatggagtcctggttagcctttcagggattagggatttgggtttttttttttctctctttttaatactagaatatctcagtttttataaaaggtaagtttaaaatgtttattgtgccattattttaactggcatcttgaaagaacagtaggttttctccatgataaactgattccagtaagaattttcagtacataccaagtacctggaaagttcttcagataagttaatagatccaaggagatacatgcctcagtgagataaactgacctttttactagctaaactatttagccagagcaatactctgtagaactgtgcttttctaaagtaaagattatctgtttctcaattttatgtgcataatacttttcctggtgctagctttgataggcaaaatattttgaaatgttggtcccataatgattgtgctagttcataagctttgttgttatgagtgtaatcataaaaatatttccaagcagtttttgacctttattctacatttctgggcatttgtaatatggtattctactggtatatatttttaaagtttgcgtttagattatggtaaagaaatttcaagcatatttcttctaataaagtattaagacagtgtttcagaatatcaaggcacacctccttagttgttttagattagaactctagaaacaattttgtgaacattgaaagtattttgagttaagcctaagctgattaatcacacaatacatacttttcctgcattttctttcagtgacatttgagaattgggtgacattttaaaatgtgttttataccatttagcttttgcaaacaagttctaaagttttggagaaaaagtgatgtggtcaagagttgaagtctcatatatctttagtagcactcccatgaattatttccgtgacagtaacaagtgtgtgttccatgtctgatttggggcactggttagactgcattaatagctacttgattagaattcgaacttttaaaattttgaaatgtttaagaatgtattagaaaatgcatgctttatgttgaaaaaatacattgctttaatattcctcattcttgagttaagaaatttatgttaattttgcatgggcacaaacttaatcagaaacattttgtggagttacatttcctcttattatttatcaaggttcagtattgatctttgaaaccttggtcccgttaacttactagtcacattgaccaatgttttatagaaatgcctagaattttgagactaatagtagttatccattaacattccaaaagttttgtgctttttaaaatttgttttggtaattatcacatttttttctcttaccttcctttaaatggccacagtgtgtactgctggaatgttccatccaaaagatgtagcttcagaagcacagtgattgccccagggtccatgagatattgtttgtattatgaagttggagtgctgtctactgaaattatactcttaaataaatatgtatgtagtgtgtaatattttctaataaattcttttgataaac

SEQ ID NO: 445915 - DNA, 7374 bp, Homo sapiens
gaaagtgccagaaaagcgacgtcctcagggcgggagcaggggacgccgcaacgtagtctgcgagaatgcaggaaggcggcagtgaagcggtcggtcggcggggccgcggcaaagtggggaggaaactcatcccgggcaggcgtcagggtggctggagagcgcagcacgcgcgaacagaacgggggcaggcgacaggaaaacgtgtgagcgcgcggctgaaagcgactgggacctgggaaacccttttccaaagagaaatgaagaagaaaactgtatgtaccctaaatatgggagataagaagtatgaagacatggaaggtgaagaaaacggagataatactatttccactggtctgttgtacagtgaggctgacagatgcccaatatgtcttaattgtctattagaaaaggaagttggttttccagaaagctgtaatcatgtcttctgtatgacttgtattcttaaatgggcagaggaattatttattcccataaaaaccttagagacactggcttcatgtcctattgaccgtaaaccttttcaggcagtgtttaaattcagtgcattggaaggttatgttaaggttcaagtaaaaaaacagctgagagaaacaaaagacaagaaaaatgaaaactcatttgagaaacaggtctcctgtcatgaaaattctaaaagctgtataagaagaaaagccatcgtaagagaagatctattaagtgcaaaagtttgtgacttgaagtggatacatagaaactctttatacagtgaaacaggaggaaagaaaaatgcagcaataaagataaataagcctcagagatcaaattggagtacaaatcagtgcttcagaaattttttctccaatatgttttcttctgttagccactctggagaatcttcctttacctatagagcttattgtacagaatttatagaagccagtgaaatcagtgcattgattaggcagaagagacatgaactggaattgtcatggtttcctgatacattacctggaattggaagaattggttttataccctggaatgttgaaacagaagtccttcctctcatttcttctgtgttgccaagaactatttttccaacaagtaccatatctttcgaacattttggtacttcttgcaagggatatgcattagcacatactcaagaaggggaagaaaagaagcaaacttctggtacatcaaataccagaggatcaagacgaaaacctgcaatgacaactcctacaaggaggtctacacgtaacacaagagctgaaacagccagtcagtctcagagatccccaatatcagacaattctgggtgtgatgccccaggtaacagtaatccatctttaagtgttccctcttcagctgagtcagaaaagcaaacaagacaggctccaaaacggaagtctgtaagaagaggaagaaaaccacctttactgaaaaagaaacttcggagctctgtagctgcccctgaaaaatcatcttccaatgattcagtagatgaagaaacagcagaatctgacacatcacctgtgttagaaaaagagcaccaaccagatgtagacagtagtaacatttgtactgtgcagactcatgtagaaaaccagtctgctaattgcttgaaaagttgcaatgagcaaatagaagaaagtgagaagcatactgcaaattatgatacagaggaaagagtaggatcttcatcttctgagtcttgtgctcaagatcttcctgtgctagttggtgaggaaggggaagttaaaaaactcgagaatacaggtatagaggctaatgttttgtgtttggaaagtgagatttctgaaaatattcttgaaaaaggaggtgatccattggaaaagcaagaccagatatctggactttcacaatcagaggtaaagacagatgtatgtacagttcatcttccaaatgattttcctacatgtttaacatctgaaagcaaagtgtaccaacctgtatcttgtcccctaagtgacttatctgagaatgtagagtcagtggttaatgaagaaaaaataacagagagttccctagtagaaattactgaacataaagattttacactaaaaacagaggagcttatagagagccccaagttagaatcttctgagggtgaaattatacagacagtggacagacaatctgttaagagcccagaggttcaattgcttgggcatgttgaaactgaagatgtagaaataattgcaacatgtgatacttttgggaatgaagatttcaataatattcaagactctgaaaataacttactaaaaaataatcttctgaacaccaaattggaaaaatctttagaagaaaagaatgaatcgctgaccgaacatcctagatctacagagttgcctaaaacacacattgaacagattcagaagcattttagtgaggacaacaatgaaatgatacctatggagtgtgattcattttgcagtgaccaaaatgaatctgaagttgaaccatctgtaaatgctgatcttaaacaaatgaatgaaaattctgtgacacactgttctgaaaataatatgccgtcttctgatcttgcggatgaaaaggttgaaactgtttctcaaccatctgaaagcccaaaagataccatagataaaaccaaaaagcctcgtactcgaagatctagatttcattctccatctacaacttggtcacccaacaaagacactccacaagaaaagaagcggccccagtctccatctcccagaagagaaactgggaaagaaagcaggaagtctcaatcaccatctcctaagaatgagtcagccagaggccggaaaaaatcccgttctcagtccccaaaaaaggatattgcaagagaaaggaggcaatctcagtctcggtctccaaaaagggatactactagggaaagcagaagatctgaatcactgtccccaagaagagaaacttctagagagaacaaaagatctcagccaagagtgaaagattcttccccaggagaaaaatccaggtcccagagcagagaacgagaaagtgatagagatgggcagaggagagagagagaaaggagaaccagaaagtggtctaggtccagatctcattctaggtccccctcaagatgtagaacaaaaagtaagagttcatcatttggtagaattgacagagatagttactctccccggtggaagggaagatgggcaaatgatggttggagatgtccacgaggaaatgatcggtacagaaagaatgacccagagaaacagaatgaaaatacaagaaaagaaaaaaatgacatccatctagatgctgatgatccaaattctgctgacaaacatagaaatgactgtcccaattggataacagaaaaaataaactctgggcctgatccaagaaccagaaatccagaaaagttgaaagagtctcattgggaagaaaatagaaatgaaaattcaggaaattcttggaataaaaactttggttctggttgggtatctaaccgtggtagaggcagaggcaaccgtggcagaggcacttacagaagtagttttgcctataaagatcagaatgaaaatcggtggcaaaatcgaaaacccctctcagggaattcaaacagttcagggagtgaatctttcaagtttgtggaacagcaatcctataagcgaaaaagtgaacaggagttctcatttgatacaccagcagatagatctggatggacatctgcatccagctgggccgtgagaaagactttgccagcagatgtacaaaactactactcacgacgaggcagaaattcttcaggtccacagtctggatggatgaaacaagaggaggaaacatctggacaggattctagcctaaaagaccaaacaaaccagcaagttgatggttctcagctacctataaatatgatgcaaccgcaaatgaatgtaatgcagcaacaaatgaatgcacaacaccagcctatgaatatcttcccatatccagtgggtgttcatgctcctttgatgaacatccaacgcaatccatttaacattcatcctcagctacccttgcatctccacacaggagtgcccctcatgcaggtagccactcctaccagtgtatctcagggactaccaccaccaccaccccctcccccaccatcccaacaagtcaactacattgcttcacaaccagatggaaagcaattgcagaaattgcaaattcaagaaaaagcagcacaagaggtaaaattggccatcaagccattttaccaaaataaagatatcaccaaggaagaatataaagaaattgtacggaaagcagtagataaagtttgtcatagtaagagtggagaagtaaattctactaaagtggcaaatctggttaaagcctatgtagacaaatacaaatattcacggaaggggagccaaaagaaaactctggaagaacctgtgtctactgaaaaaaacataggctgaaatggggaacgctgtcaaggacattatcaggatatctgcaaagtgcaatttcaacatgtaccattaactgaaaatcatacataactgtgattgaaatttggttttgataaaattatttttttaacataggatatgatgttttgttctaaataaatataggtctgcactgcaacttctgtatccttccttcccctccaccctcccccacaaaattcaagggaaagtaaagggtttaaaggaatgtgcatctttactaggactgtgttatagtgtggatactggaaaatgtatagctttttgattagggcaatggagtgcataaattagaaacttctaagtgcactggttttcaaagagatatatataatgcatttattctgtcaggttaaaatataaagtatgatctttatgattttttccctctaattatagaaagttaaataatgtattaccatgaaaaatgtttctaatattaaatagaacatatcagttgcaaagttcctaatgtgtatttttaaagcacatatctgaataaattgcctagatagaaaaaaaattatcacgagtaaaatttagtgttcaaaacattgagacactcttcacctattgtatgaccaaataaaggttatgctgcttgtttttcttttgtgcctttgtttacccctaattgagataagcagtttgacttactagattacaactttggcagttcaaagtctttgttgaagactttgaggaaaaagatttggaaaaattgttgactttcggccgggcatgatggctcacgcctgtaatcccagcactttgggaggccgaggtggcggatcacctgaggtcaggagttcgagaccagcctggccaacatggtgaaatcccgtctctactaaaaatacaaaaattagccaggcgtggtggtgggcgcctgtaatcccagctatgcgagaggctgaggcaggagaatcagttgaacccgggaggcggggattgcagtgagccgagaccatgccattgcactccagcctgggcaacaggagcaaatctccgtctcaaaaaaaagaaaaaaaaaagtgttgactttgtagaaattatgttctttcatagtatcttcttctacccgttgcagacgataaattatttgtgccaattcgagaattgctgttaggctgttatcctcccttccttggggctaagaattacaagactcatggcactggcgtaaagttgttgtttatctaatcactgatgaaatattttcacacttgaaaatccccaaatgctttacaatgaatgaagtgttaatttggtgaccaggtggtagccattagccatgttgcaaaattctagacagtaaaacctgtgttttagaaacagaggggaaatttaaataatggagtcctggttagcctttcagggattagggatttgggtttttttttttctctctttttaatactagaatatctcagtttttataaaaggtaagtttaaaatgtttattgtgccattattttaactggcatcttgaaagaacagtaggttttctccatgataaactgattccagtaagaattttcagtacataccaagtacctggaaagttcttcagataagttaatagatccaaggagatacatgcctcagtgagataaactgacctttttactagctaaactatttagccagagcaatactctgtagaactgtgcttttctaaagtaaagattatctgtttctcaattttatgtgcataatacttttcctggtgctagctttgataggcaaaatattttgaaatgttggtcccataatgattgtgctagttcataagctttgttgttatgagtgtaatcataaaaatatttccaagcagtttttgacctttattctacatttctgggcatttgtaatatggtattctactggtatatatttttaaagtttgcgtttagattatggtaaagaaatttcaagcatatttcttctaataaagtattaagacagtgtttcagaatatcaaggcacacctccttagttgttttagattagaactctagaaacaattttgtgaacattgaaagtattttgagttaagcctaagctgattaatcacacaatacatacttttcctgcattttctttcagtgacatttgagaattgggtgacattttaaaatgtgttttataccatttagcttttgcaaacaagttctaaagttttggagaaaaagtgatgtggtcaagagttgaagtctcatatatctttagtagcactcccatgaattatttccgtgacagtaacaagtgtgtgttccatgtctgatttggggcactggttagactgcattaatagctacttgattagaattcgaacttttaaaattttgaaatgtttaagaatgtattagaaaatgcatgctttatgttgaaaaaatacattgctttaatattcctcattcttgagttaagaaatttatgttaattttgcatgggcacaaacttaatcagaaacattttgtggagttacatttcctcttattatttatcaaggttcagtattgatctttgaaaccttggtcccgttaacttactagtcacattgaccaatgttttatagaaatgcctagaattttgagactaatagtagttatccattaacattccaaaagttttgtgctttttaaaatttgttttggtaattatcacatttttttctcttaccttcctttaaatggccacagtgtgtactgctggaatgttccatccaaaagatgtagcttcagaagcacagtgattgccccagggtccatgagatattgtttgtattatgaagttggagtgctgtctactgaaattatactcttaaataaatatgtatgtagtgtgtaatattttctaataaattcttttgataaac

SEQ ID NO: 445916 - DNA, 7607 bp, Homo sapiens
agggagacgcgcagggaggggaggggagggaggaggctagacaaggcgggggaagggggagtagcggtggcttaagccgcgcggagcagcgcaacctgggtcgctccctgcttcgccgccgcctccggaccgagccagcggagtcagtgtcctagagaccctgtaacaccacaaagcggacgaaggagtccatgttggggaacttggcagcggagtgactgggacctgggaacctactgtggggccgcggccggaccgagcgcctcgacctcggtctgaggaaacccttttccaaagagaaatgaagaagaaaactgtatgtaccctaaatatgggagataagaagtatgaagacatggaaggtgaagaaaacggagataatactatttccactggtctgttgtacagtgaggctgacagatgcccaatatgtcttaattgtctattagaaaaggaagttggttttccagaaagctgtaatcatgtcttctgtatgacttgtattcttaaatgggcagagacactggcttcatgtcctattgaccgtaaaccttttcaggcagtgtttaaattcagtgcattggaaggttatgttaaggttcaagtaaaaaaacagctgagagaaacaaaagacaagaaaaatgaaaactcatttgagaaacaggtctcctgtcatgaaaattctaaaagctgtataagaagaaaagccatcgtaagagaagatctattaagtgcaaaagtttgtgacttgaagtggatacatagaaactctttatacagtgaaacaggaggaaagaaaaatgcagcaataaagataaataagcctcagagatcaaattggagtacaaatcagtgcttcagaaattttttctccaatatgttttcttctgttagccactctggagaatcttcctttacctatagagcttattgtacagaatttatagaagccagtgaaatcagtgcattgattaggcagaagagacatgaactggaattgtcatggtttcctgatacattacctggaattggaagaattggttttataccctggaatgttgaaacagaagtccttcctctcatttcttctgtgttgccaagaactatttttccaacaagtaccatatctttcgaacattttggtacttcttgcaagggatatgcattagcacatactcaagaaggggaagaaaagaagcaaacttctggtacatcaaataccagaggatcaagacgaaaacctgcaatgacaactcctacaaggaggtctacacgtaacacaagagctgaaacagccagtcagtctcagagatccccaatatcagacaattctgggtgtgatgccccaggtaacagtaatccatctttaagtgttccctcttcagctgagtcagaaaagcaaacaagacaggctccaaaacggaagtctgtaagaagaggaagaaaaccacctttactgaaaaagaaacttcggagctctgtagctgcccctgaaaaatcatcttccaatgattcagtagatgaagaaacagcagaatctgacacatcacctgtgttagaaaaagagcaccaaccagatgtagacagtagtaacatttgtactgtgcagactcatgtagaaaaccagtctgctaattgcttgaaaagttgcaatgagcaaatagaagaaagtgagaagcatactgcaaattatgatacagaggaaagagtaggatcttcatcttctgagtcttgtgctcaagatcttcctgtgctagttggtgaggaaggggaagttaaaaaactcgagaatacaggtatagaggctaatgttttgtgtttggaaagtgagatttctgaaaatattcttgaaaaaggaggtgatccattggaaaagcaagaccagatatctggactttcacaatcagaggtaaagacagatgtatgtacagttcatcttccaaatgattttcctacatgtttaacatctgaaagcaaagtgtaccaacctgtatcttgtcccctaagtgacttatctgagaatgtagagtcagtggttaatgaagaaaaaataacagagagttccctagtagaaattactgaacataaagattttacactaaaaacagaggagcttatagagagccccaagttagaatcttctgagggtgaaattatacagacagtggacagacaatctgttaagagcccagaggttcaattgcttgggcatgttgaaactgaagatgtagaaataattgcaacatgtgatacttttgggaatgaagatttcaataatattcaagactctgaaaataacttactaaaaaataatcttctgaacaccaaattggaaaaatctttagaagaaaagaatgaatcgctgaccgaacatcctagatctacagagttgcctaaaacacacattgaacagattcagaagcattttagtgaggacaacaatgaaatgatacctatggagtgtgattcattttgcagtgaccaaaatgaatctgaagttgaaccatctgtaaatgctgatcttaaacaaatgaatgaaaattctgtgacacactgttctgaaaataatatgccgtcttctgatcttgcggatgaaaaggttgaaactgtttctcaaccatctgaaagcccaaaagataccatagataaaaccaaaaagcctcgtactcgaagatctagatttcattctccatctacaacttggtcacccaacaaagacactccacaagaaaagaagcggccccagtctccatctcccagaagagaaactgggaaagaaagcaggaagtctcaatcaccatctcctaagaatgagtcagccagaggccggaaaaaatcccgttctcagtccccaaaaaaggatattgcaagagaaaggaggcaatctcagtctcggtctccaaaaagggatactactagggaaagcagaagatctgaatcactgtccccaagaagagaaacttctagagagaacaaaagatctcagccaagagtgaaagattcttccccaggagaaaaatccaggtcccagagcagagaacgagaaagtgatagagatgggcagaggagagagagagaaaggagaaccagaaagtggtctaggtccagatctcattctaggtccccctcaagatgtagaacaaaaagtaagagttcatcatttggtagaattgacagagatagttactctccccggtggaagggaagatgggcaaatgatggttggagatgtccacgaggaaatgatcggtacagaaagaatgacccagagaaacagaatgaaaatacaagaaaagaaaaaaatgacatccatctagatgctgatgatccaaattctgctgacaaacatagaaatgactgtcccaattggataacagaaaaaataaactctgggcctgatccaagaaccagaaatccagaaaagttgaaagagtctcattgggaagaaaatagaaatgaaaattcaggaaattcttggaataaaaactttggttctggttgggtatctaaccgtggtagaggcagaggcaaccgtggcagaggcacttacagaagtagttttgcctataaagatcagaatgaaaatcggtggcaaaatcgaaaacccctctcagggaattcaaacagttcagggagtgaatctttcaagtttgtggaacagcaatcctataagcgaaaaagtgaacaggagttctcatttgatacaccagcagatagatctggatggacatctgcatccagctgggccgtgagaaagactttgccagcagatgtacaaaactactactcacgacgaggcagaaattcttcaggtccacagtctggatggatgaaacaagaggaggaaacatctggacaggattctagcctaaaagaccaaacaaaccagcaagttgatggttctcagctacctataaatatgatgcaaccgcaaatgaatgtaatgcagcaacaaatgaatgcacaacaccagcctatgaatatcttcccatatccagtgggtgttcatgctcctttgatgaacatccaacgcaatccatttaacattcatcctcagctacccttgcatctccacacaggagtgcccctcatgcaggtagccactcctaccagtgtatctcagggactaccaccaccaccaccccctcccccaccatcccaacaagtcaactacattgcttcacaaccagatggaaagcaattgcagggtattcctagttcttctcatgtaagtaataacatgagtacaccagttttgcctgctccgacagcagccccaggaaatacgggaatggttcagggaccaagttctggtaatacttcgtcatcaagtcacagcaaagcctctaatgctgctgtaaaattggcagaaagcaaagtaagtgttgcagtggaagccagcgcagatagctcgaagacagacaagaaattgcaaattcaagaaaaagcagcacaagaggtaaaattggccatcaagccattttaccaaaataaagatatcaccaaggaagaatataaagaaattgtacggaaagcagtagataaagtttgtcatagtaagagtggagaagtaaattctactaaagtggcaaatctggttaaagcctatgtagacaaatacaaatattcacggaaggggagccaaaagaaaactctggaagaacctgtgtctactgaaaaaaacataggctgaaatggggaacgctgtcaaggacattatcaggatatctgcaaagtgcaatttcaacatgtaccattaactgaaaatcatacataactgtgattgaaatttggttttgataaaattatttttttaacataggatatgatgttttgttctaaataaatataggtctgcactgcaacttctgtatccttccttcccctccaccctcccccacaaaattcaagggaaagtaaagggtttaaaggaatgtgcatctttactaggactgtgttatagtgtggatactggaaaatgtatagctttttgattagggcaatggagtgcataaattagaaacttctaagtgcactggttttcaaagagatatatataatgcatttattctgtcaggttaaaatataaagtatgatctttatgattttttccctctaattatagaaagttaaataatgtattaccatgaaaaatgtttctaatattaaatagaacatatcagttgcaaagttcctaatgtgtatttttaaagcacatatctgaataaattgcctagatagaaaaaaaattatcacgagtaaaatttagtgttcaaaacattgagacactcttcacctattgtatgaccaaataaaggttatgctgcttgtttttcttttgtgcctttgtttacccctaattgagataagcagtttgacttactagattacaactttggcagttcaaagtctttgttgaagactttgaggaaaaagatttggaaaaattgttgactttcggccgggcatgatggctcacgcctgtaatcccagcactttgggaggccgaggtggcggatcacctgaggtcaggagttcgagaccagcctggccaacatggtgaaatcccgtctctactaaaaatacaaaaattagccaggcgtggtggtgggcgcctgtaatcccagctatgcgagaggctgaggcaggagaatcagttgaacccgggaggcggggattgcagtgagccgagaccatgccattgcactccagcctgggcaacaggagcaaatctccgtctcaaaaaaaagaaaaaaaaaagtgttgactttgtagaaattatgttctttcatagtatcttcttctacccgttgcagacgataaattatttgtgccaattcgagaattgctgttaggctgttatcctcccttccttggggctaagaattacaagactcatggcactggcgtaaagttgttgtttatctaatcactgatgaaatattttcacacttgaaaatccccaaatgctttacaatgaatgaagtgttaatttggtgaccaggtggtagccattagccatgttgcaaaattctagacagtaaaacctgtgttttagaaacagaggggaaatttaaataatggagtcctggttagcctttcagggattagggatttgggtttttttttttctctctttttaatactagaatatctcagtttttataaaaggtaagtttaaaatgtttattgtgccattattttaactggcatcttgaaagaacagtaggttttctccatgataaactgattccagtaagaattttcagtacataccaagtacctggaaagttcttcagataagttaatagatccaaggagatacatgcctcagtgagataaactgacctttttactagctaaactatttagccagagcaatactctgtagaactgtgcttttctaaagtaaagattatctgtttctcaattttatgtgcataatacttttcctggtgctagctttgataggcaaaatattttgaaatgttggtcccataatgattgtgctagttcataagctttgttgttatgagtgtaatcataaaaatatttccaagcagtttttgacctttattctacatttctgggcatttgtaatatggtattctactggtatatatttttaaagtttgcgtttagattatggtaaagaaatttcaagcatatttcttctaataaagtattaagacagtgtttcagaatatcaaggcacacctccttagttgttttagattagaactctagaaacaattttgtgaacattgaaagtattttgagttaagcctaagctgattaatcacacaatacatacttttcctgcattttctttcagtgacatttgagaattgggtgacattttaaaatgtgttttataccatttagcttttgcaaacaagttctaaagttttggagaaaaagtgatgtggtcaagagttgaagtctcatatatctttagtagcactcccatgaattatttccgtgacagtaacaagtgtgtgttccatgtctgatttggggcactggttagactgcattaatagctacttgattagaattcgaacttttaaaattttgaaatgtttaagaatgtattagaaaatgcatgctttatgttgaaaaaatacattgctttaatattcctcattcttgagttaagaaatttatgttaattttgcatgggcacaaacttaatcagaaacattttgtggagttacatttcctcttattatttatcaaggttcagtattgatctttgaaaccttggtcccgttaacttactagtcacattgaccaatgttttatagaaatgcctagaattttgagactaatagtagttatccattaacattccaaaagttttgtgctttttaaaatttgttttggtaattatcacatttttttctcttaccttcctttaaatggccacagtgtgtactgctggaatgttccatccaaaagatgtagcttcagaagcacagtgattgccccagggtccatgagatattgtttgtattatgaagttggagtgctgtctactgaaattatactcttaaataaatatgtatgtagtgtgtaatattttctaataaattcttttgataaac

SEQ ID NO: 445917 - DNA, 5348 bp, Homo sapiens
gaaagtgccagaaaagcgacgtcctcagggcgggagcaggggacgccgcaacgtagtctgcgagaatgcaggaaggcggcagtgaagcggtcggtcggcggggccgcggcaaagtggggaggaaactcatcccgggcaggcgtcagggtggctggagagcgcagcacgcgcgaacagaacgggggcaggcgacaggaaaacgtgtgagcgcgcggctgaaagcgactgggacctgggaaacccttttccaaagagaaatgaagaagaaaactgtatgtaccctaaatatgggagataagaagtatgaagacatggaaggtgaagaaaacggagataatactatttccactggtctgttgtacagtgaggctgacagatgcccaatatgtcttaattgtctattagaaaaggaagttggttttccagaaagctgtaatcatgtcttctgtatgacttgtattcttaaatgggcagaggaattatttattcccataaaaaccttagagacactggcttcatgtcctattgaccgtaaaccttttcaggcagtgtttaaattcagtgcattggaaggttatgttaaggttcaagtaaaaaaacagctgagagaaacaaaagacaagaaaaatgaaaactcatttgagaaacaggtctcctgtcatgaaaattctaaaagctgtataagaagaaaagccatcgtaagagaagatctattaagtgcaaaagtttgtgacttgaagtggatacatagaaactctttatacagtgaaacaggaggaaagaaaaatgcagcaataaagataaataagcctcagagatcaaattggagtacaaatcagtgcttcagaaattttttctccaatatgttttcttctgttagccactctggagaatcttcctttacctatagagcttattgtacagaatttatagaagccagtgaaatcagtgcattgattaggcagaagagacatgaactggaattgtcatggtttcctgatacattacctggaattggaagaattggttttataccctggaatgttgaaacagaagtccttcctctcatttcttctgtgttgccaagaactatttttccaacaagtaccatatctttcgaacattttggtacttcttgcaagggatatgcattagcacatactcaagaaggggaagaaaagaagcaaacttctggtacatcaaataccagaggatcaagacgaaaacctgcaatgacaactcctacaaggaggtctacacgtaacacaagagctgaaacagccagtcagtctcagagatccccaatatcagacaattctgggtgtgatgccccaggtaacagtaatccatctttaagtgttccctcttcagctgagtcagaaaagcaaacaagacaggctccaaaacggaagtctgtaagaagaggaagaaaaccacctttactgaaaaagaaacttcggagctctgtagctgcccctgaaaaatcatcttccaatgattcagtagatgaagaaacagcagaatctgacacatcacctgtgttagaaaaagagcaccaaccagatgtagacagtagtaacatttgtactgtgcagactcatgtagaaaaccagtctgctaattgcttgaaaagttgcaatgagcaaatagaagaaagtgagaagcatactgcaaattatgatacagaggaaagagtaggatcttcatcttctgagtcttgtgctcaagatcttcctgtgctagttggtgaggaaggggaagttaaaaaactcgagaatacaggtatagaggctaatgttttgtgtttggaaagtgagatttctgaaaatattcttgaaaaaggaggtgatccattggaaaagcaagaccagatatctggactttcacaatcagaggtaaagacagatgtatgtacagttcatcttccaaatgattttcctacatgtttaacatctgaaagcaaagtgtaccaacctgtatcttgtcccctaagtgacttatctgagaatgtagagtcagtggttaatgaagaaaaaataacagagagttccctagtagaaattactgaacataaagattttacactaaaaacagaggagcttatagagagccccaagttagaatcttctgagggtgaaattatacagacagtggacagacaatctgttaagagcccagaggttcaattgcttgggcatgttgaaactgaagatgtagaaataattgcaacatgtgatacttttgggaatgaagatttcaataatattcaagactctgaaaataacttactaaaaaataatcttctgaacaccaaattggaaaaatctttagaagaaaagaatgaatcgctgaccgaacatcctagatctacagagttgcctaaaacacacattgaacagattcagaagcattttagtgaggacaacaatgaaatgatacctatggagtgtgattcattttgcagtgaccaaaatgaatctgaagttgaaccatctgtaaatgctgatcttaaacaaatgaatgaaaattctgtgacacactgttctgaaaataatatgccgtcttctgatcttgcggatgaaaaggttgaaactgtttctcaaccatctgaaagcccaaaagataccatagataaaaccaaaaagcctcgtactcgaagatctagatttcattctccatctacaacttggtcacccaacaaagacactccacaagaaaagaagcggccccagtctccatctcccagaagagaaactgggaaagaaagcaggaagtctcaatcaccatctcctaagaatgagtcagccagaggccggaaaaaatcccgttctcagtccccaaaaaaggatattgcaagagaaaggaggcaatctcagtctcggtctccaaaaagggatactactagggaaagcagaagatctgaatcactgtccccaagaagagaaacttctagagagaacaaaagatctcagccaagagtgaaagattcttccccaggagaaaaatccaggtcccagagcagagaacgagaaagtgatagagatgggcagaggagagagagagaaaggagaaccagaaagtggtctaggtccagatctcattctaggtccccctcaagatgtagaacaaaaagtaagagttcatcatttggtagaattgacagagatagttactctccccggtggaagggaagatgggcaaatgatggttggagatgtccacgaggaaatgatcggtacagaaagaatgacccagagaaacagaatgaaaatacaagaaaagaaaaaaatgacatccatctagatgctgatgatccaaattctgctgacaaacatagaaatgactgtcccaattggataacagaaaaaataaactctgggcctgatccaagaaccagaaatccagaaaagttgaaagagtctcattgggaagaaaatagaaatgaaaattcaggaaattcttggaataaaaactttggttctggttgggtatctaaccgtggtagaggcagaggcaaccgtggcagaggcacttacagaagtagttttgcctataaagatcagaatgaaaatcggtggcaaaatcgaaaacccctctcagggaattcaaacagttcagggagtgaatctttcaagtttgtggaacagcaatcctataagcgaaaaagtgaacaggagttctcatttgatacaccagcagatagatctggatggacatctgcatccagctgggccgtgagaaagactttgccagcagatgtacaaaactactactcacgacgaggcagaaattcttcaggtccacagtctggatggatgaaacaagaggaggaaacatctggacaggattctagcctaaaagaccaaacaaaccagcaagttgatggttctcagctacctataaatatgatgcaaccgcaaatgaatgtaatgcagcaacaaatgaatgcacaacaccagcctatgaatatcttcccatatccagtgggtgttcatgctcctttgatgaacatccaacgcaatccatttaacattcatcctcagctacccttgcatctccacacaggagtgcccctcatgcaggtagccactcctaccagtgtatctcagggactaccaccaccaccaccccctcccccaccatcccaacaagtcaactacattgcttcacaaccagatggaaagcaattgcagggtattcctagttcttctcatgtaagtaataacatgagtacaccagttttgcctgctccgacagcagccccaggaaatacgggaatggttcagggaccaagttctggtaatacttcgtcatcaagtcacagcaaagcctctaatgctgctgtaaaattggcagaaagcaaagtaagtgttgcagtggaagccagcgcagatagctcgaagacagacaagaaattgcaaattcaagaaaaagcagcacaagaggtaaaattggccatcaagccattttaccaaaataaagatatcaccaaggaagaatataaagaaattgtacggaaagcagtagataaagtttgtcatagtaagagtggagaagtaaattctactaaagtggcaaatctggttaaagcctatgtagacaaatacaaatattcacggaaggggagccaaaagaaaactctggaagaacctgtgtctactgaaaaaaacataggctgaaatggggaacgctgtcaaggacattatcaggatatctgcaaagtgcaatttcaacatgtaccattaactgaaaatcatacataactgtgattgaaatttggttttgataaaattatttttttaacataggatatgatgttttgttctaaataaatataggtctgcactgcaacttctgtatccttccttcccctccaccctcccccacaaaattcaagggaaagtaaagggtttaaaggaatgtgcatctttactaggactgtgttatagtgtggatactggaaaatgtatagctttttgattagggcaatggagtgcataaattagaaacttctaagtgcactggttttcaaagagatatatataatgcatttattctgtcaggttaaaatataaagtatgatctttatgattttttccctctaattatagaaagttaaataatgtattaccatgaaaaatgtttctaatattaaatagaacatatcagttgcaaagttcctaatgtgtatttttaaagcacatatctgaataaattgcctagatagaaaaaaaattatcacgagtaaaatttagtgttcaaaacattgagacactcttcacctattgtatgaccaaataaaggttatgctgcttgtaaaaaaaaaaaaaaaaaaaaaaaaaaaaaaa

SEQ ID NO: 445918 - DNA, 4638 bp, Homo sapiens
gaaagtgccagaaaagcgacgtcctcagggcgggagcaggggacgccgcaacgtagtctgcgagaatgcaggaaggcggcagtgaagcggtcggtcggcggggccgcggcaaagtggggaggaaactcatcccgggcaggcgtcagggtggctggagagcgcagcacgcgcgaacagaacgggggcaggcgacaggaaaacgtgtgagcgcgcggctgaaagcgactgggacctgggaaacccttttccaaagagaaatgaagaagaaaactgtatgtaccctaaatatgggagataagaagtatgaagacatggaaggtgaagaaaacggagataatactatttccactggtctgttgtacagtgaggctgacagatgcccaatatgtcttaattgtctattagaaaaggaagttggttttccagaaagctgtaatcatgtcttctgtatgacttgtattcttaaatgggcagaggaattatttattcccataaaaaccttagagacactggcttcatgtcctattgaccgtaaaccttttcaggcagtgtttaaattcagtgcattggaaggttatgttaaggttcaagtaaaaaaacagctgagagaaacaaaagacaagaaaaatgaaaactcatttgagaaacaggtctcctgtcatgaaaattctaaaagctgtataagaagaaaagccatcgtaagagaagatctattaagtgcaaaagtttgtgacttgaagtggatacatagaaactctttatacagtgaaacaggaggaaagaaaaatgcagcaataaagataaataagcctcagagatcaaattggagtacaaatcagtgcttcagaaattttttctccaatatgttttcttctgttagccactctggagaatcttcctttacctatagagcttattgtacagaatttatagaagccagtgaaatcagtgcattgattaggcagaagagacatgaactggaattgtcatggtttcctgatacattacctggaattggaagaattggttttataccctggaatgttgaaacagaagtccttcctctcatttcttctgtgttgccaagaactatttttccaacaagtaccatatctttcgaacattttggtacttcttgcaagggatatgcattagcacatactcaagaaggggaagaaaagaagcaaacttctggtacatcaaataccagaggatcaagacgaaaacctgcaatgacaactcctacaaggaggtctacacgtaacacaagagctgaaacagccagtcagtctcagagatccccaatatcagacaattctgggtgtgatgccccaggtaacagtaatccatctttaagtgttccctcttcagctgagtcagaaaagcaaacaagacaggctccaaaacggaagtctgtaagaagaggaagaaaaccacctttactgaaaaagaaacttcggagctctgtagctgcccctgaaaaatcatcttccaatgattcagtagatgaagaaacagcagaatctgacacatcacctgtgttagaaaaagagcaccaaccagatgtagacagtagtaacatttgtactgtgcagactcatgtagaaaaccagtctgctaattgcttgaaaagttgcaatgagcaaatagaagaaagtgagaagcatactgcaaattatgatacagaggaaagagtaggatcttcatcttctgagtcttgtgctcaagatcttcctgtgctagttggtgaggaaggggaagttaaaaaactcgagaatacaggtatagaggctaatgttttgtgtttggaaagtgagatttctgaaaatattcttgaaaaaggaggtgatccattggaaaagcaagaccagatatctggactttcacaatcagaggtaaagacagatgtatgtacagttcatcttccaaatgattttcctacatgtttaacatctgaaagcaaagtgtaccaacctgtatcttgtcccctaagtgacttatctgagaatgtagagtcagtggttaatgaagaaaaaataacagagagttccctagtagaaattactgaacataaagattttacactaaaaacagaggagcttatagagagccccaagttagaatcttctgagggtgaaattatacagacagtggacagacaatctgttaagagcccagaggttcaattgcttgggcatgttgaaactgaagatgtagaaataattgcaacatgtgatacttttgggaatgaagatttcaataatattcaagactctgaaaataacttactaaaaaataatcttctgaacaccaaattggaaaaatctttagaagaaaagaatgaatcgctgaccgaacatcctagatctacagagttgcctaaaacacacattgaacagattcagaagcattttagtgaggacaacaatgaaatgatacctatggagtgtgattcattttgcagtgaccaaaatgaatctgaagttgaaccatctgtaaatgctgatcttaaacaaatgaatgaaaattctgtgacacactgttctgaaaataatatgccgtcttctgatcttgcggatgaaaaggttgaaactgtttctcaaccatctgaaagcccaaaagataccatagataaaaccaaaaagcctcgtactcgaagatctagatttcattctccatctacaacttggtcacccaacaaagacactccacaagaaaagaagcggccccagtctccatctcccagaagagaaactgggaaagaaagcaggaagtctcaatcaccatctcctaagaatgagtcagccagaggccggaaaaaatcccgttctcagtccccaaaaaaggatattgcaagagaaaggaggcaatctcagtctcggtctccaaaaagggatactactagggaaagcagaagatctgaatcactgtccccaagaagagaaacttctagagagaacaaaagatctcagccaagagtgaaagattcttccccaggagaaaaatccaggtcccagagcagagaacgagaaagtgatagagatgggcagaggagagagagagaaaggagaaccagaaagtggtctaggtccagatctcattctaggtccccctcaagatgtagaacaaaaagtaagagttcatcatttggtagaattgacagagatagttactctccccggtggaagggaagatgggcaaatgatggttggagatgtccacgaggaaatgatcggtacagaaagaatgacccagagaaacagaatgaaaatacaagaaaagaaaaaaatgacatccatctagatgctgatgatccaaattctgctgacaaacatagaaatgactgtcccaattggataacagaaaaaataaactctgggcctgatccaagaaccagaaatccagaaaagttgaaagagtctcattgggaagaaaatagaaatgaaaattcaggaaattcttggaataaaaactttggttctggttgggtatctaaccgtggtagaggcagaggcaaccgtggcagaggcacttacagaagtagttttgcctataaagatcagaatgaaaatcggtggcaaaatcgaaaacccctctcagggaattcaaacagttcagggagtgaatctttcaagtttgtggaacagcaatcctataagcgaaaaagtgaacaggagttctcatttgatacaccagcagatagatctggatggacatctgcatccagctgggccgtgagaaagactttgccagcagatgtacaaaactactactcacgacgaggcagaaattcttcaggtccacagtctggatggatgaaacaagaggaggaaacatctggacaggattctagcctaaaagaccaaacaaaccagcaagttgatggttctcagctacctataaatatgatgcaaccgcaaatgaatgtaatgcagcaacaaatgaatgcacaacaccagcctatgaatatcttcccatatccagtgggtgttcatgctcctttgatgaacatccaacgcaatccatttaacattcatcctcagctacccttgcatctccacacaggagtgcccctcatgcaggtagccactcctaccagtgtatctcagggactaccaccaccaccaccccctcccccaccatcccaacaagtcaactacattgcttcacaaccagatggaaagcaattgcagggtattcctagttcttctcatgtaagtaataacatgagtacaccagttttgcctgctccgacagcagccccaggaaatacgggaatggttcagggaccaagttctggtaatacttcgtcatcaagtcacagcaaagcctctaatgctgctgtaaaattggcagaaagcaaagtaagtgttgcagtggaagccagcgcagatagctcgaagacagacaagaaattgcaaattcaagaaaaagcagcacaagaggtaaaattggccatcaagccattttaccaaaataaagatatcaccaaggaagaatataaagaaattgtacggaaagcagtagataaagtaagttatggctttagtggagtatgtgcacgttgttttgaaccacctctgttttaataaatgaatgctgaagtttaattaaaataataaaagctagctcctacta

SEQ ID NO: 445919 - DNA, 4660 bp, Homo sapiens
gaaagtgccagaaaagcgacgtcctcagggcgggagcaggggacgccgcaacgtagtctgcgagaatgcaggaaggcggcagtgaagcggtcggtcggcggggccgcggcaaagtggggaggaaactcatcccgggcaggcgtcagggtggctggagagcgcagcacgcgcgaacagaacgggggcaggcgacaggaaaacgtgtgagcgcgcggctgaaagcgactgggacctgggaaacccttttccaaagagaaatgaagaagaaaactgtatgtaccctaaatatgggagataagaagtatgaagacatggaaggtgaagaaaacggagataatactatttccactggtctgttgtacagtgaggctgacagatgcccaatatgtcttaattgtctattagaaaaggaagttggttttccagaaagctgtaatcatgtcttctgtatgacttgtattcttaaatgggcagaggaattatttattcccataaaaaccttagagacactggcttcatgtcctattgaccgtaaaccttttcaggcagtgtttaaattcagtgcattggaaggttatgttaaggttcaagtaaaaaaacagctgagagaaacaaaagacaagaaaaatgaaaactcatttgagaaacaggtctcctgtcatgaaaattctaaaagctgtataagaagaaaagccatcgtaagagaagatctattaagtgcaaaagtttgtgacttgaagtggatacatagaaactctttatacagtgaaacaggaggaaagaaaaatgcagcaataaagataaataagcctcagagatcaaattggagtacaaatcagtgcttcagaaattttttctccaatatgttttcttctgttagccactctggagaatcttcctttacctatagagcttattgtacagaatttatagaagccagtgaaatcagtgcattgattaggcagaagagacatgaactggaattgtcatggtttcctgatacattacctggaattggaagaattggttttataccctggaatgttgaaacagaagtccttcctctcatttcttctgtgttgccaagaactatttttccaacaagtaccatatctttcgaacattttggtacttcttgcaagggatatgcattagcacatactcaagaaggggaagaaaagaagcaaacttctggtacatcaaataccagaggatcaagacgaaaacctgcaatgacaactcctacaaggaggtctacacgtaacacaagagctgaaacagccagtcagtctcagagatccccaatatcagacaattctgggtgtgatgccccaggtaacagtaatccatctttaagtgttccctcttcagctgagtcagaaaagcaaacaagacaggctccaaaacggaagtctgtaagaagaggaagaaaaccacctttactgaaaaagaaacttcggagctctgtagctgcccctgaaaaatcatcttccaatgattcagtagatgaagaaacagcagaatctgacacatcacctgtgttagaaaaagagcaccaaccagatgtagacagtagtaacatttgtactgtgcagactcatgtagaaaaccagtctgctaattgcttgaaaagttgcaatgagcaaatagaagaaagtgagaagcatactgcaaattatgatacagaggaaagagtaggatcttcatcttctgagtcttgtgctcaagatcttcctgtgctagttggtgaggaaggggaagttaaaaaactcgagaatacaggtatagaggctaatgttttgtgtttggaaagtgagatttctgaaaatattcttgaaaaaggaggtgatccattggaaaagcaagaccagatatctggactttcacaatcagaggtaaagacagatgtatgtacagttcatcttccaaatgattttcctacatgtttaacatctgaaagcaaagtgtaccaacctgtatcttgtcccctaagtgacttatctgagaatgtagagtcagtggttaatgaagaaaaaataacagagagttccctagtagaaattactgaacataaagattttacactaaaaacagaggagcttatagagagccccaagttagaatcttctgagggtgaaattatacagacagtggacagacaatctgttaagagcccagaggttcaattgcttgggcatgttgaaactgaagatgtagaaataattgcaacatgtgatacttttgggaatgaagatttcaataatattcaagactctgaaaataacttactaaaaaataatcttctgaacaccaaattggaaaaatctttagaagaaaagaatgaatcgctgaccgaacatcctagatctacagagttgcctaaaacacacattgaacagattcagaagcattttagtgaggacaacaatgaaatgatacctatggagtgtgattcattttgcagtgaccaaaatgaatctgaagttgaaccatctgtaaatgctgatcttaaacaaatgaatgaaaattctgtgacacactgttctgaaaataatatgccgtcttctgatcttgcggatgaaaaggttgaaactgtttctcaaccatctgaaagcccaaaagataccatagataaaaccaaaaagcctcgtactcgaagatctagatttcattctccatctacaacttggtcacccaacaaagacactccacaagaaaagaagcggccccagtctccatctcccagaagagaaactgggaaagaaagcaggaagtctcaatcaccatctcctaagaatgagtcagccagaggccggaaaaaatcccgttctcagtccccaaaaaaggatattgcaagagaaaggaggcaatctcagtctcggtctccaaaaagggatactactagggaaagcagaagatctgaatcactgtccccaagaagagaaacttctagagagaacaaaagatctcagccaagagtgaaagattcttccccaggagaaaaatccaggtcccagagcagagaacgagaaagtgatagagatgggcagaggagagagagagaaaggagaaccagaaagtggtctaggtccagatctcattctaggtccccctcaagatgtagaacaaaaagtaagagttcatcatttggtagaattgacagagatagttactctccccggtggaagggaagatgggcaaatgatggttggagatgtccacgaggaaatgatcggtacagaaagaatgacccagagaaacagaatgaaaatacaagaaaagaaaaaaatgacatccatctagatgctgatgatccaaattctgctgacaaacatagaaatgactgtcccaattggataacagaaaaaataaactctgggcctgatccaagaaccagaaatccagaaaagttgaaagagtctcattgggaagaaaatagaaatgaaaattcaggaaattcttggaataaaaactttggttctggttgggtatctaaccgtggtagaggcagaggcaaccgtggcagaggcacttacagaagtagttttgcctataaagatcagaatgaaaatcggtggcaaaatcgaaaacccctctcagggaattcaaacagttcagggagtgaatctttcaagtttgtggaacagcaatcctataagcgaaaaagtgaacaggagttctcatttgatacaccagcagatagatctggatggacatctgcatccagctgggccgtgagaaagactttgccagcagatgtacaaaactactactcacgacgaggcagaaattcttcaggtccacagtctggatggatgaaacaagaggaggaaacatctggacaggattctagcctaaaagaccaaacaaaccagcaagttgatggttctcagctacctataaatatgatgcaaccgcaaatgaatgtaatgcagcaacaaatgaatgcacaacaccagcctatgaatatcttcccatatccagtgggtgttcatgctcctttgatgaacatccaacgcaatccatttaacattcatcctcagctacccttgcatctccacacaggagtgcccctcatgcaggtagccactcctaccagtgtatctcagggactaccaccaccaccaccccctcccccaccatcccaacaagtcaactacattgcttcacaaccagatggaaagcaattgcagggtattcctagttcttctcatgtaagtaataacatgagtacaccagttttgcctgctccgacagcagccccaggaaatacgggaatggttcagggaccaagttctggtaatacttcgtcatcaagtcacagcaaagcctctaatgctgctgtaaaattggcagaaagcaaaaaattgcaaattcaagaaaaagcagcacaagaggtaaaattggccatcaagccattttaccaaaataaagatatcaccaaggaagaatataaagaaattgtacggaaagcagtagataaatgtgtactgctggaatgttccatccaaaagatgtagcttcagaagcacagtgattgccccagggtccatgagatattgtttgtattatgaagttggagtgctgtctactgaaattatactcttaaataaatatgtatgtagtgtgtaatattttctaataaattcttttgataaac

SEQ ID NO: 445920 - DNA, 1086 bp, Homo sapiens
agggagacgcgcagggaggggaggggagggaggaggctagacaaggcgggggaagggggagtagcggtggcttaagccgcgcggagcagcgcaacctgggtcgctccctgcttcgccgccgcctccggaccgagccagcggagtcagtgtcctagagaccctgtaacaccacaaagcggacgaaggagtccatgttggggaacttggcagcggagtgactgggacctgggaacctactgtggggccgcggccggaccgagcgcctcgacctcggtctgaggaaacccttttccaaagagaaatgaagaagaaaactgtatgtaccctaaatatgggagataagaagtatgaagacatggaaggtgaagaaaacggagataatactatttccactggtctgttgtacagtgaggctgacagatgcccaatatgtcttaattgtctattagaaaaggaagttggttttccagaaagctgtaatcatgtcttctgtatgacttgtattcttaaatgggcagaggaattatttattcccataaaaaccttagagacactggcttcatgtcctattgaccgtaaaccttttcaggcagtgtttaaattcagtgcattggaaggttatgttaaggttcaagtaaaaaaacagctgagagaaacaaaagacaagaaaaatgaaaactcatttgagaaacaggtctcctgtcatgaaaattctaaaagctgtataaggttagtgattaactttagaagtggaatgcaaatgagtggaacagaagttaactagtacaaaaaaggtattaaaaaaatgaagtggggtttaaatgtatttaatcacttattcaaaagcacacacttgataatttaaggagggactagctgaaatctgagaatctgatttgagctctactctgtttttggtgaagaattggttctggctgggcatggtggctcactcctataatcccagtgctttgggaggctaaggtgagaggatcacatgagaccaggagtttggtaccagcctggggaacatagtgaggaccgtcctcccctcctctgtctctactaaaaaataacacaaaataa

SEQ ID NO: 445921 - DNA, 734 bp, Homo sapiens
aatctggcctttgagttcaatgtcctgggaacttaactctagggatgctctttccccctttagctaccgagtcacatgctgcgtctttggaaatttcaggcaatatttagtttggtgcaaaagtcattgtggtttttgcaattaattgcaaaaataataaatggaaaaatgaatttgtggacatcaggcttgcctagggagatgacctagggagaggcctcttttggcatagctcctgaacagggagaggtcctgacatgaataccccccgttttgtgaatcctgagccagtactgtgtccccggccccctcctcccccaacctatacacacgcctcactttcccttgcaggacgttttctaccacagttcctctctcctgacatagtatgtgtttgtttcttacttgtcttgccgcatgaggatgtaagttgcctgaattcaaaaacatgtcttcttttttgtgaatgaaagagtggctggcatgtagcaggtactgaaattatttgtagagtgaatgataaatctcagttcagggcactcagtgtggcctgggctacgtggaatagccaattggtggccacagagagtggccagccattcccaggctggcaatgtgagtcttagccactctcttttacagataatgtgcttattaaaatgatatcccaggcattccccagtggtgtttgaatcgtgaatgcaaatgtcagaggctctgaagtttaaagtctt

SEQ ID NO: 445922 - DNA, 666 bp, Homo sapiens
tccagttcaggcaaagacatccaaagtagaaagtgaccagccgcaaaactccaacgatgcttccatggatgccactgatcaagtggtatacaagcattgcacagtgtctggccaaacggatgcagctaaaaacgctgctgcccctgcagcaagttctggctctgggaccagcacccccctgattccatcacccaaaccagaacctgagaagacttctccaaaacctgaatatcccgcagaaaagccaaagcagagtgacccctctcccccttctcaaggcaccaaaccagccctgccatgagcatcgacttcctcggacccaccacaggcatccacagcccagccacagccacagccacagccaccaaaacaaccccaacttatcggaagacctccctcggcctctcaaacaccggtcccttccagtccactgcaaatttccatgacgtctctccagaacagtctacctccacagttactacaataccaatgtgatcagtgtacagttgccttcccaactctggaactctggcaggaacaccagcacatgcacttccttgctgctcaaaaccaattccttcactctccgttcttggaaaggcccatggacatgccctacatgatatttgaccccaacaatccgctgatgactggacaactgctggg

SEQ ID NO: 445923 - DNA, 809 bp, Homo sapiens
agttatgagaatcaagcagaaacaaaagataatgaaaaaagagaactcactaatgaacggtacattcgaacaagcaacatgcagtaccagtgtaaaaagtgcaatgtggttttccccaggatctttgacttgattacgcatcagaaaaagcagtgttacaaggatgaagatgatgatgcccaagatgaaagccaaacagaagactccatggatgccactgatcaagtggtatacaagcattgcacagtgtctggccaaacggatgcagctaaaaacgctgctgcccctgcagcaagttctggctctgggaccagcacccccctgattccatcacccaaaccagaacctgagaagacttctccaaaacctgaatatcccgcagaaaagccaaagcagagtgacccctctcccccttctcaaggcaccaaaccagccctgccatgagcatcgacttcctcggacccaccacaggcatccacagcccagccacagccacagccacagccaccaaaacaaccccaacttatcggaagacctccctcggcctctcaaacaccggtcccttccagtccactgcaaatttccatgacgtctctccagaacagtctacctccacagttactacaataccaatgtgatcagtgtacagttgccttcccaactctggaactctggcaggaacaccagcacatgcacttccttgctgctcaaaaccaattccttcactctccgttcttggaaaggcccatggacatgccctacatgatatttgaccccaacaatccgctgatgactggacaactgctggg

SEQ ID NO: 445924 - DNA, 794 bp, Homo sapiens
tcctcttctgaaagcttaatctcagtctgagctgctgtaaccaggcttagatccgggtactctgagaggatatggttcccccaaccctggggggatatggaggtagataccttgcttttatctcttaacttatcagagttgtggtccagaaactcattcaaactgggaggcctactttaagaatacaaagttaccaaaaaaaccccacttacttagaatgagaaaagtcacacagatcactagagccttggacattcaggcctcttccgtctgagttccttaggcatcgtaccagaaattcttcgagttgctgcctgactgcaacctggctccctctccccacccacaagtgccagcaactcccagcaccagcaggggccatttaagcaagccccctggaagctttcagcaaacctctctctttccctcagcctttgctctgcctgcttcctgggcttggggccgcagaggccagcgaggctcccttcattccctccaccaaagtgaggtcttccctgcccccacagagcaaactgatccccaaggccaaggccttggtgacaatgggactgtgagtcacaaaacaaacatagccagctgtcccgaatggatttttaatttctactgcaagacctgtttcagccccactggctgcttaaagccacccccactccctgctccttccttagtcctggctggagccccattcaatcagtcaacgattcacgaattattttgacatatattaagcaatgacttctccaggcctcatactggggataaaagtatcaata

SEQ ID NO: 445925 - DNA, 878 bp, Homo sapiens
ggggccagtcttgaccaacacatttcctgcctttcctctctcctctttgtccctgggggctgtttccaaatcattctggtcttttcccctgactcagtcccagtgaaatgtctcagcccagccctgacctgcactgtctcctttgggtgtctgaccaaggccccgagagagagtagggcagaaagtgtcttctgacaggggtgcttcagaactggtatgaccttcacagattattctagagcaactctcttttgttcaggtgaggaattagagaccagagaagtttagggacttggttgagctcacactgcaaaggtcactgggagagctgggacttgaattttaggtccctgactcctaggagaggacacagagccaacttgggaagcaaagaagcagagagggaaaatggtcattgtgagccatgcgagggccgcagaggctgagggtgggtctggtcatggcaggagccagaaggaggctcaggaaggctgggactggggcttttgaggacaggtctttttgcactcttttctcattgaatagaaacaaaagcctgaagctcaggctgggccccaccctggcacacctgaggggcactggggcagtgagtgagttctgtcccctgcctgtggctgtgtgactaagcaggagtcacacattggctctagactggaggagagcaaacaaggtctctgtggagtgcccccccccaacactcccacttccctagggcaaaagtcaacaggattagtcccatagcaggtggaaccagacaggtgcagagtagggaaggtgtggggccatcattcagcccctgttgtcaggactaacgtgtgtgcatgcgtgtgtgcatacctggtgcccacccccatact

SEQ ID NO: 445926 - DNA, 626 bp, Homo sapiens
gcgacacagtgtcactctgtcacaaacaaaaaaaccccacttacttagaatgagaaaagtcacacagatcactagagccttggacattcaggcctcttccgtctgagttccttaggcatcgtaccagaaattcttcgagttgctgcctgactgcaacctggctccctctccccacccacaagtgccagcaactcccagcaccagcaggggccatttaagcaagccccctggaagctttcagcaaacctctctctttccctcagcctttgctctgcctgcttcctgggcttggggccgcagaggccagcgaggctcccttcattccctccaccaaagtgaggtcttccctgcccccacagagcaaactgatccccaaggccaaggccttggtgacaatgggactgtgagtcacaaaacaaacatagccagctgtcccgaatggatttttaatttctactgcaagacctgtttcagccccactggctgcttaaagccacccccactccctgctccttccttagtcctggctggagccccattcaatcagtcaacgattcacgaattattttgacatatattaagcaatgacttctccaggcctcatactggggataaaagtatcaata

SEQ ID NO: 445927 - DNA, 150 bp, Homo sapiens
gcggccgcctactactactactactgctcgaattcaagcttctaacgatgtacggggacatgcctggtcccaagacagtgagacagtctggaaagtgatgtcagaatagcttccaataaagcagcctcattctgaggcctgagtgatcca

SEQ ID NO: 445928 - DNA, 1662 bp, Homo sapiens
  misc_feature (5)..(5): n is a, c, g, or t
aaaantaggctagtacgaggccgggtgttaatcggccgaggagtgcgcgctcctcctcgcccgccgctaggtccatcccggcccagccaccatgtccatccacttcagctccccggtattcacctcgcgctcagccgccttctcgggccgcggcgcccaggtgcgcctgagctccgctcgccccggcggccttggcagcagcagcctctacggcctcggcgcctcgcggccgcgcgtggccgtgcgctctgcctatgggggcccggtgggcgccggcatccgcgaggtcaccattaaccagagcctgctggccccgctgcggctggacgccgacccctccctccagcgggtgcgccaggaggagagcgagcagatcaagaccctcaacaacaagtttgcctccttcatcgacaaggtgcggtttctggagcagcagaacaagctgctggagaccaagtggacgctgctgcaggagcagaagtcggccaagagcagccgcctcccagacatctttgaggcccagattgctggccttcggggtcagcttgaggcactgcaggtggatgggggccgcctggaggcggagctgcggagcatgcaggatgtggtggaggacttcaagaataagtacgaagatgaaattaaccgccgcacagctgctgagaatgagtttgtggtgctgaagaaggatgtggatgctgcctacatgagcaaggtggagctggaggccaaggtggatgccctgaatgatgagatcaacttcctcaggaccctcaatgagacggagttgacagagctgcagtcccagatctccgacacatctgtggtgctgtccatggacaacagtcgctccctggacctggacggcatcatcgctgaggtcaaggcacagtatgaggagatggccaaatgcagccgggctgaggctgaagcctggtaccagaccaagtttgagaccctccaggcccaggctgggaagcatggggacgacctccggaatacccggaatgagatttcagagatgaaccgggccatccagaggctgcaggctgagatcgacaacatcaagaaccagcgtgccaagttggaggccgccattgccgaggctgaggagcgtggggagctggcgctcaaggatgctcgtgccaagcaggaggagctggaagccgccctgcagcgggccaagcaggatatggcacggcagctgcgtgagtaccaggaactcatgagcgtgaagctggccctggacatcgagatcgccacctaccgcaagctgctggagggcgaggagagccggttggctggagatggagtgggagccgtgaatatctctgtgatgaattccactggtggcagtagcagtggcggtggcattgggctgaccctcgggggaaccatgggcagcaatgccctgagcttctccagcagtgcgggtcctgggctcctgaaggcttattccatccggaccgcatccgccagtcgcaggagtgcccgcgactgagccgcctcccaccactccactcctccagccaccacccacaatcacaagaagattcccacccctgcctcccatgcctggtcccaagacagtgagacagtctggaaagtgatgtcagaatagcttccaataaagcagcctcattctgaggcctgagtgatcca

SEQ ID NO: 445929 - DNA, 1972 bp, Homo sapiens
gagtgggaaagacaggctcgaggagggttgtctgaaaacatatgggacaaaggactacaggatcctctcacctgagcagcccatggggacctctggccaaggcctgcctgagctgtccaagtggacgctgctgcaggagcagaagtcggccaagagcagccgcctcccagacatctttgaggcccagattgctggccttcggagtcagcttgaggcactgcaggtggatgggggccgcctggaggcggagctgcggagcatgcaggatgtggtggaggacttcaagaataagtacgaagatgaaattaaccgccgcacagctgctgagaatgagtttgtggtgctgaagagagtgcgcgctcctcctcgcccgccgctaggtccatcccggcccagccaccatgtccatccacttcagctccccggtattcacctcgcgctcagccgccttctcgggccgcggcgcccaggtgcgcctgagctccgctcgccccggcggccttggcagcagcagcctctacggcctcggcgcctcgcggccgcgcgtggccgtgcgctctgcctatgggggcccggtgggcgccggcatccgcgaggtcaccattaaccagagcctgctggccccgctgcggctggacgccgacccctccctccagcgggtgcgccaggaggagagcgagcagatcaagaccctcaacaacaagtttgcctccttcatcgacaaggtgcggtttctggagcagcagaacaagctgctggagaccaagtggacgctgctgcaggagcagaagtcggccaagagcagccgcctcccagacatctttgaggcccagattgctggccttcggggtcagcttgaggcactgcaggtggatgggggccgcctggaggcggagctgcggagcatgcaggatgtggtggaggacttcaagaataagtacgaagatgaaattaaccgccgcacagctgctgagaatgagtttgtggtgctgaagaaggatgtggatgctgcctacatgagcaaggtggagctggaggccaaggtggatgccctgaatgatgagatcaacttcctcaggaccctcaatgagacggagttgacagagctgcagtcccagatctccgacacatctgtggtgctgtccatggacaacagtcgctccctggacctggacggcatcatcgctgaggtcaaggcacagtatgaggagatggccaaatgcagccgggctgaggctgaagcctggtaccagaccaagtttgagaccctccaggcccaggctgggaagcatggggacgacctccggaatacccggaatgagatttcagagatgaaccgggccatccagaggctgcaggctgagatcgacaacatcaagaaccagcgtgccaagttggaggccgccattgccgaggctgaggagcgtggggagctggcgctcaaggatgctcgtgccaagcaggaggagctggaagccgccctgcagcgggccaagcaggatatggcacggcagctgcgtgagtaccaggaactcatgagcgtgaagctggccctggacatcgagatcgccacctaccgcaagctgctggagggcgaggagagccggttggctggagatggagtgggagccgtgaatatctctgtgatgaattccactggtggcagtagcagtggcggtggcattgggctgaccctcgggggaaccatgggcagcaatgccctgagcttctccagcagtgcgggtcctgggctcctgaaggcttattccatccggaccgcatccgccagtcgcaggagtgcccgcgactgagccgcctcccaccactccactcctccagccaccacccacaatcacaagaagattcccacccctgcctcccatgcctggtcccaagacagtgagacagtctggaaagtgatgtcagaatagcttccaataaagcagcctcattctgaggcctgagtgatcca

SEQ ID NO: 445930 - DNA, 2169 bp, Homo sapiens
ccttccctcactgagtccgtttccaatgggctggaactgcggtcccccgctgttctctgcggccgtctagggatggcgctcctgcctactccggaccatccctgcttggactgaaagcctgggcttcggcggggcgggcgggcagagggcggagggcggccccaggaggggcctggcagcagagaaaggtggcccgcggcagccccgcccctacctgtggaagcccagccgcccgctcccgcggataaaaggtgcggagtgtccccgaggtcagcgaggagtgcgcgctcctcctcgcccgccgctaggtccatcccggcccagccaccatgtccatccacttcagctccccggtattcacctcgcgctcagccgccttctcgggccgcggcgcccaggtgcgcctgagctccgctcgccccggcggccttggcagcagcagcctctacggcctcggcgcctcgcggccgcgcgtggccgtgcgctctgcctatgggggcccggtgggcgccggcatccgcgaggtcaccattaaccagagcctgctggccccgctgcggctggacgccgacccctccctccagcgggtgcgccaggaggagagcgagcagatcaagaccctcaacaacaagtttgcctccttcatcgacaaggtgcggtttctggagcagcagaacaagctgctggagaccaagtggacgctgctgcaggagcagaagtcggccaagagcagccgcctcccagacatctttgaggcccagattgctggccttcggggtcagcttgaggcactgcaggtggatgggggccgcctggaggcggagctgcggagcatgcaggatgtggtggaggacttcaagaataagtacgaagatgaaattaaccgccgcacagctgctgagaatgagtttgtggtgctgaagaaggatgtggatgctgcctacatgagcaaggtggagctggaggccaaggtggatgccctgaatgatgagatcaacttcctcaggaccctcaatgagacggagttgacagagctgcagtcccagatctccgacacatctgtggtgctgtccatggacaacagtcgctccctggacctggacggcatcatcgctgaggtcaaggcacagtatgaggagatggccaaatgcagccgggctgaggctgaagcctggtaccagaccaagtttgagaccctccaggcccaggctgggaagcatggggacgacctccggaatacccggaatgagatttcagagatgaaccgggccatccagaggctgcaggctgagatcgacaacatcaagaaccagcgtgccaagttggaggccgccattgccgaggctgaggagcgtggggagctggcgctcaaggatgctcgtgccaagcaggaggagctggaagccgccctgcagcgggccaagcaggatatggcacggcagctgcgtgagtaccaggaactcatgagcgtgaagctggccctggacatcgagatcgccacctaccgcaagctgctggagggcgaggagagccggttggctggagatggagtgggagccgtgaatatctctgtgatgaattccactggtggcagtagcagtggcggtggcattgggctgaccctcgggggaaccatgggcagcaatgccctgagcttctccagcagtgcgggtcctgggctcctgaaggcttattccatccggaccgcatccgccagtcgcaggagtgcccgcgactgagccgcctcccaccactccactcctccagccaccacccacaatcacaagaagattcccacccctgcctcccatgcctggtcccaagacagtgagacagtctggaaagtgatgtcagaatagcttccaataaagcagcctcattctgaggcctgagtgatccagtggaggatgtggtggaggacttcaagaataagtaatgcccctgtgcacatgcgatgacccctgccccgggccaatgtgacctcatgagctgacctgtgcaagtccccctgcttcaggaatcagcatgcagctgctcagtccaataactccctgaggggccagtcttgaccaacacatttcctgcctttcctctctcggggccttggtcagacacccaaaggagacagtgcaggacagggctgggctgagacatttcactgggactgag

SEQ ID NO: 445931 - DNA, 1914 bp, Homo sapiens
ccttccctcactgagtccgtttccaatgggctggaactgcggtcccccgctgttctctgcggccgtctagggatggcgctcctgcctactccggaccatccctgcttggactgaaagcctgggcttcggcggggcgggcgggcagagggcggagggcggccccaggaggggcctggcagcagagaaaggtggcccgcggcagccccgcccctacctgtggaagcccagccgcccgctcccgcggataaaaggtgcggagtgtccccgaggtcagcgaggagtgcgcgctcctcctcgcccgccgctaggtccatcccggcccagccaccatgtccatccacttcagctccccggtattcacctcgcgctcagccgccttctcgggccgcggcgcccaggtgcgcctgagctccgctcgccccggcggccttggcagcagcagcctctacggcctcggcgcctcgcggccgcgcgtggccgtgcgctctgcctatgggggcccggtgggcgccggcatccgcgaggtcaccattaaccagagcctgctggccccgctgcggctggacgccgacccctccctccagcgggtgcgccaggaggagagcgagcagatcaagaccctcaacaacaagtttgcctccttcatcgacaaggtgcggtttctggagcagcagaacaagctgctggagaccaagtggacgctgctgcaggagcagaagtcggccaagagcagccgcctcccagacatctttgaggcccagattgctggccttcggggtcagcttgaggcactgcaggtggatgggggccgcctggaggcggagctgcggagcatgcaggatgtggtggaggacttcaagaataagtacgaagatgaaattaaccgccgcacagctgctgagaatgagtttgtggtgctgaagaaggatgtggatgctgcctacatgagcaaggtggagctggaggccaaggtggatgccctgaatgatgagatcaacttcctcaggaccctcaatgagacggagttgacagagctgcagtcccagatctccgacacatctgtggtgctgtccatggacaacagtcgctccctggacctggacggcatcatcgctgaggtcaaggcacagtatgaggagatggccaaatgcagccgggctgaggctgaagcctggtaccagaccaagtttgagaccctccaggcccaggctgggaagcatggggacgacctccggaatacccggaatgagatttcagagatgaaccgggccatccagaggctgcaggctgagatcgacaacatcaagaaccagcgtgccaagttggaggccgccattgccgaggctgaggagcgtggggagctggcgctcaaggatgctcgtgccaagcaggaggagctggaagccgccctgcagcgggccaagcaggatatggcacggcagctgcgtgagtaccaggaactcatgagcgtgaagctggccctggacatcgagatcgccacctaccgcaagctgctggagggcgaggagagccggttggctggagatggagtgggagccgtgaatatctctgtgatgaattccactggtggcagtagcagtggcggtggcattgggctgaccctcgggggaaccatgggcagcaatgccctgagcttctccagcagtgcgggtcctgggctcctgaaggcttattccatccggaccgcatccgccagtcgcaggagtgcccgcgactgagccgcctcccaccactccactcctccagccaccacccacaatcacaagaagattcccacccctgcctcccatgcctggtcccaagacagtgagacagtctggaaagtgatgtcagaatagaaactcctatctgctgtctatctttccgctgttttttctcgtcgctccctcttga

SEQ ID NO: 445932 - DNA, 1620 bp, Homo sapiens
  misc_feature (5)..(5): n is a, c, g, or t
aaaantaggctagtacgaggccgggtgttaatcggccgagccagccaccatgtccatccacttcagctccccggtattcacctcgcgctcagccgccttctcgggccgcggcgcccaggtgcgcctgagctccgctcgccccggcggccttggcagcagcagcctctacggcctcggcgcctcgcggccgcgcgtggccgtgcgctctgcctatgggggcccggtgggcgccggcatccgcgaggtcaccattaaccagagcctgctggccccgctgcggctggacgccgacccctccctccagcgggtgcgccaggaggagagcgagcagatcaagaccctcaacaacaagtttgcctccttcatcgacaaggtgcggtttctggagcagcagaacaagctgctggagaccaagtggacgctgctgcaggagcagaagtcggccaagagcagccgcctcccagacatctttgaggcccagattgctggccttcggggtcagcttgaggcactgcaggtggatgggggccgcctggaggcggagctgcggagcatgcaggatgtggtggaggacttcaagaataagtacgaagatgaaattaaccgccgcacagctgctgagaatgagtttgtggtgctgaagaaggatgtggatgctgcctacatgagcaaggtggagctggaggccaaggtggatgccctgaatgatgagatcaacttcctcaggaccctcaatgagacggagttgacagagctgcagtcccagatctccgacacatctgtggtgctgtccatggacaacagtcgctccctggacctggacggcatcatcgctgaggtcaaggcacagtatgaggagatggccaaatgcagccgggctgaggctgaagcctggtaccagaccaagtttgagaccctccaggcccaggctgggaagcatggggacgacctccggaatacccggaatgagatttcagagatgaaccgggccatccagaggctgcaggctgagatcgacaacatcaagaaccagcgtgccaagttggaggccgccattgccgaggctgaggagcgtggggagctggcgctcaaggatgctcgtgccaagcaggaggagctggaagccgccctgcagcgggccaagcaggatatggcacggcagctgcgtgagtaccaggaactcatgagcgtgaagctggccctggacatcgagatcgccacctaccgcaagctgctggagggcgaggagagccggttggctggagatggagtgggagccgtgaatatctctgtgatgaattccactggtggcagtagcagtggcggtggcattgggctgaccctcgggggaaccatgggcagcaatgccctgagcttctccagcagtgcgggtcctgggctcctgaaggcttattccatccggaccgcatccgccagtcgcaggagtgcccgcgactgagccgcctcccaccactccactcctccagccaccacccacaatcacaagaagattcccacccctgcctcccatgcctggtcccaagacagtgagacagtctggaaagtgatgtcagaatagcttccaataaagcagcctcattctgaggcctgagtgatcca

SEQ ID NO: 445933 - DNA, 1472 bp, Homo sapiens
  misc_feature (5)..(5): n is a, c, g, or t
aaaantaggctagtacgaggccgggtgttaatcggccgagcgcgcgtggccgtgcgctctgcctatgggggcccggtgggcgccggcatccgcgaggtcaccattaaccagagcctgctggccccgctgcggctggacgccgacccctccctccagcgggtgcgccaggaggagagcgagcagatcaagaccctcaacaacaagtttgcctccttcatcgacaaggtgcggtttctggagcagcagaacaagctgctggagaccaagtggacgctgctgcaggagcagaagtcggccaagagcagccgcctcccagacatctttgaggcccagattgctggccttcggggtcagcttgaggcactgcaggtggatgggggccgcctggaggcggagctgcggagcatgcaggatgtggtggaggacttcaagaataagtacgaagatgaaattaaccgccgcacagctgctgagaatgagtttgtggtgctgaagaaggatgtggatgctgcctacatgagcaaggtggagctggaggccaaggtggatgccctgaatgatgagatcaacttcctcaggaccctcaatgagacggagttgacagagctgcagtcccagatctccgacacatctgtggtgctgtccatggacaacagtcgctccctggacctggacggcatcatcgctgaggtcaaggcacagtatgaggagatggccaaatgcagccgggctgaggctgaagcctggtaccagaccaagtttgagaccctccaggcccaggctgggaagcatggggacgacctccggaatacccggaatgagatttcagagatgaaccgggccatccagaggctgcaggctgagatcgacaacatcaagaaccagcgtgccaagttggaggccgccattgccgaggctgaggagcgtggggagctggcgctcaaggatgctcgtgccaagcaggaggagctggaagccgccctgcagcgggccaagcaggatatggcacggcagctgcgtgagtaccaggaactcatgagcgtgaagctggccctggacatcgagatcgccacctaccgcaagctgctggagggcgaggagagccggttggctggagatggagtgggagccgtgaatatctctgtgatgaattccactggtggcagtagcagtggcggtggcattgggctgaccctcgggggaaccatgggcagcaatgccctgagcttctccagcagtgcgggtcctgggctcctgaaggcttattccatccggaccgcatccgccagtcgcaggagtgcccgcgactgagccgcctcccaccactccactcctccagccaccacccacaatcacaagaagattcccacccctgcctcccatgcctggtcccaagacagtgagacagtctggaaagtgatgtcagaatagcttccaataaagcagcctcattctgaggcctgagtgatcca

SEQ ID NO: 445934 - DNA, 2970 bp, Homo sapiens
  misc_feature (5)..(5): n is a, c, g, or t
aaaantaggctagtacgaggccgggtgttaatcggccgaggagtgcgcgctcctcctcgcccgccgctaggtccatcccggcccagccaccatgtccatccacttcagctccccggtattcacctcgcgctcagccgccttctcgggccgcggcgcccaggtgcgcctgagctccgctcgccccggcggccttggcagcagcagcctctacggcctcggcgcctcgcggccgcgcgtggccgtgcgctctgcctatgggggcccggtgggcgccggcatccgcgaggtcaccattaaccagagcctgctggccccgctgcggctggacgccgacccctccctccagcgggtgcgccaggaggagagcgagcagatcaagaccctcaacaacaagtttgcctccttcatcgacaaggtgcggtttctggagcagcagaacaagctgctggagaccaagtggacgctgctgcaggagcagaagtcggccaagagcagccgcctcccagacatctttgaggcccagattgctggccttcggggtcagcttgaggcactgcaggtggatgggggccgcctggaggcggagctgcggagcatgcaggatgtggtggaggacttcaagaataagtacgaagatgaaattaaccgccgcacagctgctgagaatgagtttgtggtgctgaagaaggatgtggatgctgcctacatgagcaaggtggagctggaggccaaggtggatgccctgaatgatgagatcaacttcctcaggaccctcaatgagacggagttgacagagctgcagtcccagatctccgacacatctgtggtgctgtccatggacaacagtcgctccctggacctggacggcatcatcgctgaggtcaaggcacagtatgaggagatggccaaatgcagccgggctgaggctgaagcctggtaccagaccaagtttgagaccctccaggcccaggctgggaagcatggggacgacctccggaatacccggaatgagatttcagagatgaaccgggccatccagaggctgcaggctgagatcgacaacatcaagaaccaggtcctggcatgggctgatgggagaaaggtcctggatgtgcacagagcctgtggagggagactcaggctggctggccagaagaaagccaccactggttccacattgatactgagcactctgcttgcacctggttctggctgcagggcgctgtccctgggagctcatcattcattgcagggacagaggacagcagaagaccttataatgactcacatggccctttcccacccactccaacctcactttccacgattcccctcactctgctctggccatgctaacctgcttcctgcatcttgcatttgccaagaatggtcatgcttcagggcctttgcacttggcgttgcctccccctggaatgtggttctcccagctctgtccatggttgttgttttctcctccctggggtttaggaaaagaccccttctcagagacggcactctcaaacaccagcccctctatcggcagcctgtctgaagttctttgaagcccctgtcactctctgaaatgttctgtcttattcattaagtgattgatggtccctacctccactggaatataacagatgcctggagagcagggaccctgtctgtctggttcactgctcctctcttccagcacctggcacatggcaggggcacgggtctcagatgagagactgcctgggaggatgagctttgctggaagctggggttggaggtgttgatgggggaagggcccccagccctggctgagtagtgtgtggccagggcagctcagcctgtgcaggtgtctgcagtggagagagggggagggcacacatgtggaagcttcggaaagctgatttccagatgagctgtgggtggtggggggatgtgagggtgatttacccacaaatgtcctccccttggagccctgtgggcctgtttacaggagggcggaggctgccttggggcacagaggcagggccgtgagtcaccccatgaagtgggccagcttccaggccaggaggggaagcacagaataacaaatggtggtttcccaaaccctgcagcctctactacatccggttctcctctcacacaacagggcggatccaggcctatagccaggtgtctaccaccactgaggggcgtcatggggagctacaaggggtctccagaggcagcggggatggcgttggctctgggggcaccagtgtgacagggcagggcaccgagctgtggccgaggggcagagtgtcagagggcctcctggggaatgctgtctctggcagagaggcagactgcctccactgagggaagaggatctgaggatagagaatggccgcgtgccaagttggaggccgccattgccgaggctgaggagcgtggggagctggcgctcaaggatgctcgtgccaagcaggaggagctggaagccgccctgcagcgggccaagcaggatatggcacggcagctgcgtgagtaccaggaactcatgagcgtgaagctggccctggacatcgagatcgccacctaccgcaagctgctggagggcgaggagagccggttggctggagatggagtgggagccgtgaatatctctgtgatgaattccactggtggcagtagcagtggcggtggcattgggctgaccctcgggggaaccatgggcagcaatgccctgagcttctccagcagtgcgggtcctgggctcctgaaggcttattccatccggaccgcatccgccagtcgcaggagtgcccgcgactgagccgcctcccaccactccactcctccagccaccacccacaatcacaagaagattcccacccctgcctcccatgcctggtcccaagacagtgagacagtctggaaagtgatgtcagaatagcttccaataaagcagcctcattctgaggcctgagtgatcca

SEQ ID NO: 445935 - DNA, 1699 bp, Homo sapiens
  misc_feature (5)..(5): n is a, c, g, or t
aaaantaggctagtacgaggccgggtgttaatcggccgaggagtgcgcgctcctcctcgcccgccgctaggtccatcccggcccagccaccatgtccatccacttcagctccccggtattcacctcgcgctcagccgccttctcgggccgcggcgcccaggtgcgcctgagctccgctcgccccggcggccttggcagcagcagcctctacggcctcggcgcctcgcggccgcgcgtggccgtgcgctctgcctatgggggcccggtgggcgccggcatccgcgaggtcaccattaaccagagcctgctggccccgctgcggctggacgccgacccctccctccagcgggtgcgccaggaggagagcgagcagatcaagaccctcaacaacaagtttgcctccttcatcgacaaggtgcggtttctggagcagcagaacaagctgctggagaccaagtggacgctgctgcaggagcagaagtcggccaagagcagccgcctcccagacatctttgaggcccagattgctggccttcggggtcagcttgaggcactgcaggtggatgggggccgcctggaggcggagctgcggagcatgcaggatgtggtggaggacttcaagaataagtacgaagatgaaattaaccgccgcacagctgctgagaatgagtttgtggtgctgaagaaggatgtggatgctgcctacatgagcaaggtggagctggaggccaaggtggatgccctgaatgatgagatcaacttcctcaggaccctcaatgagacggagttgacagagctgcagtcccagatctccgacacatctgtggtgctgtccatggacaacagtcgctccctggacctggacggcatcatcgctgaggtcaaggcacagtatgaggagatggccaaatgcagccgggctgaggctgaagcctggtaccagaccaagtttgagaccctccaggcccaggctgggaagcatggggacgacctccggaatacccggaatgagatttcagagatgaaccgggccatccagaggctgcaggctgagatcgacaacatcaagaaccagcgtgccaagttggaggccgccattgccgaggctgaggagcgtggggagctggcgctcaaggatgctcgtgccaagcaggaggagctggaagccgccctgcagcgggccaagcaggatatggcacggcagctgcgtgagtaccaggaactcatgagcgtgaagctggccctggacatcgagatcgccacctaccgcaagctgctggagggcgaggagagccggaaagagccgtcctcactgtctgtcctctgcccccaggttggctggagatggagtgggagccgtgaatatctctgtgatgaattccactggtggcagtagcagtggcggtggcattgggctgaccctcgggggaaccatgggcagcaatgccctgagcttctccagcagtgcgggtcctgggctcctgaaggcttattccatccggaccgcatccgccagtcgcaggagtgcccgcgactgagccgcctcccaccactccactcctccagccaccacccacaatcacaagaagattcccacccctgcctcccatgcctggtcccaagacagtgagacagtctggaaagtgatgtcagaatagcttccaataaagcagcctcattctgaggcctgagtgatcca

SEQ ID NO: 445936 - DNA, 1766 bp, Homo sapiens
ccttccctcactgagtccgtttccaatgggctggaactgcggtcccccgctgttctctgcggccgtctagggatggcgctcctgcctactccggaccatccctgcttggactgaaagcctgggcttcggcggggcgggcgggcagagggcggagggcggccccaggaggggcctggcagcagagaaaggtggcccgcggcagccccgcccctacctgtggaagcccagccgcccgctcccgcggataaaaggtgcggagtgtccccgaggtcagcgaggagtgcgcgctcctcctcgcccgccgctaggtccatcccggcccagccaccatgtccatccacttcagctccccggtattcacctcgcgctcagccgccttctcgggccgcggcgcccaggtgcgcctgagctccgctcgccccggcggccttggcagcagcagcctctacggcctcggcgcctcgcggccgcgcgtggccgtgcgctctgcctatgggggcccggtgggcgccggcatccgcgaggtcaccattaaccagagcctgctggccccgctgcggctggacgccgacccctccctccagcgggtgcgccaggaggagagcgagcagatcaagaccctcaacaacaagtttgcctccttcatcgacaaggtgcggtttctggagcagcagaacaagctgctggagaccaagtggacgctgctgcaggagcagaagtcggccaagagcagccgcctcccagacatctttgaggcccagattgctggccttcggggtcagcttgaggcactgcaggtggatgggggccgcctggaggcggagctgcggagcatgcaggatgtggtggaggacttcaagaataagtacgaagatgaaattaaccgccgcacagctgctgagaatgagtttgtggtgctgaagaaggatgtggatgctgcctacatgagcaaggtggagctggaggccaaggtggatgccctgaatgatgagatcaacttcctcaggaccctcaatgagacggagttgacagagctgcagtcccagatctccgacacatctgtggtgctgtccatggacaacagtcgctccctggacctggacggcatcatcgctgaggtcatgagcgtgaagctggccctggacatcgagatcgctgagatcgacaacatcaagaacccgtgccaagttggaggccgccattgccgaggctgaggagcgtggggagctggcgctcaaggatgctcgtgccaagcaggaggagctggaagccgccctgcagcgggccaagcaggatatggcacggcagctgcgtgagtaccaggaactcatgagcgtgaagctggccctggacatcgagatcgccacctaccgcaagctgctggagggcgaggagagccggttggctggagatggagtgggagccgtgaatatctctgtgatgaattccactggtggcagtagcagtggcggtggcattgggctgaccctcgggggaaccatgggcagcaatgccctgagcttctccagcagtgcgggtcctgggctcctgaaggcttattccatccggaccgcatccgccagtcgcaggagtgcccgcgactgagccgcctcccaccactccactcctccagccaccacccacaatcacaagaagattcccacccctgcctcccatgcctggtcccaagacagtgagacagtctggaaagtgatgtcagaatagcttccaataaagcagcctcattctgaggcctgagtgatcca

SEQ ID NO: 445937 - DNA, 1307 bp, Homo sapiens
ttaggccggataatccatttaaccttgagggtggaaattgccctgggcaacaaggcaaccctccgttttcaaaaaaaaaaaaaaaaaaaaagggagtttcaccacattgcccaggctggtctcaagcaatctgcccgcctccgcctcccagacatctttgaggcccagattgctggccttcggggtcagcttgaggcactgcaggtggatgggggccgcctggaggcggagctgcggagcatgcaggatgtggtggaggacttcaagaataagtacgaagatgaaattaaccgccgcacagctgctgagaatgagtttgtggtgctgaagaaggatgtggatgctgcctacatgagcaaggtggagctggaggccaaggtggatgccctgaatgatgagatcaacttcctcaggaccctcaatgagacggagttgacagagctgcagtcccagatctccgacacatctgtggtgctgtccatggacaacagtcgctccctggacctggacggcatcatcgctgaggtcaaggcacagtatgaggagatggccaaatgcagccgggctgaggctgaagcctggtaccagaccaagtttgagaccctccaggcccaggctgggaagcatggggacgacctccggaatacccggaatgagatttcagagatgaaccgggccatccagaggctgcaggctgagatcgacaacatcaagaaccagcgtgccaagttggaggccgccattgccgaggctgaggagcgtggggagctggcgctcaaggatgctcgtgccaagcaggaggagctggaagccgccctgcagcgggccaagcaggatatggcacggcagctgcgtgagtaccaggaactcatgagcgtgaagctggccctggacatcgagatcgccacctaccgcaagctgctggagggcgaggagagccggttggctggagatggagtgggagccgtgaatatctctgtgatgaattccactggtggcagtagcagtggcggtggcattgggctgaccctcgggggaaccatgggcagcaatgccctgagcttctccagcagtgcgggtcctgggctcctgaaggcttattccatccggaccgcatccgccagtcgcaggagtgcccgcgactgagccgcctcccaccactccactcctccagccaccacccacaatcacaagaagattcccacccctgcctcccatgcctggtcccaagacagtgagacagtctggaaagtgatgtcagaatagcttccaataaagcagcctcattctgaggcctgagtgatcca

SEQ ID NO: 445938 - DNA, 1052 bp, Homo sapiens
gccctcctctactgtaggtacgaagatgaaattaaccgccgcacagctgctgagaatgagtttgtggtgctgaagaaggatgtggatgctgcctacatgagcaaggtggagctggaggccaaggtggatgccctgaatgatgagatcaacttcctcaggaccctcaatgagacggagttgacagagctgcagtcccagatctccgacacatctgtggtgctgtccatggacaacagtcgctccctggacctggacggcatcatcgctgaggtcaaggcacagtatgaggagatggccaaatgcagccgggctgaggctgaagcctggtaccagaccaagtttgagaccctccaggcccaggctgggaagcatggggacgacctccggaatacccggaatgagatttcagagatgaaccgggccatccagaggctgcaggctgagatcgacaacatcaagaaccagcgtgccaagttggaggccgccattgccgaggctgaggagcgtggggagctggcgctcaaggatgctcgtgccaagcaggaggagctggaagccgccctgcagcgggccaagcaggatatggcacggcagctgcgtgagtaccaggaactcatgagcgtgaagctggccctggacatcgagatcgccacctaccgcaagctgctggagggcgaggagagccggttggctggagatggagtgggagccgtgaatatctctgtgatgaattccactggtggcagtagcagtggcggtggcattgggctgaccctcgggggaaccatgggcagcaatgccctgagcttctccagcagtgcgggtcctgggctcctgaaggcttattccatccggaccgcatccgccagtcgcaggagtgcccgcgactgagccgcctcccaccactccactcctccagccaccacccacaatcacaagaagattcccacccctgcctcccatgcctggtcccaagacagtgagacagtctggaaagtgatgtcagaatagcttccaataaagcagcctcattctgaggcctgagtgatcca

SEQ ID NO: 445939 - DNA, 1389 bp, Homo sapiens
  misc_feature (5)..(5): n is a, c, g, or t
aaaantaggctagtacgaggccgggtgttaatcggccgaggagtgcgcgctcctcctcgcccgccgctaggtccatcccggcccagccaccatgtccatccacttcagctccccggtattcacctcgcgctcagccgccttctcgggccgcggcgcccaggtgcgcctgagctccgctcgccccggcggccttggcagcagcagcctctacggcctcggcgcctcgcggccgcgcgtggccgtgcgctctgcctatgggggcccggtgggcgccggcatccgcgaggtcaccattaaccagagcctgctggccccgctgcggctggacgccgacccctccctccagcgggtgcgccaggaggagagcgagcagatcaagaccctcaacaacaagtttgcctccttcatcgacaaggtgcggtttctggagcagcagaacaagctgctggagaccaagtggacgctgctgcaggagcagaagtcggccaagagcagccgcctcccagacatctttgaggcccagattgctggccttcggggtcagcttgaggcactgcaggtggatgggggccgcctggaggcggagctgcggagcatgcaggatgtggtggaggacttcaagaataagtacgaagatgaaattaaccgccgcacagctgctgagaatgagtttgtggtgctgaagaaggatgtggatgctgcctacatgagcaaggtggagctggaggccaaggtggatgccctgaatgatgagatcaacttcctcaggaccctcaatgagacggagttgacagagctgcagtcccagatctccgacacatctgtggtgctgtccatggacaacagtcgctccctggacctggacggcatcatcgctgaggtcaaggcacagtatgaggagatggccaaatgcagccgggctgaggctgaagcctggtaccagaccaagtttgagaccctccaggcccaggctgggaagcatggggacgacctccggaatacccggaatgagatttcagagatgaaccgggccatccagaggctgcaggctgagatcgacaacatcaagaaccaggccattgccgaggctgaggagtgtggggagctggcgctcaaggatgctcgtgccaagcaggaggagctggaagccgccctgcagcgggccaagcaggatatggcacggcagctgcgtgagtaccaggaactcatgagcgtgaagctggccctggacatcgagatcgccacctaccgcaagctgctggagggcgaggagagccggttggctggagatggagtgggagccgtgaatatctctgtgatgaattccactggtggcagtagcagtggcggtggcattgggctagccctcgggggaaccatgggcagcaa

SEQ ID NO: 445940 - DNA, 1388 bp, Homo sapiens
gagtgggaaagacaggctcgaggagggttgtctgaaaacatatgggacaaaggactacaggatcctctcacctgagcagcccatggggacctctggccaaggcctgcctgagctgtccaagtggacgctgctgcaggagcagaagtcggccaagagcagccgcctcccagacatctttgaggcccagattgctggccttcggagtcagcttgaggcactgcaggtggatgggggccgcctggaggcggagctgcggagcatgcaggatgtggtggaggacttcaagaataagtacgaagatgaaattaaccgccgcacagctgctgagaatgagtttgtggtgctgaagagagtgcgcgctcctcctcgcccgccgctaggtccatcccggcccagccaccatgtccatccacttcagctccccggtattcacctcgcgctcagccgccttctcgggccgcggcgcccaggtgcgcctgaatcaacttcctcaggaccctcaatgagacggagttgacagagctgcagtcccagatctccgacacatctgtggtgctgtccatggacaacagtcgctccctggacctggacggcatcatcgctgaggtcaaggcacagtatgaggagatggccaaatgcagccgggctgaggctgaagcctggtaccagaccaagtttgagaccctccaggcccaggctgggaagcatggggacgacctccggaatacccggaatgagatttcagagatgaaccgggccatccagaggctgcaggctgagatcgacaacatcaagaaccagcgtgccaagttggaggccgccattgccgaggctgaggagcgtggggagctggcgctcaaggatgctcgtgccaagcaggaggagctggaagccgccctgcagcgggccaagcaggatatggcacggcagctgcgtgagtaccaggaactcatgagcgtgaagctggccctggacatcgagatcgccacctaccgcaagctgctggagggcgaggagagccggttggctggagatggagtgggagccgtgaatatctctgtgatgaattccactggtggcagtagcagtggcggtggcattgggctgaccctcgggggaaccatgggcagcaatgccctgagcttctccagcagtgcgggtcctgggctcctgaaggcttattccatccggaccgcatccgccagtcgcaggagtgcccgcgactgagccgcctcccaccactccactcctccagccaccacccacaatcacaagaagattcccacccctgcctcccatgcctggtcccaagacagtgagacagtctggaaagtgatgtcagaatagcttccaataaagcagcctcattctgaggcctgagtgatcca

SEQ ID NO: 445941 - DNA, 951 bp, Homo sapiens
catcattggcgcgtaacagacagctataccacttagggagcgataacataacagcaatacaatgaaaggaggtcacttgaactgcagcacgcataattaccagtacacatctgtggtgctgtccatggacaacagtcgctccctggacctggacggcatcatcgctgaggtcaaggcacagtatgaggagatggccaaatgcagccgggctgaggctgaagcctggtaccagaccaagtttgagaccctccaggcccaggctgggaagcatggggacgacctccggaatacccggaatgagatttcagagatgaaccgggccatccagaggctgcaggctgagatcgacaacatcaagaaccagcgtgccaagttggaggccgccattgccgaggctgaggagcgtggggagctggcgctcaaggatgctcgtgccaagcaggaggagctggaagccgccctgcagcgggccaagcaggatatggcacggcagctgcgtgagtaccaggaactcatgagcgtgaagctggccctggacatcgagatcgccacctaccgcaagctgctggagggcgaggagagccggttggctggagatggagtgggagccgtgaatatctctgtgatgaattccactggtggcagtagcagtggcggtggcattgggctgaccctcgggggaaccatgggcagcaatgccctgagcttctccagcagtgcgggtcctgggctcctgaaggcttattccatccggaccgcatccgccagtcgcaggagtgcccgcgactgagccgcctcccaccactccactcctccagccaccacccacaatcacaagaagattcccacccctgcctcccatgcctggtcccaagacagtgagacagtctggaaagtgatgtcagaatagcttccaataaagcagcctcattctgaggcctgagtgatcca

SEQ ID NO: 445942 - DNA, 1746 bp, Homo sapiens
gtgatctagaggatcccgacgggttcaacggaactttccacgattcccctcactctgctctggccatgctaacctgcttcctgcatcttgcatttgccaagaatggtcatgcttcagggcctttgcacttggcgttgcctccccctggaatgtggttctcccagctctgtccatggttgttgttttctcctccctggggtttaggaaaagaccccttctcagagacggcactctcaaacaccagcccctctatcggcagcctgtctgaagttctttgaagcccctgtcactctctgaaatgttctgtcttattcattaagtgattgatggtccctacctccactggaatataacagatgcctggagagcagggaccctgtctgtctggttcactgctcctctcttccagcacctggcacatggcaggggcacgggtctcagatgagagactgcctgggaggatgagctttgctggaagctggggttggaggtgttgatgggggaagggcccccagccctggctgagtagtgtgtggccagggcagctcagcctgtgcaggtgtctgcagtggagagagggggagggcacacatgtggaagcttcggaaagctgatttccagatgagctgtgggtggtggggggatgtgagggtgatttacccacaaatgtcctccccttggagccctgtgggcctgtttacaggagggcggaggctgccttggggcacagaggcagggccgtgagtcaccccatgaagtgggccagcttccaggccaggaggggaagcacagaataacaaatggtggtttcccaaaccctgcagcctctactacatccggttctcctctcacacaacagggcggatccaggcctatagccaggtgtctaccaccactgaggggcgtcatggggagctacaaggggtctccagaggcagcggggatggcgttggctctgggggcaccagtgtgacagggcagggcaccgagctgtggccgaggggcagagtgtcagagggcctcctggggaatgctgtctctggcagagaggcagactgcctccactgagggaagaggatctgaggatagagaatggccggatgggcaggcaggaaggcagactggtgagccccagcttacagctgcactgctgcccacacgtgccaagttggaggccgccattgccgaggctgaggagcgtggggagctggcgctcaaggatgctcgtgccaagcaggaggagctggaagccgccctgcagcgggccaagcaggatatggcacggcagctgcgtgagtaccaggaactcatgagcgtgaagctggccctggacatcgagatcgccacctaccgcaagctgctggagggcgaggagagccggttggctggagatggagtgggagccgtgaatatctctgtgatgaattccactggtggcagtagcagtggcggtggcattgggctgaccctcgggggaaccatgggcagcaatgccctgagcttctccagcagtgcgggtcctgggctcctgaaggcttattccatccggaccgcatccgccagtcgcaggagtgcccgcgactgagccgcctcccaccactccactcctccagccaccacccacaatcacaagaagattcccacccctgcctcccatgcctggtcccaagacagtgagacagtctggaaagtgatgtcagaatagcttccaataaagcagcctcattctgaggcctgagtgatcca

SEQ ID NO: 445943 - DNA, 625 bp, Homo sapiens
gggcccaaggcataggtgggaaatggaggccctgagacattgcctggggtcaggtggccagtggatagaagggccaaggtgaacactcccttcctgcatgcctcctcgctccttttacaaggctgaaggcaggctggaagtgtggggcaagaaggaaaaatcaatgatcctgcttggggcctggaaggagagagggctgagagcgcttccctcccacgctaggaaagagccgtcctcactgtctgtcctctgcccccaggttggctggagatggagtgggagccgtgaatatctctgtgatgaattccactggtggcagtagcagtggcggtggcattgggctgaccctcgggggaaccatgggcagcaatgccctgagcttctccagcagtgcgggtcctgggctcctgaaggcttattccatccggaccgcatccgccagtcgcaggagtgcccgcgactgagccgcctcccaccactccactcctccagccaccacccacaatcacaagaagattcccacccctgcctcccatgcctggtcccaagacagtgagacagtctggaaagtgatgtcagaatagcttccaataaagcagcctcattctgaggcctgagtgatcca

SEQ ID NO: 445944 - DNA, 378 bp, Homo sapiens
ctatgaggcactgggaccaggcatgggagtcagggctgggaatatttctgtgatgaattccactggtggcagtagcagtggcggtggcattgggctgaccctcgggggaaccatgggcagcaatgccctgagcttctccagcagtgcgggtcctgggctcctgaaggcttattccatccggaccgcatccgccagtcgcaggagtgcccgcgactgagccgcctcccaccactccactcctccagccaccacccacaatcacaagaagattcccacccctgcctcccatgcctggtcccaagacagtgagacagtctggaaagtgatgtcagaatagcttccaataaagcagcctcattctgaggcctgagtgatcca

SEQ ID NO: 445945 - DNA, 445 bp, Homo sapiens
gtgaggaccatggagctgggtgacatgtcttatcctacccattctaaccagggagccatctggtccagccccccgcctctgtgtcagtccagatatgtgtcagtgtgagaaacaaactcatccgtccaaacccaaagaatggactcagagacctggagaacagcgaaagtgagattttaatgacagtcttgcaagatgggtgtctgatgggcaggcatgcccagcacagccacaacaagcaatttatcctctagtgcacaggtccctccctccgttcctcacaggctgagtactatggggtcacgatcttcctggacgttgtctattggttgttgggttggggctttaggtgtttttttttaggttgtcttgctgcattttattgcagcctacaatgcattgcaatcctagtcagctcaagggctctttaagtatttgacttatg

SEQ ID NO: 445946 - DNA, 234 bp, Homo sapiens
caggagggtggggtgcagtgaagggatggggtccctggtagggagcctcacgctgaagagagccctcctcttttctctcccagctgtgatgaattccactggtggcagtagcagtggcggtggcattgggctgaccctcgggggaaccatgggcagcaatgccctgagcttctccagcagtgcgggtcctgggctcctgaaggcttattccatccggaccgcatccgccagtcg

SEQ ID NO: 445947 - DNA, 581 bp, Homo sapiens
ttaaaaatgatcacaatagcatttattaagcacttgctgtgtgctagacattgtgccacggacatcttgtatattatctcatttcatcctcaaaatctcctgatgttctcttagaaaagaggggactttggcttagcagggttgattcatccatggtcacacagctagtaagtggcagagccagaactggaacataggcgttggatatccaaacctatgtgtttaacccttaggattctctggtacttgggggagtaggtggtgccaatgaagccaccttaagcaagttgcccgggtgctcactgcaggatgggcaggcaggaaggcagactggtgagccccagcttacagctgcactgctgcccacacgtgccaagttggaggccgccattgccgaggctgaggagcgtggggagctggcgctcaaggatgctcgtgccaagcaggaggagctggaagccgccctgcagcgggccaagcaggatatggcacggcagctgcgtgagtaccaggaactcatgagcgtgaagctggccctggacatcgagatcgccacctaccgcaagctgctggagggcgag

SEQ ID NO: 445948 - DNA, 1900 bp, Homo sapiens
ccttccctcactgagtccgtttccaatgggctggaactgcggtcccccgctgttctctgcggccgtctagggatggcgctcctgcctactccggaccatccctgcttggactgaaagcctgggcttcggcggggcgggcgggcagagggcggagggcggccccaggaggggcctggcagcagagaaaggtggcccgcggcagccccgcccctacctgtggaagcccagccgcccgctcccgcggataaaaggtgcggagtgtccccgaggtcagcgaggagtgcgcgctcctcctcgcccgccgctaggtccatcccggcccagccaccatgtccatccacttcagctccccggtattcacctcgcgctcagccgccttctcgggccgcggcgcccaggtgcgcctgagctccgctcgccccggcggccttggcagcagcagcctctacggcctcggcgcctcgcggccgcgcgtggccgtgcgctctgcctatgggggcccggtgggcgccggcatccgcgaggtcaccattaaccagagcctgctggccccgctgcggctggacgccgacccctccctccagcgggtgcgccaggaggagagcgagcagatcaagaccctcaacaacaagtttgcctccttcatcgacaaggtgcggtttctggagcagcagaacaagctgctggagaccaagtggacgctgctgcaggagcagaagtcggccaagagcagccgcctcccagacatctttgaggcccagattgctggccttcggggtcagcttgaggcactgcaggtggatgggggccgcctggaggcggagctgcggagcatgcaggatgtggtggaggacttcaagaataagtacgaagatgaaattaaccgccgcacagctgctgagaatgagtttgtggtgctgaagaaggatgtggatgctgcctacatgagcaaggtggagctggaggccaaggtggatgccctgaatgatgagatcaacttcctcaggaccctcaatgagacggagttgacagagctgcagtcccagatctccgacacatctgtggtgctgtccatggacaacagtcgctccctggacctggacggcatcatcgctgaggtcaaggcacagtatgaggagatggccaaatgcagccgggctgaggctgaagcctggtaccagaccaagtttgagaccctccaggcccaggctgggaagcatggggacgacctccggaatacccggaatgagatttcagagatgaaccgggccatccagaggctgcaggctgagatcgacaacatcaagaaccagcgtgccaagttggaggccgccattgccgaggctgaggagcgtggggagctggcgctcaaggatgctcgtgccaagcaggaggagctggaagccgccctgcagcgggccaagcaggatatggcacggcagctgcgtgagtaccaggaactcatgagcgtgaagctggccctggacatcgagatcgccacctaccgcaagctgctggagggcgaggagagccggttggctggagatggagtgggagccgtgaatatctctgtgatgaattccactggtggcagtagcagtggcggtggcattgggctgaccctcgggggaaccatgggcagcaatgccctgagcttctccagcagtgcgggtcctgggctcctgaaggcttattccatccggaccgcatccgccagtcgcaggagtgcccgcgactgagccgcctcccaccactccactcctccagccaccacccacaatcacaagaagattcccacccctgcctcccatgcctggtcccaagacagtgagacagtctggaaagtgatgtcagaatagcttccaataaagcagcctcattctgaggcctgagtgatcca

SEQ ID NO: 445949 - DNA, 2149 bp, Homo sapiens
ccttccctcactgagtccgtttccaatgggctggaactgcggtcccccgctgttctctgcggccgtctagggatggcgctcctgcctactccggaccatccctgcttggactgaaagcctgggcttcggcggggcgggcgggcagagggcggagggcggccccaggaggggcctggcagcagagaaaggtggcccgcggcagccccgcccctacctgtggaagcccagccgcccgctcccgcggataaaaggtgcggagtgtccccgaggtcagcgaggagtgcgcgctcctcctcgcccgccgctaggtccatcccggcccagccaccatgtccatccacttcagctccccggtattcacctcgcgctcagccgccttctcgggccgcggcgcccaggtgcgcctgagctccgctcgccccggcggccttggcagcagcagcctctacggcctcggcgcctcgcggccgcgcgtggccgtgcgctctgcctatgggggcccggtgggcgccggcatccgcgaggtcaccattaaccagagcctgctggccccgctgcggctggacgccgacccctccctccagcgggtgcgccaggaggagagcgagcagatcaagaccctcaacaacaagtttgcctccttcatcgacaaggtgcggtttctggagcagcagaacaagctgctggagaccaagtggacgctgctgcaggagcagaagtcggccaagagcagccgcctcccagacatctttgaggcccagattgctggccttcggggtcagcttgaggcactgcaggtggatgggggccgcctggaggcggagctgcggagcatgcaggatgtggtggaggacttcaagaataagtacgaagatgaaattaaccgccgcacagctgctgagaatgagtttgtggtgctgaagaaggatgtggatgctgcctacatgagcaaggtggagctggaggccaaggtggatgccctgaatgatgagatcaacttcctcaggaccctcaatgagacggagttgacagagctgcagtcccagatctccgacacatctgtggtgctgtccatggacaacagtcgctccctggacctggacggcatcatcgctgaggtcaaggcacagtatgaggagatggccaaatgcagccgggctgaggctgaagcctggtaccagaccaagtttgagaccctccaggcccaggctgggaagcatggggacgacctccggaatacccggaatgagatttcagagatgaaccgggccatccagaggctgcaggctgagatcgacaacatcaagaaccagcgtgccaagttggaggccgccattgccgaggctgaggagcgtggggagctggcgctcaaggatgctcgtgccaagcaggaggagctggaagccgccctgcagcgggccaagcaggatatggcacggcagctgcgtgagtaccaggaactcatgagcgtgaagctggccctggacatcgagatcgccacctaccgcaagctgctggagggcgaggagagccggttggctggagatggagtgggagccgtgaatatctctgtgatgaattccactggtggcagtagcagtggcggtggcattgggctgaccctcgggggaaccatgggcagcaatgccctgagcttctccagcagtgcgggtcctgggctcctgaaggcttattccatccggaccgcatccgccagtcgcaggagtgcccgcgactgagccgcctcccaccactccactcctccagccaccacccacaatcacaagaagattcccacccctgcctcccatgcctggtcccaagacagtgagacagtctggaaagtgatgtcagaatagcttccaataaagcagcctcattctgaggcctgagtgatccaaaaaaaaaaaaaaaaacaaaaaaaaaaataaaaaaaaaaaaaaaaaaaaaaaaaaaaaaaaaaaaaaacaaaacaaaaggagagaccaaccaaagaagaaataataccaataaggagaggcggcaacaacgagtagcaggaagacgaacagaggagacaactagtgaagacacacgaggggccaccacaaagagggaggaggacgaagatatcggacctacaaaaagaggggcccgggcataccacagg

SEQ ID NO: 445950 - DNA, 1916 bp, Homo sapiens
  misc_feature (1902)..(1902): n is a, c, g, or t
  misc_feature (1905)..(1905): n is a, c, g, or t
ccttccctcactgagtccgtttccaatgggctggaactgcggtcccccgctgttctctgcggccgtctagggatggcgctcctgcctactccggaccatccctgcttggactgaaagcctgggcttcggcggggcgggcgggcagagggcggagggcggccccaggaggggcctggcagcagagaaaggtggcccgcggcagccccgcccctacctgtggaagcccagccgcccgctcccgcggataaaaggtgcggagtgtccccgaggtcagcgaggagtgcgcgctcctcctcgcccgccgctaggtccatcccggcccagccaccatgtccatccacttcagctccccggtattcacctcgcgctcagccgccttctcgggccgcggcgcccaggtgcgcctgagctccgctcgccccggcggccttggcagcagcagcctctacggcctcggcgcctcgcggccgcgcgtggccgtgcgctctgcctatgggggcccggtgggcgccggcatccgcgaggtcaccattaaccagagcctgctggccccgctgcggctggacgccgacccctccctccagcgggtgcgccaggaggagagcgagcagatcaagaccctcaacaacaagtttgcctccttcatcgacaaggtgcggtttctggagcagcagaacaagctgctggagaccaagtggacgctgctgcaggagcagaagtcggccaagagcagccgcctcccagacatctttgaggcccagattgctggccttcggggtcagcttgaggcactgcaggtggatgggggccgcctggaggcggagctgcggagcatgcaggatgtggtggaggacttcaagaataagtacgaagatgaaattaaccgccgcacagctgctgagaatgagtttgtggtgctgaagaaggatgtggatgctgcctacatgagcaaggtggagctggaggccaaggtggatgccctgaatgatgagatcaacttcctcaggaccctcaatgagacggagttgacagagctgcagtcccagatctccgacacatctgtggtgctgtccatggacaacagtcgctccctggacctggacggcatcatcgctgaggtcaaggcacagtatgaggagatggccaaatgcagccgggctgaggctgaagcctggtaccagaccaagtttgagaccctccaggcccaggctgggaagcatggggacgacctccggaatacccggaatgagatttcagagatgaaccgggccatccagaggctgcaggctgagatcgacaacatcaagaaccagcgtgccaagttggaggccgccattgccgaggctgaggagcgtggggagctggcgctcaaggatgctcgtgccaagcaggaggagctggaagccgccctgcagcgggccaagcaggatatggcacggcagctgcgtgagtaccaggaactcatgagcgtgaagctggccctggacatcgagatcgccacctaccgcaagctgctggagggcgaggagagccggttggctggagatggagtgggagccgtgaatatctctgtgatgaattccactggtggcagtagcagtggcggtggcattgggctgaccctcgggggaaccatgggcagcaatgccctgagcttctccagcagtgcgggtcctgggctcctgaaggcttattccatccggaccgcatccgccagtcgcaggagtgcccgcgactgagccgcctcccaccactccactcctccagccaccacccacaatcacaagaagattcccacccctgcctcccatgcctggtcccaagacagtgagacagtctggaaagtgatgtcagaatactatgagaatattaaaatccgcggagtggagagcaagccttcanttnctaggccctgg

SEQ ID NO: 445951 - DNA, 2095 bp, Homo sapiens
ccttccctcactgagtccgtttccaatgggctggaactgcggtcccccgctgttctctgcggccgtctagggatggcgctcctgcctactccggaccatccctgcttggactgaaagcctgggcttcggcggggcgggcgggcagagggcggagggcggccccaggaggggcctggcagcagagaaaggtggcccgcggcagccccgcccctacctgtggaagcccagccgcccgctcccgcggataaaaggtgcggagtgtccccgaggtcagcgaggagtgcgcgctcctcctcgcccgccgctaggtccatcccggcccagccaccatgtccatccacttcagctccccggtattcacctcgcgctcagccgccttctcgggccgcggcgcccaggtgcgcctgagctccgctcgccccggcggccttggcagcagcagcctctacggcctcggcgcctcgcggccgcgcgtggccgtgcgctctgcctatgggggcccggtgggcgccggcatccgcgaggtcaccattaaccagagcctgctggccccgctgcggctggacgccgacccctccctccagcgggtgcgccaggaggagagcgagcagatcaagaccctcaacaacaagtttgcctccttcatcgacaaggtgcggtttctggagcagcagaacaagctgctggagaccaagtggacgctgctgcaggagcagaagtcggccaagagcagccgcctcccagacatctttgaggcccagattgctggccttcggggtcagcttgaggcactgcaggtggatgggggccgcctggaggcggagctgcggagcatgcaggatgtggtggaggacttcaagaataagtacgaagatgaaattaaccgccgcacagctgctgagaatgagtttgtggtgctgaagaaggatgtggatgctgcctacatgagcaaggtggagctggaggccaaggtggatgccctgaatgatgagatcaacttcctcaggaccctcaatgagacggagttgacagagctgcagtcccagatctccgacacatctgtggtgctgtccatggacaacagtcgctccctggacctggacggcatcatcgctgaggtcaaggcacagtatgaggagatggccaaatgcagccgggctgaggctgaagcctggtaccagaccaagtttgagaccctccaggcccaggctgggaagcatggggacgacctccggaatacccggaatgagatttcagagatgaaccgggccatccagaggctgcaggctgagatcgacaacatcaagaaccagcgtgccaagttggaggccgccattgccgaggctgaggagcgtggggagctggcgctcaaggatgctcgtgccaagcaggaggagctggaagccgccctgcagcgggccaagcaggatatggcacggcagctgcgtgagtaccaggaactcatgagcgtgaagctggccctggacatcgagatcgccacctaccgcaagctgctggagggcgaggagagccggttggctggagatggagtgggagccgtgaatatctctgtgatgaattccactggtggcagtagcagtggcggtggcattgggctgaccctcgggggaaccatgggcagcaatgccctgagcttctccagcagtgcgggtcctgggctcctgaaggcttattccatccggaccgcatccgccagtcgcaggagtgcccgcgactgagccgcctcccaccactccactcctccagccaccacccacaatgccattgccgaggctgaggagtgtggggagctggcgctcaaggatgctcgtgccaagcaggaggagctggaagccgccctgcagcgggccaagcaggatatggcacggcagctgcgtgagtaccaggaactcatgagcgtgaagctggccctggacatcgagatcgccacctaccgcaagctgctggagggcgaggagagccggttggctggagatggagtgggagccgtgaatatctctgtgatgaattccactggtggcagtagcagtggcggtggcattgggctagccctcgggggaaccatgggcagcaa

SEQ ID NO: 445952 - DNA, 3030 bp, Homo sapiens
  misc_feature (5)..(5): n is a, c, g, or t
aaaantaggctagtacgaggccgggtgttaatcggccgaggagtgcgcgctcctcctcgcccgccgctaggtccatcccggcccagccaccatgtccatccacttcagctccccggtattcacctcgcgctcagccgccttctcgggccgcggcgcccaggtgcgcctgagctccgctcgccccggcggccttggcagcagcagcctctacggcctcggcgcctcgcggccgcgcgtggccgtgcgctctgcctatgggggcccggtgggcgccggcatccgcgaggtcaccattaaccagagcctgctggccccgctgcggctggacgccgacccctccctccagcgggtgcgccaggaggagagcgagcagatcaagaccctcaacaacaagtttgcctccttcatcgacaaggtgcggtttctggagcagcagaacaagctgctggagaccaagtggacgctgctgcaggagcagaagtcggccaagagcagccgcctcccagacatctttgaggcccagattgctggccttcggggtcagcttgaggcactgcaggtggatgggggccgcctggaggcggagctgcggagcatgcaggatgtggtggaggacttcaagaataagtacgaagatgaaattaaccgccgcacagctgctgagaatgagtttgtggtgctgaagaaggatgtggatgctgcctacatgagcaaggtggagctggaggccaaggtggatgccctgaatgatgagatcaacttcctcaggaccctcaatgagacggagttgacagagctgcagtcccagatctccgacacatctgtggtgctgtccatggacaacagtcgctccctggacctggacggcatcatcgctgaggtcaaggcacagtatgaggagatggccaaatgcagccgggctgaggctgaagcctggtaccagaccaagtttgagaccctccaggcccaggctgggaagcatggggacgacctccggaatacccggaatgagatttcagagatgaaccgggccatccagaggctgcaggctgagatcgacaacatcaagaaccaggtcctggcatgggctgatgggagaaaggtcctggatgtgcacagagcctgtggagggagactcaggctggctggccagaagaaagccaccactggttccacattgatactgagcactctgcttgcacctggttctggctgcagggcgctgtccctgggagctcatcattcattgcagggacagaggacagcagaagaccttataatgactcacatggccctttcccacccactccaacctcactttccacgattcccctcactctgctctggccatgctaacctgcttcctgcatcttgcatttgccaagaatggtcatgcttcagggcctttgcacttggcgttgcctccccctggaatgtggttctcccagctctgtccatggttgttgttttctcctccctggggtttaggaaaagaccccttctcagagacggcactctcaaacaccagcccctctatcggcagcctgtctgaagttctttgaagcccctgtcactctctgaaatgttctgtcttattcattaagtgattgatggtccctacctccactggaatataacagatgcctggagagcagggaccctgtctgtctggttcactgctcctctcttccagcacctggcacatggcaggggcacgggtctcagatgagagactgcctgggaggatgagctttgctggaagctggggttggaggtgttgatgggggaagggcccccagccctggctgagtagtgtgtggccagggcagctcagcctgtgcaggtgtctgcagtggagagagggggagggcacacatgtggaagcttcggaaagctgatttccagatgagctgtgggtggtggggggatgtgagggtgatttacccacaaatgtcctccccttggagccctgtgggcctgtttacaggagggcggaggctgccttggggcacagaggcagggccgtgagtcaccccatgaagtgggccagcttccaggccaggaggggaagcacagaataacaaatggtggtttcccaaaccctgcagcctctactacatccggttctcctctcacacaacagggcggatccaggcctatagccaggtgtctaccaccactgaggggcgtcatggggagctacaaggggtctccagaggcagcggggatggcgttggctctgggggcaccagtgtgacagggcagggcaccgagctgtggccgaggggcagagtgtcagagggcctcctggggaatgctgtctctggcagagaggcagactgcctccactgagggaagaggatctgaggatagagaatggccggatgggcaggcaggaaggcagactggtgagccccagcttacagctgcactgctgcccacacgtgccaagttggaggccgccattgccgaggctgaggagcgtggggagctggcgctcaaggatgctcgtgccaagcaggaggagctggaagccgccctgcagcgggccaagcaggatatggcacggcagctgcgtgagtaccaggaactcatgagcgtgaagctggccctggacatcgagatcgccacctaccgcaagctgctggagggcgaggagagccggttggctggagatggagtgggagccgtgaatatctctgtgatgaattccactggtggcagtagcagtggcggtggcattgggctgaccctcgggggaaccatgggcagcaatgccctgagcttctccagcagtgcgggtcctgggctcctgaaggcttattccatccggaccgcatccgccagtcgcaggagtgcccgcgactgagccgcctcccaccactccactcctccagccaccacccacaatcacaagaagattcccacccctgcctcccatgcctggtcccaagacagtgagacagtctggaaagtgatgtcagaatagcttccaataaagcagcctcattctgaggcctgagtgatcca

SEQ ID NO: 445953 - DNA, 3196 bp, Homo sapiens
  misc_feature (5)..(5): n is a, c, g, or t
aaaantaggctagtacgaggccgggtgttaatcggccgaggagtgcgcgctcctcctcgcccgccgctaggtccatcccggcccagccaccatgtccatccacttcagctccccggtattcacctcgcgctcagccgccttctcgggccgcggcgcccaggtgcgcctgagctccgctcgccccggcggccttggcagcagcagcctctacggcctcggcgcctcgcggccgcgcgtggccgtgcgctctgcctatgggggcccggtgggcgccggcatccgcgaggtcaccattaaccagagcctgctggccccgctgcggctggacgccgacccctccctccagcgggtgcgccaggaggagagcgagcagatcaagaccctcaacaacaagtttgcctccttcatcgacaaggtgcggtttctggagcagcagaacaagctgctggagaccaagtggacgctgctgcaggagcagaagtcggccaagagcagccgcctcccagacatctttgaggcccagattgctggccttcggggtcagcttgaggcactgcaggtggatgggggccgcctggaggcggagctgcggagcatgcaggatgtggtggaggacttcaagaataagtacgaagatgaaattaaccgccgcacagctgctgagaatgagtttgtggtgctgaagaaggatgtggatgctgcctacatgagcaaggtggagctggaggccaaggtggatgccctgaatgatgagatcaacttcctcaggaccctcaatgagacggagttgacagagctgcagtcccagatctccgacacatctgtggtgctgtccatggacaacagtcgctccctggacctggacggcatcatcgctgaggtcaaggcacagtatgaggagatggccaaatgcagccgggctgaggctgaagcctggtaccagaccaagtttgagaccctccaggcccaggctgggaagcatggggacgacctccggaatacccggaatgagatttcagagatgaaccgggccatccagaggctgcaggctgagatcgacaacatcaagaaccaggtgggacaagtcctcctggcttcccctgctacttggggcatgcaggggtggccagctgaggccaaactcaggatgtggagcaggaggttcccatctcccggccaaagctggtgccactgtctcagacccccttgtgagatctccagcacagaatgttcttggccaggtcctggcatgggctgatgggagaaaggtcctggatgtgcacagagcctgtggagggagactcaggctggctggccagaagaaagccaccactggttccacattgatactgagcactctgcttgcacctggttctggctgcagggcgctgtccctgggagctcatcattcattgcagggacagaggacagcagaagaccttataatgactcacatggccctttcccacccactccaacctcactttccacgattcccctcactctgctctggccatgctaacctgcttcctgcatcttgcatttgccaagaatggtcatgcttcagggcctttgcacttggcgttgcctccccctggaatgtggttctcccagctctgtccatggttgttgttttctcctccctggggtttaggaaaagaccccttctcagagacggcactctcaaacaccagcccctctatcggcagcctgtctgaagttctttgaagcccctgtcactctctgaaatgttctgtcttattcattaagtgattgatggtccctacctccactggaatataacagatgcctggagagcagggaccctgtctgtctggttcactgctcctctcttccagcacctggcacatggcaggggcacgggtctcagatgagagactgcctgggaggatgagctttgctggaagctggggttggaggtgttgatgggggaagggcccccagccctggctgagtagtgtgtggccagggcagctcagcctgtgcaggtgtctgcagtggagagagggggagggcacacatgtggaagcttcggaaagctgatttccagatgagctgtgggtggtggggggatgtgagggtgatttacccacaaatgtcctccccttggagccctgtgggcctgtttacaggagggcggaggctgccttggggcacagaggcagggccgtgagtcaccccatgaagtgggccagcttccaggccaggaggggaagcacagaataacaaatggtggtttcccaaaccctgcagcctctactacatccggttctcctctcacacaacagggcggatccaggcctatagccaggtgtctaccaccactgaggggcgtcatggggagctacaaggggtctccagaggcagcggggatggcgttggctctgggggcaccagtgtgacagggcagggcaccgagctgtggccgaggggcagagtgtcagagggcctcctggggaatgctgtctctggcagagaggcagactgcctccactgagggaagaggatctgaggatagagaatggccggatgggcaggcaggaaggcagactggtgagccccagcttacagctgcactgctgcccacacgtgccaagttggaggccgccattgccgaggctgaggagcgtggggagctggcgctcaaggatgctcgtgccaagcaggaggagctggaagccgccctgcagcgggccaagcaggatatggcacggcagctgcgtgagtaccaggaactcatgagcgtgaagctggccctggacatcgagatcgccacctaccgcaagctgctggagggcgaggagagccggttggctggagatggagtgggagccgtgaatatctctgtgatgaattccactggtggcagtagcagtggcggtggcattgggctgaccctcgggggaaccatgggcagcaatgccctgagcttctccagcagtgcgggtcctgggctcctgaaggcttattccatccggaccgcatccgccagtcgcaggagtgcccgcgactgagccgcctcccaccactccactcctccagccaccacccacaatcacaagaagattcccacccctgcctcccatgcctggtcccaagacagtgagacagtctggaaagtgatgtcagaatagcttccaataaagcagcctcattctgaggcctgagtgatcca

SEQ ID NO: 445954 - DNA, 1658 bp, Homo sapiens
aatctctgccacccggattcaagcaattctcctgtctcagcctcccgagtagctggaatgcagacacccatcaccacgcccagctaattttatgtatttttagtagagatggggtttcaccatgtggtcaggctggtcttgaactcctgacctcaggtgatccacccacgtcaggctcccaaagtgctgagattacaggcatgaaccactgtgcccagccgaaaacaaccaagaattttttaacaataaaatgaccagcaagtaaacttgaaacaaaaatggacaaatatctaaaatatttttaaatgtatgtattttaattggcaaataatacttgtatatattgtttacaacttgttttaaagtatgaatacattgtggaatggctaaatcaagttaattaacatgcattaactcacataaaaaaaaaagaacaagctgctggagaccaagtggacgctgctgcaggagcagaagtcggccaagagcagccgcctcccagacatctttgaggcccagattgctggccttcggggtcagcttgaggcactgcaggtggatgggggccgcctggaggcggagctgcggagcatgcaggatgtggtggaggacttcaagaataagtacgaagatgaaattaaccgccgcacagctgctgagaatgagtttgtggtgctgaagaaggatgtggatgctgcctacatgagcaaggtggagctggaggccaaggtggatgccctgaatgatgagatcaacttcctcaggaccctcaatgagacggagttgacagagctgcagtcccagatctccgacacatctgtggtgctgtccatggacaacagtcgctccctggacctggacggcatcatcgctgaggtcaaggcacagtatgaggagatggccaaatgcagccgggctgaggctgaagcctggtaccagaccaagtttgagaccctccaggcccaggctgggaagcatggggacgacctccggaatacccggaatgagatttcagagatgaaccgggccatccagaggctgcaggctgagatcgacaacatcaagaaccagcgtgccaagttggaggccgccattgccgaggctgaggagcgtggggagctggcgctcaaggatgctcgtgccaagcaggaggagctggaagccgccctgcagcgggccaagcaggatatggcacggcagctgcgtgagtaccaggaactcatgagcgtgaagctggccctggacatcgagatcgccacctaccgcaagctgctggagggcgaggagagccggttggctggagatggagtgggagccgtgaatatctctgtgatgaattccactggtggcagtagcagtggcggtggcattgggctgaccctcgggggaaccatgggcagcaatgccctgagcttctccagcagtgcgggtcctgggctcctgaaggcttattccatccggaccgcatccgccagtcgcaggagtgcccgcgactgagccgcctcccaccactccactcctccagccaccacccacaatcacaagaagattcccacccctgcctcccatgcctggtcccaagacagtgagacagtctggaaagtgatgtcagaatagcttccaataaagcagcctcattctgaggcctgagtgatcca

SEQ ID NO: 445955 - DNA, 2562 bp, Homo sapiens
  misc_feature (5)..(5): n is a, c, g, or t
aaaantaggctagtacgaggccgggtgttaatcggccgaggagtgcgcgctcctcctcgcccgccgctaggtccatcccggcccagccaccatgtccatccacttcagctccccggtattcacctcgcgctcagccgccttctcgggccgcggcgcccaggtgcgcctgagctccgctcgccccggcggccttggcagcagcagcctctacggcctcggcgcctcgcggccgcgcgtggccgtgcgctctgcctatgggggcccggtgggcgccggcatccgcgaggtcaccattaaccagagcctgctggccccgctgcggctggacgccgacccctccctccagcgggtgcgccaggaggagagcgagcagatcaagaccctcaacaacaagtttgcctccttcatcgacaaggtgcggtttctggagcagcagaacaagctgctggagaccaagtggacgctgctgcaggagcagaagtcggccaagagcagccgcctcccagacatctttgaggcccagattgctggccttcggggtcagcttgaggcactgcaggtggatgggggccgcctggaggcggagctgcggagcatgcaggatgtggtggaggacttcaagaataagtacgaagatgaaattaaccgccgcacagctgctgagaatgagtttgtggtgctgaagaaggatgtggatgctgcctacatgagcaaggtggagctggaggccaaggtggatgccctgaatgatgagatcaacttcctcaggaccctcaatgagacggagttgacagagctgcagtcccagatctccgacacatctgtggtgctgtccatggacaacagtcgctccctggacctggacggcatcatcgctgaggtcaaggcacagtatgaggagatggccaaatgcagccgggctgaggctgaagcctggtaccagaccaagtttgagaccctccaggcccaggctgggaagcatggggacgacctccggaatacccggaatgagatttcagagatgaaccgggccatccagaggctgcaggctgagatcgacaacatcaagaaccaggtcctggcatgggctgatgggagaaaggtcctggatgtgcacagagcctgtggagggagactcaggctggctggccagaagaaagccaccactggttccacattgatactgagcactctgcttgcacctggttctggctgcagggcgctgtccctgggagctcatcattcattgcagggacagaggacagcagaagaccttataatgactcacatggccctttcccacccactccaacctcactttccacgattcccctcactctgctctggccatgctaacctgcttcctgcatcttgcatttgccaagaatggtcatgcttcagggcctttgcacttggcgttgcctccccctggaatgtggttctcccagctctgtccatggttgttgttttctcctccctggggtttaggaaaagaccccttctcagagacggcactctcaaacaccagcccctctatcggcagcctgtctgaagttctttgaagcccctgtcactctctgaaatgttctgtcttattcattaagtgattgatggtccctacctccactggaatataacagatgcctggagagcagggaccctgtctgtctggttcactgctcctctcttccagcacctggcacatggcaggggcacgggtctcagatgagagactgcctgggaggatgagctttgctggaagctggggttggaggtgttgatgggggaagggcccccagccctggctgagtagtgtgtggccagggcagctcagcctgtgcaggtgtctgcagtggagagagggggagggcacacatgtggaagcttcggaaagctgatttccagatgagctgtgggtggtggggggatgtgagggtgatttacccacaaatgtcctccccttggagccctgtgggcctgtttacaggagggcggaggctgccttggggcacagaggcagggccgtgagtcaccccatgaagtgggccagcttccaggccaggaggggaagcacagaataacaaatggtggtttcccaaaccctgcagcctctactacatccggttctcctctcacacaacagggcggatccaggcctatagccaggtgtctaccaccactgaggggcgtcatggggagctacaaggggtctccagaggcagcggggatggcgttggctctgggggcaccagtgtgacagggcagggcaccgagctgtggccgaggggcagagtgtcagagggcctcctggggaatgctgtctctggcagagaggcagactgcctccactgagggaagaggatctgaggatagagaatggccgcgtgccaagttggaggccgccattgccgaggctgaggagcgtggggagctggcgctcaaggatgctcgtgccaagcaggctggagagctcttattgcccaggctggagtagctcttattggccaagctggagtagctcttattgcccaggctgaagtagctcttattgtccaggctgga

SEQ ID NO: 445956 - DNA, 1286 bp, Homo sapiens
  misc_feature (5)..(5): n is a, c, g, or t
  misc_feature (1101)..(1102): n is a, c, g, or t
  misc_feature (1107)..(1108): n is a, c, g, or t
aaaantaggctagtacgaggccgggtgttaatcggccgaggagtgcgcgctcctcctcgcccgccgctaggtccatcccggcccagccaccatgtccatccacttcagctccccggtattcacctcgcgctcagccgccttctcgggccgcggcgcccaggtgcgcctgagctccgctcgccccggcggccttggcagcagcagcctctacggcctcggcgcctcgcggccgcgcgtggccgtgcgctctgcctatgggggcccggtgggcgccggcatccgcgaggtcaccattaaccagagcctgctggccccgctgcggctggacgccgacccctccctccagcgggtgcgccaggaggagagcgagcagatcaagaccctcaacaacaagtttgcctccttcatcgacaaggtgcggtttctggagcagcagaacaagctgctggagaccaagtggacgctgctgcaggagcagaagtcggccaagagcagccgcctcccagacatctttgaggcccagattgctggccttcggggtcagcttgaggcactgcaggtggatgggggccgcctggaggcggagctgcggagcatgcaggatgtggtggaggacttcaagaataagtacgaagatgaaattaaccgccgcacagctgctgagaatgagtttgtggtgctgaagaaggatgtggatgctgcctacatgagcaaggtggagctggaggccaaggtggatgccctgaatgatgagatcaacttcctcaggaccctcaatgagacggagttgacagagctgcagtcccagatctccgacacatctgtggtgctgtccatggacaacagtcgctccctggacctggacggcatcatcgctgaggtcaaggcacagtatgaggagatggccaaatgcagccgggctgaggctgaagcctggtaccagaccaagtttgagaccctccaggcccaggctgggaagcatggggacgacctccggaatacccggaatgagatttcagagatgaaccgggccatccagaggctgcaggctgagatcgacaacatcaagaaccagcgtgcaagtggaggcgcatgccgagnngaganngtgggaacaggggcccagcatgtcggccaagagaggacgtgggaaccgccgtaagggcaaacgacatgtcgcgactggcgaacagcgacataggcaaaggcgcgaaaacaaaaaccacacaagggggacgagaccagcgagcaaaggaaggaaacaagacaacagtcaaacgaagaga

SEQ ID NO: 445957 - DNA, 1024 bp, Homo sapiens
cggaacctgcgacctttcacacgggacaagttatagctactccagcctggagcaaccagagctactccagcctgggcaataagagggaggccaaggtggatgccctgaatgatgagatcaacttcctcaggaccctcaatgagacggagttgacagagctgcagtcccagatctccgacacatctgtggtgctgtccatggacaacagtcgctccctggacctggacggcatcatcgctgaggtcaaggcacagtatgaggagatggccaaatgcagccgggctgaggctgaagcctggtaccagaccaagtttgagaccctccaggcccaggctgggaagcatggggacgacctccggaatacccggaatgagatttcagagatgaaccgggccatccagaggctgcaggctgagatcgacaacatcaagaaccagcgtgccaagttggaggccgccattgccgaggctgaggagcgtggggagctggcgctcaaggatgctcgtgccaagcaggaggagctggaagccgccctgcagcgggccaagcaggatatggcacggcagctgcgtgagtaccaggaactcatgagcgtgaagctggccctggacatcgagatcgccacctaccgcaagctgctggagggcgaggagagccggttggctggagatggagtgggagccgtgaatatctctgtgatgaattccactggtggcagtagcagtggcggtggcattgggctgaccctcgggggaaccatgggcagcaatgccctgagcttctccagcagtgcgggtcctgggctcctgaaggcttattccatccggaccgcatccgccagtcgcaggagtgcccgcgactgagccgcctcccaccactccactcctccagccaccacccacaatcacaagaagattcccacccctgcctcccatgcctggtcccaagacagtgagacagtctggaaagtgatgtcagaatagcttccaataaagcagcctcattctgaggcctgagtgatcca

SEQ ID NO: 445958 - DNA, 784 bp, Homo sapiens
ggtcaggcactgaagcactggtcaggcactgaagcctggtcaggcactgaagcctggtaccaagacacaagtttgagaccctccaggcccaggctgggaagcatggggacgacctccggaatacccggaatgagatttcagagatgaaccgggccatccagaggctgcaggctgagatcgacaacatcaagaaccagcgtgccaagttggaggccgccattgccgaggctgaggagcgtggggagctggcgctcaaggatgctcgtgccaagcaggaggagctggaagccgccctgcagcgggccaagcaggatatggcacggcagctgcgtgagtaccaggaactcatgagcgtgaagctggccctggacatcgagatcgccacctaccgcaagctgctggagggcgaggagagccggttggctggagatggagtgggagccgtgaatatctctgtgatgaattccactggtggcagtagcagtggcggtggcattgggctgaccctcgggggaaccatgggcagcaatgccctgagcttctccagcagtgcgggtcctgggctcctgaaggcttattccatccggaccgcatccgccagtcgcaggagtgcccgcgactgagccgcctcccaccactccactcctccagccaccacccacaatcacaagaagattcccacccctgcctcccatgcctggtcccaagacagtgagacagtctggaaagtgatgtcagaatagcttccaataaagcagcctcattctgaggcctgagtgatcca

SEQ ID NO: 445959 - DNA, 462 bp, Homo sapiens
cgctcttggaagtagtcgctcttggctgtagtcgctactggccctggacatcgagatcgccacctaccgcaagctgctggagggcgaggagagccggttggctggagatggagtgggagccgtgaatatctctgtgatgaattccactggtggcagtagcagtggcggtggcattgggctgaccctcgggggaaccatgggcagcaatgccctgagcttctccagcagtgcgggtcctgggctcctgaaggcttattccatccggaccgcatccgccagtcgcaggagtgcccgcgactgagccgcctcccaccactccactcctccagccaccacccacaatcacaagaagattcccacccctgcctcccatgcctggtcccaagacagtgagacagtctggaaagtgatgtcagaatagcttccaataaagcagcctcattctgaggcctgagtgatcca

SEQ ID NO: 445960 - DNA, 399 bp, Homo sapiens
ctcttcgcgtggctctttgtgcggctcatggtgtggctcatcgggtggtgtgggagccgtgaatatctctgtgatgaattccactggtggcagtagcagtggcggtggcattgggctgaccctcgggggaaccatgggcagcaatgccctgagcttctccagcagtgcgggtcctgggctcctgaaggcttattccatccggaccgcatccgccagtcgcaggagtgcccgcgactgagccgcctcccaccactccactcctccagccaccacccacaatcacaagaagattcccacccctgcctcccatgcctggtcccaagacagtgagacagtctggaaagtgatgtcagaatagcttccaataaagcagcctcattctgaggcctgagtgatcca

SEQ ID NO: 445961 - DNA, 3793 bp, Homo sapiens
gttcacagttgaggaccacacaatgcaaagagattttagatggctgtgggtctacgaaataggctatgcagccgataacagtagaactctgaacgtggattccactgcaatgacactacctatgtctgatccaactgcatgggccacagcaatgaataatcttggaatggcaccgctgggaattgccggacaaccaattttacctgactttgatcctgctcttggaatgatgactggaattccaccaataactccaatgatgcctggtttgggaatagtacctccaccaattcctccagatatgccagtagtaaaagagatcatacactgtaaaagctgcacgctcttccctccaaatccaaatctcccacctcctgcaacccgagaaagaccaccaggatgcaaaacagtatttgtgggtggtctgcctgaaaatgggacagagcaaatcattgtggaagttttcgagcagtgtggagagatcattgccattcgcaagagcaagaagaacttctgccacattcgctttgctgaggagtacatggtggacaaagccctgtatctgtctggttaccgcattcgcctgggctctagtactgacaagaaggacacaggcagactccacgttgatttcgcacaggctcgagatgacctgtatgagtgggagtgtaaacagcgtatgctagccagagaggagcgccatcgtagaagaatggaagaagaaagattgcgtccaccatctccacccccagtggtccactattcagatcatgaatgcagcattgttgctgaaaaattaaaagatgattccaaattctcagaagctgtacagaccttgcttacctggatagagcgaggagaggtcaaccgtcgtagcgccaataacttctactccatgatccagtcggccaacagccatgtccgccgcctggtgaacgagaaagctgcccatgagaaagatatggaagaagcaaaggagaagttcaagcaggccctttctggaattctcattcaatttgagcagatagtggctgtgtaccattccgcctccaagcagaaggcatgggaccacttcacaaaagcccagcggaagaacatcagcgtgtggtgcaaacaagctgaggaaattcgcaacattcataatgatgaattaatgggaatcaggcgagaagaagaaatggaaatgtctgatgatgaaatagaagaaatgacagaaacaaaagaaactgaggaatcagccttagtatcacaggcagaagctctgaaggaagaaaatgacagcctccgttggcagctcgatgcctaccggaatgaagtagaactgctcaagcaagaacaaggcaaagtccacagagaagatgaccctaacaaagaacagcagctgaaactcctgcaacaagccctgcaaggaatgcaacagcatctactcaaagtccaagaggaatacaaaaagaaagaagctgaacttgaaaaactcaaagatgacaagttacaggtggaaaaaatgttggaaaatcttaaagaaaaggaaagctgtgcttctaggctgtgtgcctcaaaccaggatagcgaataccctcttgagaagaccatgaacagcagtcctatcaaatctgaacgtgaagcactgctagtggggattatctccacattccttcatgttcacccatttggagcaagcattgaatacatctgttcctacttgcaccgtcttgataataagatctgcaccagcgatgtggagtgtctcatgggtagactccagcataccttcaagcaggaaatgactggagttggagccagcctggaaaagagatggaaattctgtggcttcgagggcttgaagctgacctaaatctctttgcctaacaacttgggatcctgaagataaatatgtgttggacaagcatagaaagtgatttatatttttaatggttttcaagtggaagttcctttgaatttgtcagttcattcctggaaaatcttttgagttaaaataaggatcctaggacagcacctcgaactacaggccctaaagagaaattgcctcaaaccacaagtgctgtaacttcctcccctttctgtcaattggttgtctttaaatattgcaaaagtcctgatgctaaacagtatttggagtgttttcagtgtctgtactactgttgtagaccttggtatttttttaaacactgttaactgaaatgttttgatgatttgtatgtgatttgtgtttctaaacttctctttacattaatgttgttactggtgaaaggcatgagagcagcactaagtcctctgtgtaactgccattgtctttccaatccccagtagaccagtaaataaataacacatcagtgtcttctagaaggtgcctgaccaggttcaccttttaaacgacaaagcatggtttgtggctttttgcaaaattactatgaaccaaaagttgacaaatgttccaaagttattttctctaacatatcacattaaagatctgtttcagaattgtaaaaagtacatctagatgtgtttacagaaagcaagtatccagtatgactggcatgtgttcatgctattcagaatcacttgtaaatagtctgcttttaaaggagggcatgttcagttttctgtgaattaaaatatgctcatgtgtgggcacacacgcacaaacacacacacgcacgcacacagtggcagaagggatttatattaatattctttcccctctggccttcttacagtctgttggtccctttgcttctgttgtcagtgtgttgaattgcaaaccgagtactgctgtaaatactatgtttacttcatgctgaatgtttgcaaagacttgatataagtattaatagtaatgaatcaatgaataaataatgagctagggtttgtgaggctttctacaaataggtcagctccacctggagtgcgaattgccagagacaccttggtagtgcccatcggcaaatcgcaatggcagcatgtgagtggaccattcagaaacttctgcttggtggaaagtaaacagagaggatggaggtttggggcgaatgtcctgaggcagagatggtctttattgtgtgtggtggtggttgtggtatttataataatgcaagcataccctcccttgagtctcaattgaagataaaagaatgtactgagcaagcaaagccaatggagagtatttcacaaaaatactttgtaaatgagatgccagtagtgttcaaagttgtatttttaaaagataaatattcctttttatacctcagttttgtgtcctgtttttaatgacttacgctctaagtaatccattagtagttatctcagttccttcctttgggttactagaatgttggaaaaagatgccaagtctgtcttgacaactggaaacagggttccacagcagcccattcgtgctgaaaactggcttccccctgaagcaccctgctgtggcaccagcaggaagctcaggttaattttacactagcttgctcactgatgcatctctcatcaatgctacggaaggctttgattcatcagtctcgggctcttggaatacctaattttaataatatctatgaaatcaagggaaactttccatttacagttatttcttgtttaaataaactaaattaatttttaggggagagcagtaggaaaaagagctaatgcatgcggggtttaatacctaggtgatgggttgaggtgcagcaaaaccaccatggcacacgttcacctatgtaacaaacctgcacatcctgcacatgtaccccggaacttacttaaaaaaaaa

SEQ ID NO: 445962 - DNA, 3575 bp, Homo sapiens
gtgtgtgagagtccagccttgggccagagtgccgggtctaggcctggaagcgcgaggcgggcatttcggaagagagtggcgcggcgtggggcgccgcgagggcactacgagcccaggaactgccgcgccggcccgattttccgcggctgtataaggactagcgcttcggtagccggggagctggagggaacctgatttgagatcaattcttggagaacacaaagaagtgtgatggattgaaccagctgccctttgaccctgctaacaacaacgagcccctgcagtttggtagtgccagtggccctctggtcacagaaggcctcattgagaatggaggggaatcaagcaagaaaagaaagagaacaaatactccttcagccgataacagtagaactctgaacgtggattccactgcaatgacactacctatgtctgatccaactgcatgggccacagcaatgaataatcttggaatggcaccgctgggaattgccggacaaccaattttacctgactttgatcctgctcttggaatgatgactggaattccaccaataactccaatgatgcctggtttgggaatagtacctccaccaattcctccagatatgccagtagtaaaagagatcatacactgtaaaagctgcacgctcttccctccaaatccaaatctcccacctcctgcaacccgagaaagaccaccaggatgcaaaacagtatttgtgggtggtctgcctgaaaatgggacagagcaaatcattgtggaagttttcgagcagtgtggagagatcattgccattcgcaagagcaagaagaacttctgccacattcgctttgctgaggagtacatggtggacaaagccctgtatctgtctggttaccgcattcgcctgggctctagtactgacaagaaggacacaggcagactccacgttgatttcgcacaggctcgagatgacctgtatgagtgggagtgtaaacagcgtatgctagccagagaggagcgccatcgtagaagaatggaagaagaaagattgcgtccaccatctccacccccagtggtccactattcagatcatgaatgcagcattgttgctgaaaaattaaaagatgattccaaattctcagaagctgtacagaccttgcttacctggatagagcgaggagaggtcaaccgtcgtagcgccaataacttctactccatgatccagtcggccaacagccatgtccgccgcctggtgaacgagaaagctgcccatgagaaagatatggaagaagcaaaggagaagttcaagcaggccctttctggaattctcattcaatttgagcagatagtggctgtgtaccattccgcctccaagcagaaggcatgggaccacttcacaaaagcccagcggaagaacatcagcgtgtggtgcaaacaagctgaggaaattcgcaacattcataatgatgaattaatgggaatcaggcgagaagaagaaatggaaatgtctgatgatgaaatagaagaaatgacagaaacaaaagaaactgaggaatcagccttagtatcacaggcagaagctctgaaggaagaaaatgacagcctccgttggcagctcgatgcctaccggaatgaagtagaactgctcaagcaagaacaaggcaaagtccacagagaagatgaccctaacaaagaacagcagctgaaactcctgcaacaagccctgcaaggaatgcaacagcatctactcaaagtccaagaggaatacaaaaagaaagaagctgaacttgaaaaactcaaagatgacaagttacaggtggaaaaaatgttggaaaatcttaaagaaaaggaaagctgtgcttctaggctgtgtgcctcaaaccaggatagcgaataccctcttgagaagaccatgaacagcagtcctatcaaatctgaacgtgaagcactgctagtggggattatctccacattccttcatgttcacccatttggagcaagcattgaatacatctgttcctacttgcaccgtcttgataataagatctgcaccagcgatgtggagtgtctcatgggtagactccagcataccttcaagcaggaaatgactggagttggagccagcctggaaaagagatggaaattctgtggcttcgagggcttgaagctgacctaaatctctttgcctaacaacttgggatcctgaagataaatatgtgttggacaagcatagaaagtgatttatatttttaatggttttcaagtggaagttcctttgaatttgtcagttcattcctggaaaatcttttgagttaaaataaggatcctaggacagcacctcgaactacaggccctaaagagaaattgcctcaaaccacaagtgctgtaacttcctcccctttctgtcaattggttgtctttaaatattgcaaaagtcctgatgctaaacagtatttggagtgttttcagtgtctgtactactgttgtagaccttggtatttttttaaacactgttaactgaaatgttttgatgatttgtatgtgatttgtgtttctaaacttctctttacattaatgttgttactggtgaaaggcatgagagcagcactaagtcctctgtgtaactgccattgtctttccaatccccagtagaccagtaaataaataacacatcagtgtcttctagaaggtgcctgaccaggttcaccttttaaacgacaaagcatggtttgtggctttttgcaaaattactatgaaccaaaagttgacaaatgttccaaagttattttctctaacatatcacattaaagatctgtttcagaattgtaaaaagtacatctagatgtgtttacagaaagcaagtatccagtatgactggcatgtgttcatgctattcagaatcacttgtaaatagtctgcttttaaaggagggcatgttcagttttctgtgaattaaaatatgctcatgtgtgggcacacacgcacaaacacacacacgcacgcacacagtggcagaagggatttatattaatattctttcccctctggccttcttacagtctgttggtccctttgcttctgttgtcagtgtgttgaattgcaaaccgagtactgctgtaaatactatgtttacttcatgctgaatgtttgcaaagacttgatataagtattaatagtaatgaatcaatgaataaataatgagctagggtttgtgaggctttctacaaataggtcagctccacctggagtgcgaattgccagagacaccttggtagtgcccatcggcaaatcgcaatggcagcatgtgagtggaccattcagaaacttctgcttggtggaaagtaaacagagaggatggaggtttggggcgaatgtcctgaggcagagatggtctttattgtgtgtggtggtggttgtggtatttataataatgcaagcataccctcccttgagtctcaattgaagataaaagaatgtactgagcaagcaaagccaatggagagtatttcacaaaaatactttgtaaatgagatgccagtagtgttcaaagttgtatttttaaaagataaatattcctttttatacctca

SEQ ID NO: 445963 - DNA, 2212 bp, Homo sapiens
tgtggaccttaaacttttttaaaaaaacaatggtccttttaacagtgggatgaaatcctggctccacttccttgcagtgtgatcttagccaatttacctgagcctcactttcctcatctgtagaatggagattatacttacctaaccgtgcctagcatcttgttagtataccataaatgttgggtctagttgccccgattgcttgtataaagtccagatgaaggcaggaaaaaaaaaaaaaaactggtgaaggtaaatgtttaaatgtttctgtgttttggagccctataaataaactttggaatatctgtgatgcttttgtaatttatgctattttctctcccattcagtaatccaaattgaatggtattgtttttatggtcctgtgttaagttacctgttgtgtagttaattgaaaccaactctattgccaaataaagtgaactgacctagaagcatgttgtgtccacaggaaagctgtgcttctaggctgtgtgcctcaaaccaggatagcgaataccctcttgagaagaccatgaacagcagtcctatcaaatctgaacgtgaagcactgctagtggggattatctccacattccttcatgttcacccatttggagcaagcattgaatacatctgttcctacttgcaccgtcttgataataagatctgcaccagcgatgtggagtgtctcatgggtagactccagcataccttcaagcaggaaatgactggagttggagccagcctggaaaagagatggaaattctgtggcttcgagggcttgaagctgacctaaatctctttgcctaacaacttgggatcctgaagataaatatgtgttggacaagcatagaaagtgatttatatttttaatggttttcaagtggaagttcctttgaatttgtcagttcattcctggaaaatcttttgagttaaaataaggatcctaggacagcacctcgaactacaggccctaaagagaaattgcctcaaaccacaagtgctgtaacttcctcccctttctgtcaattggttgtctttaaatattgcaaaagtcctgatgctaaacagtatttggagtgttttcagtgtctgtactactgttgtagaccttggtatttttttaaacactgttaactgaaatgttttgatgatttgtatgtgatttgtgtttctaaacttctctttacattaatgttgttactggtgaaaggcatgagagcagcactaagtcctctgtgtaactgccattgtctttccaatccccagtagaccagtaaataaataacacatcagtgtcttctagaaggtgcctgaccaggttcaccttttaaacgacaaagcatggtttgtggctttttgcaaaattactatgaaccaaaagttgacaaatgttccaaagttattttctctaacatatcacattaaagatctgtttcagaattgtaaaaagtacatctagatgtgtttacagaaagcaagtatccagtatgactggcatgtgttcatgctattcagaatcacttgtaaatagtctgcttttaaaggagggcatgttcagttttctgtgaattaaaatatgctcatgtgtgggcacacacgcacaaacacacacacgcacgcacacagtggcagaagggatttatattaatattctttcccctctggccttcttacagtctgttggtccctttgcttctgttgtcagtgtgttgaattgcaaaccgagtactgctgtaaatactatgtttacttcatgctgaatgtttgcaaagacttgatataagtattaatagtaatgaatcaatgaataaataatgagctagggtttgtgaggctttctacaaataggtcagctccacctggagtgcgaattgccagagacaccttggtagtgcccatcggcaaatcgcaatggcagcatgtgagtggaccattcagaaacttctgcttggtggaaagtaaacagagaggatggaggtttggggcgaatgtcctgaggcagagatggtctttattgtgtgtggtggtggttgtggtatttataataatgcaagcataccctcccttgagtctcaattgaagataaaagaatgtactgagcaagcaaagccaatggagagtatttcacaaaaatactttgtaaatgagatgccagtagtgttcaaagttgtatttttaaaagataaatattcctttttatacctca

SEQ ID NO: 445964 - DNA, 3431 bp, Homo sapiens
gtgtgtgagagtccagccttgggccagagtgccgggtctaggcctggaagcgcgaggcgggcatttcggaagagagtggcgcggcgtggggcgccgcgagggcactacgagcccaggaactgccgcgccggcccgattttccgcggctgtataaggactagcgcttcggtagccggggagctggagggaacctgatttgagatcaattcttggagaacacaaagaagtgtgatgccgataacagtagaactctgaacgtggattccactgcaatgacactacctatgtctgatccaactgcatgggccacagcaatgaataatcttggaatggcaccgctgggaattgccggacaaccaattttacctgactttgatcctgctcttggaatgatgactggaattccaccaataactccaatgatgcctggtttgggaatagtacctccaccaattcctccagatatgccagtagtaaaagagatcatacactgtaaaagctgcacgctcttccctccaaatccaaatctcccacctcctgcaacccgagaaagaccaccaggatgcaaaacagtatttgtgggtggtctgcctgaaaatgggacagagcaaatcattgtggaagttttcgagcagtgtggagagatcattgccattcgcaagagcaagaagaacttctgccacattcgctttgctgaggagtacatggtggacaaagccctgtatctgtctggttaccgcattcgcctgggctctagtactgacaagaaggacacaggcagactccacgttgatttcgcacaggctcgagatgacctgtatgagtgggagtgtaaacagcgtatgctagccagagaggagcgccatcgtagaagaatggaagaagaaagattgcgtccaccatctccacccccagtggtccactattcagatcatgaatgcagcattgttgctgaaaaattaaaagatgattccaaattctcagaagctgtacagaccttgcttacctggatagagcgaggagaggtcaaccgtcgtagcgccaataacttctactccatgatccagtcggccaacagccatgtccgccgcctggtgaacgagaaagctgcccatgagaaagatatggaagaagcaaaggagaagttcaagcaggccctttctggaattctcattcaatttgagcagatagtggctgtgtaccattccgcctccaagcagaaggcatgggaccacttcacaaaagcccagcggaagaacatcagcgtgtggtgcaaacaagctgaggaaattcgcaacattcataatgatgaattaatgggaatcaggcgagaagaagaaatggaaatgtctgatgatgaaatagaagaaatgacagaaacaaaagaaactgaggaatcagccttagtatcacaggcagaagctctgaaggaagaaaatgacagcctccgttggcagctcgatgcctaccggaatgaagtagaactgctcaagcaagaacaaggcaaagtccacagagaagatgaccctaacaaagaacagcagctgaaactcctgcaacaagccctgcaaggaatgcaacagcatctactcaaagtccaagaggaatacaaaaagaaagaagctgaacttgaaaaactcaaagatgacaagttacaggtggaaaaaatgttggaaaatcttaaagaaaaggaaagctgtgcttctaggctgtgtgcctcaaaccaggatagcgaataccctcttgagaagaccatgaacagcagtcctatcaaatctgaacgtgaagcactgctagtggggattatctccacattccttcatgttcacccatttggagcaagcattgaatacatctgttcctacttgcaccgtcttgataataagatctgcaccagcgatgtggagtgtctcatgggtagactccagcataccttcaagcaggaaatgactggagttggagccagcctggaaaagagatggaaattctgtggcttcgagggcttgaagctgacctaaatctctttgcctaacaacttgggatcctgaagataaatatgtgttggacaagcatagaaagtgatttatatttttaatggttttcaagtggaagttcctttgaatttgtcagttcattcctggaaaatcttttgagttaaaataaggatcctaggacagcacctcgaactacaggccctaaagagaaattgcctcaaaccacaagtgctgtaacttcctcccctttctgtcaattggttgtctttaaatattgcaaaagtcctgatgctaaacagtatttggagtgttttcagtgtctgtactactgttgtagaccttggtatttttttaaacactgttaactgaaatgttttgatgatttgtatgtgatttgtgtttctaaacttctctttacattaatgttgttactggtgaaaggcatgagagcagcactaagtcctctgtgtaactgccattgtctttccaatccccagtagaccagtaaataaataacacatcagtgtcttctagaaggtgcctgaccaggttcaccttttaaacgacaaagcatggtttgtggctttttgcaaaattactatgaaccaaaagttgacaaatgttccaaagttattttctctaacatatcacattaaagatctgtttcagaattgtaaaaagtacatctagatgtgtttacagaaagcaagtatccagtatgactggcatgtgttcatgctattcagaatcacttgtaaatagtctgcttttaaaggagggcatgttcagttttctgtgaattaaaatatgctcatgtgtgggcacacacgcacaaacacacacacgcacgcacacagtggcagaagggatttatattaatattctttcccctctggccttcttacagtctgttggtccctttgcttctgttgtcagtgtgttgaattgcaaaccgagtactgctgtaaatactatgtttacttcatgctgaatgtttgcaaagacttgatataagtattaatagtaatgaatcaatgaataaataatgagctagggtttgtgaggctttctacaaataggtcagctccacctggagtgcgaattgccagagacaccttggtagtgcccatcggcaaatcgcaatggcagcatgtgagtggaccattcagaaacttctgcttggtggaaagtaaacagagaggatggaggtttggggcgaatgtcctgaggcagagatggtctttattgtgtgtggtggtggttgtggtatttataataatgcaagcataccctcccttgagtctcaattgaagataaaagaatgtactgagcaagcaaagccaatggagagtatttcacaaaaatactttgtaaatgagatgccagtagtgttcaaagttgtatttttaaaagataaatattcctttttatacctca

SEQ ID NO: 445965 - DNA, 1473 bp, Homo sapiens
gtgtgtgagagtccagccttgggccagagtgccgggtctaggcctggaagcgcgaggcgggcatttcggaagagagtggcgcggcgtggggcgccgcgagggcactacgagcccaggaactgccgcgccggcccgattttccgcggctgtataaggactagcgcttcggtagccggggagctggaggtcagagaggcagaaagccccggtggccgtggctggggactgtgggactgagggggcctagggaggagggtgcttccggggccgcggtcctcagcgcctaactccacccagctccacctctgcaggggagggggtatcgggactgggagtcgggggtgggcttttgagctctaggcgccagttctcttgagcccgggagcgcgctgtctttgctcttttttttttttttttttggtccaactcgcccgcccctttttttttttcccacgacgccgcccccctccccctggctctgtgcctcctcagaggtccgaagttggggtttgcgtccagggttttgcctaggcggtgactggactctaattcttaccgcaggaattgggtgatctctttcctcttttccctcaatttgtatttcaggtttgggcacataaccctccctgcgctacactccccattttctttggggcatgggaattccttgccacgctcagggcgtgacttttttttttcaaactttctctttttgcctccttaattgatcgccatctctttactggcccctcagccacctgccacttcccccaccaggtctttgaagtggggagagtttcccctcaatttctagaagggatgggaagcaaaagagggaaggaatcttgcttttgagaaatgtgtgtttaaggttcagtgcagggttctggtgagagtaaaaggcaagttagactggttataaaaatccagcgctttaggggtttccagcaaagactgatagcactaatgttgacaaacatttagggggcacacctttattctacagaataaagtagaccgtgtgaaacagaccatattaatcattgtattattacaaacgtgtgcaaaaaacgctaagaggggtcagtggaagagcatactgatgggggtggtgagttcatctatggaagttcaagcctaacccgggaagtgctgaagccctcatccggctttcaggctttgtgaaggaggtgaattttaatctgggctccagcagagtacaggggatttgaagttgtcaaagaggagggagaaaatgcttcctgctactgagattggactttgagaagggtaaacagaagagggagcactgtgagacaggtgggcttgcctgattggaataaaagatatcagcacaaatatactgggaaataaatagggtggagaagcttggggtcataataacatgatactttgaaacatacacatagtttggatattattctgtatcaaataaaattgaaggcaaaaatt

SEQ ID NO: 445966 - DNA, 3268 bp, Homo sapiens
gttcacagttgaggaccacacaatgcaaagagattttagatggctgtgggtctacgaaataggctatgcagccgataacagtagaactctgaacgtggattccactgcaatgacactacctatgtctgatccaactgcatgggccacagcaatgaataatcttggaatggcaccgctgggaattgccggacaaccaattttacctgactttgatcctgctcttggaatgatgactggaattccaccaataactccaatgatgcctggtttgggaatagtacctccaccaattcctccagatatgccagtagtaaaagagatcatacactgtaaaagctgcacgctcttccctccaaatccaaatctcccacctcctgcaacccgagaaagaccaccaggatgcaaaacagtatttgtgggtggtctgcctgaaaatgggacagagcaaatcattgtggaagttttcgagcagtgtggagagatcattgccattcgcaagagcaagaagaacttctgccacattcgctttgctgaggagtacatggtggacaaagccctgtatctgtctggttaccgcattcgcctgggctctagtactgacaagaaggacacaggcagactccacgttgatttcgcacaggctcgagatgacctgtatgagtgggagtgtaaacagcgtatgctagccagagaggagcgccatcgtagaagaatggaagaagaaagattgcgtccaccatctccacccccagtggtccactattcagatcatgaatgcagcattgttgctgaaaaattaaaagatgattccaaattctcagaagctgtacagaccttgcttacctggatagagcgaggagaggtcaaccgtcgtagcgccaataacttctactccatgatccagtcggccaacagccatgtccgccgcctggtgaacgagaaagctgcccatgagaaagatatggaagaagcaaaggagaagttcaagcaggccctttctggaattctcattcaatttgagcagatagtggctgtgtaccattccgcctccaagcagaaggcatgggaccacttcacaaaagcccagcggaagaacatcagcgtgtggtgcaaacaagctgaggaaattcgcaacattcataatgatgaattaatgggaatcaggcgagaagaagaaatggaaatgtctgatgatgaaatagaagaaatgacagaaacaaaagaaactgaggaatcagccttagtatcacaggcagaagctctgaaggaagaaaatgacagcctccgttggcagctcgatgcctaccggaatgaagtagaactgctcaagcaagaacaaggcaaagtccacagagaagatgaccctaacaaagaacagcagctgaaactcctgcaacaagccctgcaaggaatgcaacagcatctactcaaagtccaagaggaatacaaaaagaaagaagctgaacttgaaaaactcaaagatgacaagttacaggtggaaaaaatgttggaaaatcttaaagaaaaggaaagctgtgcttctaggctgtgtgcctcaaaccaggatagcgaataccctcttgagaagaccatgaacagcagtcctatcaaatctgaacgtgaagcactgctagtggggattatctccacattccttcatgttcacccatttggagcaagcattgaatacatctgttcctacttgcaccgtcttgataataagatctgcaccagcgatgtggagtgtctcatgggtagactccagcataccttcaagcaggaaatgactggagttggagccagcctggaaaagagatggaaattctgtggcttcgagggcttgaagctgacctaaatctctttgcctaacaacttgggatcctgaagataaatatgtgttggacaagcatagaaagtgatttatatttttaatggttttcaagtggaagttcctttgaatttgtcagttcattcctggaaaatcttttgagttaaaataaggatcctaggacagcacctcgaactacaggccctaaagagaaattgcctcaaaccacaagtgctgtaacttcctcccctttctgtcaattggttgtctttaaatattgcaaaagtcctgatgctaaacagtatttggagtgttttcagtgtctgtactactgttgtagaccttggtatttttttaaacactgttaactgaaatgttttgatgatttgtatgtgatttgtgtttctaaacttctctttacattaatgttgttactggtgaaaggcatgagagcagcactaagtcctctgtgtaactgccattgtctttccaatccccagtagaccagtaaataaataacacatcagtgtcttctagaaggtgcctgaccaggttcaccttttaaacgacaaagcatggtttgtggctttttgcaaaattactatgaaccaaaagttgacaaatgttccaaagttattttctctaacatatcacattaaagatctgtttcagaattgtaaaaagtacatctagatgtgtttacagaaagcaagtatccagtatgactggcatgtgttcatgctattcagaatcacttgtaaatagtctgcttttaaaggagggcatgttcagttttctgtgaattaaaatatgctcatgtgtgggcacacacgcacaaacacacacacgcacgcacacagtggcagaagggatttatattaatattctttcccctctggccttcttacagtctgttggtccctttgcttctgttgtcagtgtgttgaattgcaaaccgagtactgctgtaaatactatgtttacttcatgctgaatgtttgcaaagacttgatataagtattaatagtaatgaatcaatgaataaataatgagctagggtttgtgaggctttctacaaataggtcagctccacctggagtgcgaattgccagagacaccttggtagtgcccatcggcaaatcgcaatggcagcatgtgagtggaccattcagaaacttctgcttggtggaaagtaaacagagaggatggaggtttggggcgaatgtcctgaggcagagatggtctttattgtgtgtggtggtggttgtggtatttataataatgcaagcataccctcccttgagtctcaattgaagataaaagaatgtactgagcaagcaaagccaatggagagtatttcacaaaaatactttgtaaatgagatgccagtagtgttcaaagttgtatttttaaaagataaatattcctttttatacctca

SEQ ID NO: 445967 - DNA, 1340 bp, Homo sapiens
gacccgccctcactcgcgcgttaggaggctcgggtcgttgtggtgcgctgtcttcccgcttgcgtcagggacctgcccgactcagtggccgccatggcatcagatgaaggcaaactttttgttggagggctgagttttgacaccaatgagcagtcgctggagcaggtcttctcaaagtacggacagatctctgaagtggtggttgtgaaagacagggagacccagagatctcggggatttgggtttgtcacctttgagaacattgacgacgctaaggatgccatgatggccatgaatgggaagtctgtagatggacggcagatccgagtagaccaggcaggcaagtcgtcagacaaccgatcccgtgggtaccgtggtggctctgccgggggccggggcttcttccgtgggggccgaggacggggccgtgggttctctagaggaggaggggaccgaggctatggggggaaccggttcgagtccaggagtgggggctacggaggctccagagactactatagcagccggagtcagagtggtggctacagtgaccggagctcgggcgggtcctacagagacagttacgacagttacgctacacacaacgagtaaaaacccttcctgctcaagatcgtccttccaatggctgtgtgtttaaagattgtgggagcttcgctgaacgttaatgtgtagtaaatgcacctccttgtattcccactttcgtagtcatttcggttctgatcttgtcaaacccagcctgaccgcttctgacgccgggatggcctcgttactagacttttctttttaaggaagtgctgtttttttttgagggttttcaaaacattttgaaaagcatttacttttttgaccacgagccatgagttttcaaaaaaatcgggggttgtgtgggtttttggtttttgttttagtttttggttgcgttgcctttttttttttagtggggttggccccatgaagtgggtgccccactcacttctctgagatcgaacggactgtgaatccgctctttgtcggaagctgagcaagctgtggcttttttccaactccgtgtgacgtttctgagtgtagtgtggtaggaccccggcgggtgtggcagcaactgccctggagccccagcccctgcgtccatctgtgctgtgcgccccacagtagacgtgcagacgtccctgagaggttcttgaagatgtttatttatattgtccttttttactggaagacgtacgcatactccatcgatgttgtatttgcagtggctgaggaattcttgtacgcagttttctttggctttacgaagccgattaaaagaccgtgtgaaatga

SEQ ID NO: 445968 - DNA, 1097 bp, Homo sapiens
gacccgccctcactcgcgcgttaggaggctcgggtcgttgtggtgcgctgtcttcccgcttgcgtcagggacctgcccgactcagtggccgccatggcatcagatgaaggcaaactttttgttggagggctgagttttgacaccaatgagcagtcgctggagcaggtcttctcaaagtacggacagatctctgaagtggtggttgtgaaagacagggagacccagagatctcggggatttgggtttgtcacctttgagaacattgacgacgctaaggatgccatgatggccatgaatgggaagtctgtagatggacggcagatccgagtagaccaggcaggcaagtcgtcagacaaccgatcccgtgggtaccgtggtggctctgccgggggccggggcttcttccgtgggggccgaggacggggccgtgggttctctagaggaggaggggaccgaggctatggggggaaccggttcgagtccaggagtgggggctacggaggctccagagactactatagcagccggagtcagagtggtggctacagtgaccggagctcgggcgggtcctacagagacagttacgacagttacggttgaaggggcccggccaggactcggggaagggtggcctgagagcagcgatgacctctggggtcactgtcccaggagggacttcacctggaacaagagctggaggcagccgcttgcccaggaggcttgtcccctgtaagtgctttcgggaagagtggcatgtggcgctgagccctgtcccgggcggcacctgggcgtttcagtgagtcctgctctcccgcacctatggccccacggcgggcgcctttcggtgtgtgttgggtgcagggcagcgcctcccgggagcgccgggtccctcgcctggagcccgcgcctgttctccctcccttcctcctccttccgaggcgcttcgccagtgaggtgcgggctcagggcctcgagtctctcctggagcacgggctgcggtgcgccggcagcttacggggcggccagtccttgcccacaacgatgtggagccctgtgaaagtcggattcgaataaagggccacgtgtgcacccagaaa

SEQ ID NO: 445969 - DNA, 371 bp, Homo sapiens
ccaatcaagagtgagctactcatgattattcagatggaaaccccaattcagcatgaggaaaaaagtttgtgatattgcggcagaactggccaggaatttaatagatgaggatggcaataaagcgatgacctctggggtcactgtcccaggagggacttcacctggaacaagagctggaggcagccgcttgcccaggaggcttgtcccctgaggcgcttcgccagtgaggtgcgggctcagggcctcgagtctctcctggagcacgggctgcggtgcgccggcagcttacggggcggccagtccttgcccacaacgatgtggagccctgtgaaagtcggattcgaataaagggccacgtgtgcacccagaaa

SEQ ID NO: 445970 - DNA, 288 bp, Homo sapiens
tataaaaatttgcctcagagaaggttaatcatgtattcgcaagaagacaaagcttcagttcacatttaagtggtggaaaatgaatccactttcggaccttagaatcgtcttaagtcgaattaacaagaggcgcttcgccagtgaggtgcgggctcagggcctcgagtctctcctggagcacgggctgcggtgcgccggcagcttacggggcggccagtccttgcccacaacgatgtggagccctgtgaaagtcggattcgaataaagggccacgtgtgcacccagaaa

SEQ ID NO: 445971 - DNA, 836 bp, Homo sapiens
tcacggagcccgcacccaggaacccgctcgtagccgccatggcatcagatgaaggcaaactttttgttggagggctgagttttgacaccaatgagcagtcgctggagcaggtcttctcaaagtacggacagatctctgaagtggtggttgtgaaagacagggagacccagagatctcggggatttgggtttgtcacctttgagaacattgacgacgctaaggatgccatgatggccatgaatgggaagtctgtagatggacggcagatccgagtagaccaggcaggcaagtcgtcagacaaccgatcccgtgggtaccgtggtggctctgccgggggccggggcttcttccgtgggggccgaggacggggccgtgggttctctagaggaggaggggaccgaggctatggggggaaccggttcgagtccaggagtgggggctacggaggctccagagactactatagcagccggagtcagagtggtggctacagtgaccggagctcgggcgggtcctacagagacagttacgacagttacggttgaaggggcccggccaggactcggggaagggtggcctgagagcagcgatgacctctggggtcactgtcccaggagggacttcacctggaacaagagctggaggcagccgcttgcccaggaggcttgtcccctgaggcgcttcgccagtgaggtgcgggctcagggcctcgagtctctcctggagcacgggctgcggtgcgccggcagcttacggggcggccagtccttgcccacaacgatgtggagccctgtgaaagtcggattcgaataaagggccacgtgtgcacccagaaa

SEQ ID NO: 445972 - DNA, 2771 bp, Homo sapiens
gacccgccctcactcgcgcgttaggaggctcgggtcgttgtggtgcgctgtcttcccgcttgcgtcagggacctgcccgactcagtggccgccatggcatcagatgaaggcaaactttttgttggagggctgagttttgacaccaatgagcagtcgctggagcaggtcttctcaaagtacggacagatctctgaagtggtggttgtgaaagacagggagacccagagatctcggggatttgggtttgtcacctttgagaacattgacgacgctaaggatgccatgatggccatgaatgggaagtctgtagatggacggcagatccgagtagaccaggcaggcaagtcgtcagacaaccgatcccgtgggtaccgtggtggctctgccgggggccggggcttcttccgtgggggccgaggacggggccgtgggttctctagaggaggaggggaccgaggctatggggggaaccggttcgagtccaggagtgggggctacggaggctccagagactactatagcagccggagtcagagtggtggctacagtgaccggagctcgggcgggtcctacagagacagttacgacagttacgctacacacaacgagtaaaaacccttcctgctcaagatcgtccttccaatggctgtgtgtttaaagattgtgggagcttcgctgaacgttaatgtgtagtaaatgcacctccttgtattcccactttcgtagtcatttcggttctgatcttgtcaaacccagcctgaccgcttctgacgccgggatggcctcgttactagacttttctttttaaggaagtgctgtttttttttgagggttttcaaaacattttgaaaagcatttacttttttgaccacgagccatgagttttcaaaaaaatcgggggttgtgtgggtttttggtttttgttttagtttttggttgcgttgcctttttttttttagtggggttggccccatgaagtgggtgccccactcacttctctgagatcgaacggactgtgaatccgctctttgtcggaagctgagcaagctgtggcttttttccaactccgtgtgacgtttctgagtgtagtgtggtaggaccccggcgggtgtggcagcaactgccctggagccccagcccctgcgtccatctgtgctgtgcgccccacagtagacgtgcagacgtccctgagaggttcttgaagatgtttatttatattgtccttttttactggaagacgtacgcatactccatcgatgttgtatttgcagtggctgaggaattcttgtacgcagttttctttggctttacgaagccgattaaaagaccgtgtgaaatgaaccttgctctgacaattcccttgcattgcaccacacactccttgctgcgggctcctgcagccagacctgagcagagagagaaggtggagaagcagcgggtctgcaagccttccctggggcctgcagagctagaaagggaggcccagcagactggcgctggtcagggtaggggagccaggcgggggacgggagcgggcagctcaggcctcagggcagccctgggaggcttctggcagtggtggccagagggctggactgtgcgggcagcttagcagggacagtggacgtgcacctgacgctgacctggactgcctcagtctagaagcaggccagagagcagaggcacgtggcatcccagggcgacctcagacggccagccggttagctagttctgctgttgcttcacgagttctgagcattctctgctagcctatggaagctgcagccctcggaggacagaagtgttgtgcgcccaacagaaccctctgagacgcaagctgctcccttggctagctcatatgtggaaatagccctgtaattcgaggtaactccttccgctcgtgtccacatccctcttgttgagagctcactgaaagtcatgtgcccggggaatgttcctgtgactgttttttgtttttccttttttttttaactttgtttttgtttttttcaattaagctggaactaaagtcaggcccagccattacgctccccacgtgcagccaggtgcagcctgggcccagtcatgcctggctcatagatgaaatcccttaagcaggattgaagaccagtgaacgcccccgccttttggattttttgctcaattgaccgtcttttccagacctctttaagtcacactcttaacttagctttctctgatgtctgttgccgccattagtttttttctagagcccacactggcccacatagctccatcccatacgggtagctggctccagctgcgccaaggtgcagacccgccctgggcatgctggcctgtgacggagcctgaggtcacagccccctgactagcctgagaccttcctaggggctgtggctgtttccggggaggccgggaggggcagctgtgagccctgtggaggacgttgggagtaacgctgctttgctttggcaggttgaaggggcccggccaggactcggggaagggtggcctgagagcagcgatgacctctggggtcactgtcccaggagggacttcacctggaacaagagctggaggcagccgcttgcccaggaggcttgtcccctgaggcgcttcgccagtgaggtgcgggctcagggcctcgagtctctcctggagcacgggctgcggtgcgccggcagcttacggggcggccagtccttgcccacaacgatgtggagccctgtgaaagtcggattcgaataaagggccacgtgtgcacccagaaa

SEQ ID NO: 445973 - DNA, 2977 bp, Homo sapiens
gacccgccctcactcgcgcgttaggaggctcgggtcgttgtggtgcgctgtcttcccgcttgcgtcagggacctgcccgactcagtggccgccatggcatcagatgaaggcaaactttttgttggagggctgagttttgacaccaatgagcagtcgctggagcaggtcttctcaaagtacggacagatctctgaagtggtggttgtgaaagacagggagacccagagatctcggggatttgggtttgtcacctttgagaacattgacgacgctaaggatgccatgatggccatgaatgggaagtctgtagatggacggcagatccgagtagaccaggcaggcaagtcgtcagacaaccgatcccgtgggtaccgtggtggctctgccgggggccggggcttcttccgtgggggccgaggacggggccgtgggttctctagaggaggaggggaccgaggctatggggggaaccggttcgagtccaggagtgggggctacggaggctccagagactactatagcagccggagtcagagtggtggctacagtgaccggagctcgggcgggtcctacagagacagttacgacagttacgctacacacaacgagtaaaaacccttcctgctcaagatcgtccttccaatggctgtgtgtttaaagattgtgggagcttcgctgaacgttaatgtgtagtaaatgcacctccttgtattcccactttcgtagtcatttcggttctgatcttgtcaaacccagcctgaccgcttctgacgccgggatggcctcgttactagacttttctttttaaggaagtgctgtttttttttgagggttttcaaaacattttgaaaagcatttacttttttgaccacgagccatgagttttcaaaaaaatcgggggttgtgtgggtttttggtttttgttttagtttttggttgcgttgcctttttttttttagtggggttggccccatgaagtgggtgccccactcacttctctgagatcgaacggactgtgaatccgctctttgtcggaagctgagcaagctgtggcttttttccaactccgtgtgacgtttctgagtgtagtgtggtaggaccccggcgggtgtggcagcaactgccctggagccccagcccctgcgtccatctgtgctgtgcgccccacagtagacgtgcagacgtccctgagaggttcttgaagatgtttatttatattgtccttttttactggaagacgtacgcatactccatcgatgttgtatttgcagtggctgaggaattcttgtacgcagttttctttggctttacgaagccgattaaaagaccgtgtgaaatgaaccttgctctgacaattcccttgcattgcaccacacactccttgctgcgggctcctgcagccagacctgagcagagagagaaggtggagaagcagcgggtctgcaagccttccctggggcctgcagagctagaaagggaggcccagcagactggcgctggtcagggtaggggagccaggcgggggacgggagcgggcagctcaggcctcagggcagccctgggaggcttctggcagtggtggccagagggctggactgtgcgggcagcttagcagggacagtggacgtgcacctgacgctgacctggactgcctcagtctagaagcaggccagagagcagaggcacgtggcatcccagggcgacctcagacggccagccggttagctagttctgctgttgcttcacgagttctgagcattctctgctagcctatggaagctgcagccctcggaggacagaagtgttgtgcgcccaacagaaccctctgagacgcaagctgctcccttggctagctcatatgtggaaatagccctgtaattcgaggtaactccttccgctcgtgtccacatccctcttgttgagagctcactgaaagtcatgtgcccggggaatgttcctgtgactgttttttgtttttccttttttttttaactttgtttttgtttttttcaattaagctggaactaaagtcaggcccagccattacgctccccacgtgcagccaggtgcagcctgggcccagtcatgcctggctcatagatgaaatcccttaagcaggattgaagaccagtgaacgcccccgccttttggattttttgctcaattgaccgtcttttccagacctctttaagtcacactcttaacttagctttctctgatgtctgttgccgccattagtttttttctagagcccacactggcccacatagctccatcccatacgggtagctggctccagctgcgccaaggtgcagacccgccctgggcatgctggcctgtgacggagcctgaggtcacagccccctgactagcctgagaccttcctaggggctgtggctgtttccggggaggccgggaggggcagctgtgagccctgtggaggacgttgggagtaacgctgctttgctttggcaggttgaaggggcccggccaggactcggggaagggtggcctgagagcagcgatgacctctggggtcactgtcccaggagggacttcacctggaacaagagctggaggcagccgcttgcccaggaggcttgtcccctgtaagtgctttcgggaagagtggcatgtggcgctgagccctgtcccgggcggcacctgggcgtttcagtgagtcctgctctcccgcacctatggccccacggcgggcgcctttcggtgtgtgttgggtgcagggcagcgcctcccgggagcgccgggtccctcgcctggagcccgcgcctgttctccctcccttcctcctccttccgaggcgcttcgccagtgaggtgcgggctcagggcctcgagtctctcctggagcacgggctgcggtgcgccggcagcttacggggcggccagtccttgcccacaacgatgtggagccctgtgaaagtcggattcgaataaagggccacgtgtgcacccagaaa

SEQ ID NO: 445974 - DNA, 3625 bp, Homo sapiens
gacccgccctcactcgcgcgttaggaggctcgggtcgttgtggtgcgctgtcttcccgcttgcgtcagggacctgcccgactcagtggccgccatggcatcagatgaaggcaaactttttgttggagggctgagttttgacaccaatgagcagtcgctggagcaggtcttctcaaagtacggacagatctctgaagtggtggttgtgaaagacagggagacccagagatctcggggatttgggtttgtcacctttgagaacattgacgacgctaaggatgccatgatggccatgaatgggaagtctgtagatggacggcagatccgagtagaccaggcaggcaagtcgtcagacaaccgatcccgtgggtaccgtggtggctctgccgggggccggggcttcttccgtgggggccgaggacggggccgtgggttctctagaggaggaggggaccgaggctatggggggaaccggttcgagtccaggagtgggggctacggaggctccagagactactatagcagccggagtcagagtggtggctacagtgaccggagctcgggcgggtcctacagagacagttacgacagttacgctacacacaacgagtaaaaacccttcctgctcaagatcgtccttccaatggctgtgtgtttaaagattgtgggagcttcgctgaacgttaatgtgtagtaaatgcacctccttgtattcccactttcgtagtcatttcggttctgatcttgtcaaacccagcctgaccgcttctgacgccgggatggcctcgttactagacttttctttttaaggaagtgctgtttttttttgagggttttcaaaacattttgaaaagcatttacttttttgaccacgagccatgagttttcaaaaaaatcgggggttgtgtgggtttttggtttttgttttagtttttggttgcgttgcctttttttttttagtggggttggccccatgaagtgggtgccccactcacttctctgagatcgaacggactgtgaatccgctctttgtcggaagctgagcaagctgtggcttttttccaactccgtgtgacgtttctgagtgtagtgtggtaggaccccggcgggtgtggcagcaactgccctggagccccagcccctgcgtccatctgtgctgtgcgccccacagtagacgtgcagacgtccctgagaggttcttgaagatgtttatttatattgtccttttttactggaagacgtacgcatactccatcgatgttgtatttgcagtggctgaggaattcttgtacgcagttttctttggctttacgaagccgattaaaagaccgtgtgaaatgaaccttgctctgacaattcccttgcattgcaccacacactccttgctgcgggctcctgcagccagacctgagcagagagagaaggtggagaagcagcgggtctgcaagccttccctggggcctgcagagctagaaagggaggcccagcagactggcgctggtcagggtaggggagccaggcgggggacgggagcgggcagctcaggcctcagggcagccctgggaggcttctggcagtggtggccagagggctggactgtgcgggcagcttagcagggacagtggacgtgcacctgacgctgacctggactgcctcagtctagaagcaggccagagagcagaggcacgtggcatcccagggcgacctcagacggccagccggttagctagttctgctgttgcttcacgagttctgagcattctctgctagcctatggaagctgcagccctcggaggacagaagtgttgtgcgcccaacagaaccctctgagacgcaagctgctcccttggctagctcatatgtggaaatagccctgtaattcgaggtaactccttccgctcgtgtccacatccctcttgttgagagctcactgaaagtcatgtgcccggggaatgttcctgtgactgttttttgtttttccttttttttttaactttgtttttgtttttttcaattaagctggaactaaagtcaggcccagccattacgctccccacgtgcagccaggtgcagcctgggcccagtcatgcctggctcatagatgaaatcccttaagcaggattgaagaccagtgaacgcccccgccttttggattttttgctcaattgaccgtcttttccagacctctttaagtcacactcttaacttagctttctctgatgtctgttgccgccattagtttttttctagagcccacactggcccacatagctccatcccatacgggtagctggctccagctgcgccaaggtgcagacccgccctgggcatgctggcctgtgacggagcctgaggtcacagccccctgactagcctgagaccttcctaggggctgtggctgtttccggggaggccgggaggggcagctgtgagccctgtggaggacgttgggagtaacgctgctttgctttggcaggttgaaggggcccggccaggactcggggaagggtggcctgagagcagcgatgacctctggggtcactgtcccaggagggacttcacctggaacaagagctggaggcagccgcttgcccaggaggcttgtcccctgtaagtgctttcgggaagagtggcatgtggcgctgagccctgtcccgggcggcacctgggcgtttcagtgagtcctgctctcccgcacctatggccccacggcgggcgcctttcggtgtgtgttgggtgcagggcagcgcctcccgggagcgccgggtccctcgcctggagcccgcgcctgttctccctcccttcctcctccttccgaggcgcttcgccagtgaggtgcgggctcagggcctcgagtctctcctggagcacgggctgcggtgcgccggcagcttacggggcggccagtccttgcccacaacgatgtggagccctgtgaaagtcggattcgaataaagggccacgtgtgcacccagaaagccgagtctgtggttcaggggggtctgtcggcggagcggggccactggaagaaaagcctgcggacctcggttcagcgcacgagtaggacccgacagggaagactgcaagggtcattgtccgagcagtgaccgcggggggctcgccactgagggggttcgcagcgcggagactccagtctcgcgggatctgaggcgcactcggcttcgagggagcggcggccgcgcagccgctgtcaggccccgtcttgggccgagtcccgggttccctgtagcaggcttgggagcggggcgccaccttcctgggccctggacgtggccgacgcgttctcagtgtccgtgaggccggggcaggagtggcgggggtcgccccgaagtgggtgggaatgagcggcccgaggtcctgaagtcggggtccgccccgtctccccgctgccagcccgatttcctcggaagccgcgaccccccacgctgggctggcagttctgggctctgccggctgcgccttgccgggactcccacgggcgggctccgggcctccgtcctgatcccttggagcggttcgacgaagcaagttccgcggcgggcgcgcggggcactgtgggtagcgccggggctcaccaggcggaggcggggcccggcgtcaagctc

SEQ ID NO: 445975 - DNA, 2263 bp, Homo sapiens
  misc_feature (2223)..(2223): n is a, c, g, or t
gacccgccctcactcgcgcgttaggaggctcgggtcgttgtggtgcgctgtcttcccgcttgcgtcagggacctgcccgactcagtggccgccatggcatcagatgaaggcaaactttttgttggagggctgagttttgacaccaatgagcagtcgctggagcaggtcttctcaaagtacggacagatctctgaagtggtggttgtgaaagacagggagacccagagatctcggggatttgggtttgtcacctttgagaacattgacgacgctaaggatgccatgatggccatgaatgggaagtctgtagatggacggcagatccgagtagaccaggcaggcaagtcgtcagacaaccgatcccgtgggtaccgtggtggctctgccgggggccggggcttcttccgtgggggccgaggacggggccgtgggttctctagaggaggaggggaccgaggctatggggggaaccggttcgagtccaggagtgggggctacggaggctccagagactactatagcagccggagtcagagtggtggctacagtgaccggagctcgggcgggtcctacagagacagttacgacagttacgctacacacaacgagtaaaaacccttcctgctcaagatcgtccttccaatggctgtgtgtttaaagattgtgggagcttcgctgaacgttaatgtgtagtaaatgcacctccttgtattcccactttcgtagtcatttcggttctgatcttgtcaaacccagcctgaccgcttctgacgccgggatggcctcgttactagacttttctttttaaggaagtgctgtttttttttgagggttttcaaaacattttgaaaagcatttacttttttgaccacgagccatgagttttcaaaaaaatcgggggttgtgtgggtttttggtttttgttttagtttttggttgcgttgcctttttttttttagtggggttggccccatgaagtgggtgccccactcacttctctgagatcgaacggactgtgaatccgctctttgtcggaagctgagcaagctgtggcttttttccaactccgtgtgacgtttctgagtgtagtgtggtaggaccccggcgggtgtggcagcaactgccctggagccccagcccctgcgtccatctgtgctgtgcgccccacagtagacgtgcagacgtccctgagaggttcttgaagatgtttatttatattgtccttttttactggaagacgtacgcatactccatcgatgttgtatttgcagtggctgaggaattcttgtacgcagttttctttggctttacgaagccgattaaaagaccgtgtgaaatgaaccttgctctgacaattcccttgcattgcaccacacactccttgctgcgggctcctgcagccagacctgagcagagagagaaggtggagaagcagcgggtctgcaagccttccctggggcctgcagagctagaaagggaggcccagcagactggcgctggtcagggtaggggagccaggcgggggacgggagcgggcagctcaggcctcagggcagccctgggaggcttctggcagtggtggccagagggctggactgtgcgggcagcttagcagggacagtggacgtgcacctgacgctgacctggactgcctcagtctagaagcaggccagagagcagaggcacgtggcatcccagggcgacctcagacggccagccggttagctagttctgctgttgcttcacgagttctgagcattctctgctagcctatggaagctgcagccctcggaggacagaagtgttgtgcgcccaacagaaccctctgagacgcaagctgctcccttggctagctcatatgtggaaatagccctgtaattcgaggtaactccttccgctcgtgtccacatccctcttgttgagagctcactgaaagtcatgtgcccggggaatgttcctgtgactgttttttgtttttccttttttttttaactttgtttttgtttttttcaattaagctggaactaaagtcaggcccagccattacgctccccacgtgcagccaggtgcagcctgggcccagtcatgcctggctcatagatgaaatcccttaagcaggattgaagaccagtgaacgcccccgccttttggattttttgctcaattgaccgtcttttccagacctctttaagtcacactcttaacttagctttctctgatgtnagtgcccgccaatcgaagggtcctctagctcggacagcag

SEQ ID NO: 445976 - DNA, 2180 bp, Homo sapiens
gacccgccctcactcgcgcgttaggaggctcgggtcgttgtggtgcgctgtcttcccgcttgcgtcagggacctgcccgactcagtggccgccatggcatcagatgaaggcaaactttttgttggagggctgagttttgacaccaatgagcagtcgctggagcaggtcttctcaaagtacggacagatctctgaagtggtggttgtgaaagacagggagacccagagatctcggggatttgggtttgtcacctttgagaacattgacgacgctaaggatgccatgatggccatgaatgggaagtctgtagatggacggcagatccgagtagaccaggcaggcaagtcgtcagacaaccgatcccgtgggtaccgtggtggctctgccgggggccggggcttcttccgtgggggccgaggacggggccgtgggttctctagaggaggaggggaccgaggctatggggggaaccggttcgagtccaggagtgggggctacggaggctccagagactactatagcagccggagtcagagtggtggctacagtgaccggagctcgggcgggtcctacagagacagttacgacagttacgctacacacaacgagtaaaaacccttcctgctcaagatcgtccttccaatggctgtgtgtttaaagattgtgggagcttcgctgaacgttaatgtgtagtaaatgcacctccttgtattcccactttcgtagtcatttcggttctgatcttgtcaaacccagcctgaccgcttctgacgccgggatggcctcgttactagacttttctttttaaggaagtgctgtttttttttgagggttttcaaaacattttgaaaagcatttacttttttgaccacgagccatgagttttcaaaaaaatcgggggttgtgtgggtttttggtttttgttttagtttttggttgcgttgcctttttttttttagtggggttggccccatgaagtgggtgccccactcacttctctgagatcgaacggactgtgaatccgctctttgtcggaagctgagcaagctgtggcttttttccaactccgtgtgacgtttctgagtgtagtgtggtaggaccccggcgggtgtggcagcaactgccctggagccccagcccctgcgtccatctgtgctgtgcgccccacagtagacgtgcagacgtccctgagaggttcttgaagatgtttatttatattgtccttttttactggaagacgtacgcatactccatcgatgttgtatttgcagtggctgaggaattcttgtacgcagttttctttggctttacgaagccgattaaaagaccgtgtgaaatgaaccttgctctgacaattcccttgcattgcaccacacactccttgctgcgggctcctgcagccagacctgagcagagagagaaggtggagaagcagcgggtctgcaagccttccctggggcctgcagagctagaaagggaggcccagcagactggcgctggtcagggtaggggagccaggcgggggacgggagcgggcagctcaggcctcagggcagccctgggaggcttctggcagtggtggccagagggctggactgtgcgggcagcttagcagggacagtggacgtgcacctgacgctgacctggactgcctcagtctagaagcaggccagagagcagaggcacgtggcatcccagggcgacctcagacggccagccggttagctagttctgctgttgcttcacgagttctgagcattctctgctagcctatggaagctgcagccctcggaggacagaagtgttgtgcgcccaacagaaccctctgagacgcaagctgctcccttggctagctcatatgtggaaatagccctgtaattcgaggttgaaggggcccggccaggactcggggaagggtggcctgagagcagcgatgacctctggggtcactgtcccaggagggacttcacctggaacaagagctggaggcagccgcttgcccaggaggcttgtcccctgaggcgcttcgccagtgaggtgcgggctcagggcctcgagtctctcctggagcacgggctgcggtgcgccggcagcttacggggcggccagtccttgcccacaacgatgtggagccctgtgaaagtcggattcgaataaagggccacgtgtgcacccagaaa

SEQ ID NO: 445977 - DNA, 1453 bp, Homo sapiens
gacccgccctcactcgcgcgttaggaggctcgggtcgttgtggtgcgctgtcttcccgcttgcgtcagggacctgcccgactcagtggccgccatggcatcagatgaaggcaaactttttgttggagggctgagttttgacaccaatgagcagtcgctggagcaggtcttctcaaagtacggacagatctctgaagtggtggttgtgaaagacagggagacccagagatctcggggatttgggtttgtcacctttgagaacattgacgacgctaaggatgccatgatggccatgaatgggaagtctgtagatggacggcagatccgagtagaccaggcaggcaagtcgtcagacaaccgatcccgtgggtaccgtggtggctctgccgggggccggggcttcttccgtgggggccgaggacggggccgtgggttctctagaggaggaggggaccgaggctatggggggaaccggttcgagtccaggagtgggggctacggaggctccagagactactatagcagccggagtcagagtggtggctacagtgaccggagctcgggcgggtcctacagagacagttacgacagttacgctacacacaacgagtaaaaacccttcctgctcaagatcgtccttccaatggctgtgtgtttaaagattgtgggagcttcgctgaacgttaatgtgtagtaaatgcacctccttgtattcccactttcgtagtcatttcggttctgatcttgtcaaacccagcctgaccgcttctgacgccgggatggcctcgttactagacttttctttttaaggaagtgctgtttttttttgagggttttcaaaacattttgaaaagcatttacttttttgaccacgagccatgagttttcaaaaaaatcgggggttgtgtgggtttttggtttttgttttagtttttggttgcgttgcctttttttttttagtggggttggccccatgaagtgggtgccccactcacttctctgagatcgaacggactgtgaatccgctctttgtcggaagctgagcaagctgtggcttttttccaactccgtgtgacgtttctgagtgtagtgtggtaggaccccggcgggtgtggcagcaactgccctggagccccagcccctgcgtccatctgtgctgtgcgccccacagtagacgtgcagacgtccctgagaggttcttgaagcgatgacctctggggtcactgtcccaggagggacttcacctggaacaagagctggaggcagccgcttgcccaggaggcttgtcccctgaggcgcttcgccagtgaggtgcgggctcagggcctcgagtctctcctggagcacgggctgcggtgcgccggcagcttacggggcggccagtccttgcccacaacgatgtggagccctgtgaaagtcggattcgaataaagggccacgtgtgcacccagaaa

SEQ ID NO: 445978 - DNA, 2831 bp, Homo sapiens
gacccgccctcactcgcgcgttaggaggctcgggtcgttgtggtgcgctgtcttcccgcttgcgtcagggacctgcccgactcagtggaagcggggagaggtggtgagagatgacccctgttgaggatttcattggtgtctgccacagccgccatggcatcagatgaaggcaaactttttgttggagggctgagttttgacaccaatgagcagtcgctggagcaggtcttctcaaagtacggacagatctctgaagtggtggttgtgaaagacagggagacccagagatctcggggatttgggtttgtcacctttgagaacattgacgacgctaaggatgccatgatggccatgaatgggaagtctgtagatggacggcagatccgagtagaccaggcaggcaagtcgtcagacaaccgatcccgtgggtaccgtggtggctctgccgggggccggggcttcttccgtgggggccgaggacggggccgtgggttctctagaggaggaggggaccgaggctatggggggaaccggttcgagtccaggagtgggggctacggaggctccagagactactatagcagccggagtcagagtggtggctacagtgaccggagctcgggcgggtcctacagagacagttacgacagttacgctacacacaacgagtaaaaacccttcctgctcaagatcgtccttccaatggctgtgtgtttaaagattgtgggagcttcgctgaacgttaatgtgtagtaaatgcacctccttgtattcccactttcgtagtcatttcggttctgatcttgtcaaacccagcctgaccgcttctgacgccgggatggcctcgttactagacttttctttttaaggaagtgctgtttttttttgagggttttcaaaacattttgaaaagcatttacttttttgaccacgagccatgagttttcaaaaaaatcgggggttgtgtgggtttttggtttttgttttagtttttggttgcgttgcctttttttttttagtggggttggccccatgaagtgggtgccccactcacttctctgagatcgaacggactgtgaatccgctctttgtcggaagctgagcaagctgtggcttttttccaactccgtgtgacgtttctgagtgtagtgtggtaggaccccggcgggtgtggcagcaactgccctggagccccagcccctgcgtccatctgtgctgtgcgccccacagtagacgtgcagacgtccctgagaggttcttgaagatgtttatttatattgtccttttttactggaagacgtacgcatactccatcgatgttgtatttgcagtggctgaggaattcttgtacgcagttttctttggctttacgaagccgattaaaagaccgtgtgaaatgaaccttgctctgacaattcccttgcattgcaccacacactccttgctgcgggctcctgcagccagacctgagcagagagagaaggtggagaagcagcgggtctgcaagccttccctggggcctgcagagctagaaagggaggcccagcagactggcgctggtcagggtaggggagccaggcgggggacgggagcgggcagctcaggcctcagggcagccctgggaggcttctggcagtggtggccagagggctggactgtgcgggcagcttagcagggacagtggacgtgcacctgacgctgacctggactgcctcagtctagaagcaggccagagagcagaggcacgtggcatcccagggcgacctcagacggccagccggttagctagttctgctgttgcttcacgagttctgagcattctctgctagcctatggaagctgcagccctcggaggacagaagtgttgtgcgcccaacagaaccctctgagacgcaagctgctcccttggctagctcatatgtggaaatagccctgtaattcgaggtaactccttccgctcgtgtccacatccctcttgttgagagctcactgaaagtcatgtgcccggggaatgttcctgtgactgttttttgtttttccttttttttttaactttgtttttgtttttttcaattaagctggaactaaagtcaggcccagccattacgctccccacgtgcagccaggtgcagcctgggcccagtcatgcctggctcatagatgaaatcccttaagcaggattgaagaccagtgaacgcccccgccttttggattttttgctcaattgaccgtcttttccagacctctttaagtcacactcttaacttagctttctctgatgtctgttgccgccattagtttttttctagagcccacactggcccacatagctccatcccatacgggtagctggctccagctgcgccaaggtgcagacccgccctgggcatgctggcctgtgacggagcctgaggtcacagccccctgactagcctgagaccttcctaggggctgtggctgtttccggggaggccgggaggggcagctgtgagccctgtggaggacgttgggagtaacgctgctttgctttggcaggttgaaggggcccggccaggactcggggaagggtggcctgagagcagcgatgacctctggggtcactgtcccaggagggacttcacctggaacaagagctggaggcagccgcttgcccaggaggcttgtcccctgaggcgcttcgccagtgaggtgcgggctcagggcctcgagtctctcctggagcacgggctgcggtgcgccggcagcttacggggcggccagtccttgcccacaacgatgtggagccctgtgaaagtcggattcgaataaagggccacgtgtgcacccagaaa

SEQ ID NO: 445979 - DNA, 2790 bp, Homo sapiens
atgaaggggtcccagccgcctgagacccccggtggggacacaggatcgcggtgagatacctgggagtcacgggtgctcgcagacgcagctgaccccagaggcacaggccgccatggcatcagatgaaggcaaactttttgttggagggctgagttttgacaccaatgagcagtcgctggagcaggtcttctcaaagtacggacagatctctgaagtggtggttgtgaaagacagggagacccagagatctcggggatttgggtttgtcacctttgagaacattgacgacgctaaggatgccatgatggccatgaatgggaagtctgtagatggacggcagatccgagtagaccaggcaggcaagtcgtcagacaaccgatcccgtgggtaccgtggtggctctgccgggggccggggcttcttccgtgggggccgaggacggggccgtgggttctctagaggaggaggggaccgaggctatggggggaaccggttcgagtccaggagtgggggctacggaggctccagagactactatagcagccggagtcagagtggtggctacagtgaccggagctcgggcgggtcctacagagacagttacgacagttacgctacacacaacgagtaaaaacccttcctgctcaagatcgtccttccaatggctgtgtgtttaaagattgtgggagcttcgctgaacgttaatgtgtagtaaatgcacctccttgtattcccactttcgtagtcatttcggttctgatcttgtcaaacccagcctgaccgcttctgacgccgggatggcctcgttactagacttttctttttaaggaagtgctgtttttttttgagggttttcaaaacattttgaaaagcatttacttttttgaccacgagccatgagttttcaaaaaaatcgggggttgtgtgggtttttggtttttgttttagtttttggttgcgttgcctttttttttttagtggggttggccccatgaagtgggtgccccactcacttctctgagatcgaacggactgtgaatccgctctttgtcggaagctgagcaagctgtggcttttttccaactccgtgtgacgtttctgagtgtagtgtggtaggaccccggcgggtgtggcagcaactgccctggagccccagcccctgcgtccatctgtgctgtgcgccccacagtagacgtgcagacgtccctgagaggttcttgaagatgtttatttatattgtccttttttactggaagacgtacgcatactccatcgatgttgtatttgcagtggctgaggaattcttgtacgcagttttctttggctttacgaagccgattaaaagaccgtgtgaaatgaaccttgctctgacaattcccttgcattgcaccacacactccttgctgcgggctcctgcagccagacctgagcagagagagaaggtggagaagcagcgggtctgcaagccttccctggggcctgcagagctagaaagggaggcccagcagactggcgctggtcagggtaggggagccaggcgggggacgggagcgggcagctcaggcctcagggcagccctgggaggcttctggcagtggtggccagagggctggactgtgcgggcagcttagcagggacagtggacgtgcacctgacgctgacctggactgcctcagtctagaagcaggccagagagcagaggcacgtggcatcccagggcgacctcagacggccagccggttagctagttctgctgttgcttcacgagttctgagcattctctgctagcctatggaagctgcagccctcggaggacagaagtgttgtgcgcccaacagaaccctctgagacgcaagctgctcccttggctagctcatatgtggaaatagccctgtaattcgaggtaactccttccgctcgtgtccacatccctcttgttgagagctcactgaaagtcatgtgcccggggaatgttcctgtgactgttttttgtttttccttttttttttaactttgtttttgtttttttcaattaagctggaactaaagtcaggcccagccattacgctccccacgtgcagccaggtgcagcctgggcccagtcatgcctggctcatagatgaaatcccttaagcaggattgaagaccagtgaacgcccccgccttttggattttttgctcaattgaccgtcttttccagacctctttaagtcacactcttaacttagctttctctgatgtctgttgccgccattagtttttttctagagcccacactggcccacatagctccatcccatacgggtagctggctccagctgcgccaaggtgcagacccgccctgggcatgctggcctgtgacggagcctgaggtcacagccccctgactagcctgagaccttcctaggggctgtggctgtttccggggaggccgggaggggcagctgtgagccctgtggaggacgttgggagtaacgctgctttgctttggcaggttgaaggggcccggccaggactcggggaagggtggcctgagagcagcgatgacctctggggtcactgtcccaggagggacttcacctggaacaagagctggaggcagccgcttgcccaggaggcttgtcccctgaggcgcttcgccagtgaggtgcgggctcagggcctcgagtctctcctggagcacgggctgcggtgcgccggcagcttacggggcggccagtccttgcccacaacgatgtggagccctgtgaaagtcggattcgaataaagggccacgtgtgcacccagaaa

SEQ ID NO: 445980 - DNA, 3078 bp, Homo sapiens
gacccgccctcactcgcgcgttaggaggctcgggtcgttgtggtgcgctgtcttcccgcttgcgtcagggacctgcccgactcagtggccgccatggcatcagatgaaggcaaactttttgttggagggctgagttttgacaccaatgagcagtcgctggagcaggtcttctcaaagtacggacagatctctgaagtggtggttgtgaaagacagggagacccagagatctcggggatttgggtttgtcacctttgagaacattgacgacgctaaggatgccatgatggccatgaatgggaagtctgtagatggacggcagatccgagtagaccaggcaggcaagtcgtcagacaaccgatcccgtgggtaccgtggtggctctgccgggggccggggcttcttccgtgggggccgaggacggggccgtgggttctctagaggaggaggggaccgaggctatggggggaaccggttcgagtccaggagtgggggctacggaggctccagagactactatagcagccggagtcagagtggtggctacagtgaccggagctcgggcgggtcctacagagacagttacgacagttacggtaagtcacactccgagggcgccacgctgctgtggcctgcggtgggagctcggttcaccttggtgccctctccaagcactttaggctggacactcagaccttgtcactgtgcttgcccagaagaggcgcatctgtcctctcagagccatttctatcgcaggacgcaaaagccaaatgagactgaccaaaaaggcaagggagagcgagggcccgctgggcagtcagctaggtgcatgtgtggcctctggggtgaagctgcctcttgttgcttcggtgcctttacactgtgcctgcttcttgtcctcagctacacacaacgagtaaaaacccttcctgctcaagatcgtccttccaatggctgtgtgtttaaagattgtgggagcttcgctgaacgttaatgtgtagtaaatgcacctccttgtattcccactttcgtagtcatttcggttctgatcttgtcaaacccagcctgaccgcttctgacgccgggatggcctcgttactagacttttctttttaaggaagtgctgtttttttttgagggttttcaaaacattttgaaaagcatttacttttttgaccacgagccatgagttttcaaaaaaatcgggggttgtgtgggtttttggtttttgttttagtttttggttgcgttgcctttttttttttagtggggttggccccatgaagtgggtgccccactcacttctctgagatcgaacggactgtgaatccgctctttgtcggaagctgagcaagctgtggcttttttccaactccgtgtgacgtttctgagtgtagtgtggtaggaccccggcgggtgtggcagcaactgccctggagccccagcccctgcgtccatctgtgctgtgcgccccacagtagacgtgcagacgtccctgagaggttcttgaagatgtttatttatattgtccttttttactggaagacgtacgcatactccatcgatgttgtatttgcagtggctgaggaattcttgtacgcagttttctttggctttacgaagccgattaaaagaccgtgtgaaatgaaccttgctctgacaattcccttgcattgcaccacacactccttgctgcgggctcctgcagccagacctgagcagagagagaaggtggagaagcagcgggtctgcaagccttccctggggcctgcagagctagaaagggaggcccagcagactggcgctggtcagggtaggggagccaggcgggggacgggagcgggcagctcaggcctcagggcagccctgggaggcttctggcagtggtggccagagggctggactgtgcgggcagcttagcagggacagtggacgtgcacctgacgctgacctggactgcctcagtctagaagcaggccagagagcagaggcacgtggcatcccagggcgacctcagacggccagccggttagctagttctgctgttgcttcacgagttctgagcattctctgctagcctatggaagctgcagccctcggaggacagaagtgttgtgcgcccaacagaaccctctgagacgcaagctgctcccttggctagctcatatgtggaaatagccctgtaattcgaggtaactccttccgctcgtgtccacatccctcttgttgagagctcactgaaagtcatgtgcccggggaatgttcctgtgactgttttttgtttttccttttttttttaactttgtttttgtttttttcaattaagctggaactaaagtcaggcccagccattacgctccccacgtgcagccaggtgcagcctgggcccagtcatgcctggctcatagatgaaatcccttaagcaggattgaagaccagtgaacgcccccgccttttggattttttgctcaattgaccgtcttttccagacctctttaagtcacactcttaacttagctttctctgatgtctgttgccgccattagtttttttctagagcccacactggcccacatagctccatcccatacgggtagctggctccagctgcgccaaggtgcagacccgccctgggcatgctggcctgtgacggagcctgaggtcacagccccctgactagcctgagaccttcctaggggctgtggctgtttccggggaggccgggaggggcagctgtgagccctgtggaggacgttgggagtaacgctgctttgctttggcaggttgaaggggcccggccaggactcggggaagggtggcctgagagcagcgatgacctctggggtcactgtcccaggagggacttcacctggaacaagagctggaggcagccgcttgcccaggaggcttgtcccctgaggcgcttcgccagtgaggtgcgggctcagggcctcgagtctctcctggagcacgggctgcggtgcgccggcagcttacggggcggccagtccttgcccacaacgatgtggagccctgtgaaagtcggattcgaataaagggccacgtgtgcacccagaaa

SEQ ID NO: 445981 - DNA, 2853 bp, Homo sapiens
gacccgccctcactcgcgcgttaggaggctcgggtcgttgtggtgcgctgtcttcccgcttgcgtcagggacctgcccgactcagtggccgccatggcatcagatgaaggcaaactttttgttggagggctgagttttgacaccaatgagcagtcgctggagcaggtcttctcaaagtacggacagatctctgaagtggtggttgtgaaagacagggagacccagagatctcggggatttgggtttgtcacctttgagaacattgacgacgctaaggatgccatgatggccatgaatgggaaggtgaggatcagggtgctgagcaggagtctcgtctcgaggatggggcacccacctgctaacccgtcccgccctctgtctccagtctgtagatggacggcagatccgagtagaccaggcaggcaagtcgtcagacaaccgatcccgtgggtaccgtggtggctctgccgggggccggggcttcttccgtgggggccgaggacggggccgtgggttctctagaggaggaggggaccgaggctatggggggaaccggttcgagtccaggagtgggggctacggaggctccagagactactatagcagccggagtcagagtggtggctacagtgaccggagctcgggcgggtcctacagagacagttacgacagttacgctacacacaacgagtaaaaacccttcctgctcaagatcgtccttccaatggctgtgtgtttaaagattgtgggagcttcgctgaacgttaatgtgtagtaaatgcacctccttgtattcccactttcgtagtcatttcggttctgatcttgtcaaacccagcctgaccgcttctgacgccgggatggcctcgttactagacttttctttttaaggaagtgctgtttttttttgagggttttcaaaacattttgaaaagcatttacttttttgaccacgagccatgagttttcaaaaaaatcgggggttgtgtgggtttttggtttttgttttagtttttggttgcgttgcctttttttttttagtggggttggccccatgaagtgggtgccccactcacttctctgagatcgaacggactgtgaatccgctctttgtcggaagctgagcaagctgtggcttttttccaactccgtgtgacgtttctgagtgtagtgtggtaggaccccggcgggtgtggcagcaactgccctggagccccagcccctgcgtccatctgtgctgtgcgccccacagtagacgtgcagacgtccctgagaggttcttgaagatgtttatttatattgtccttttttactggaagacgtacgcatactccatcgatgttgtatttgcagtggctgaggaattcttgtacgcagttttctttggctttacgaagccgattaaaagaccgtgtgaaatgaaccttgctctgacaattcccttgcattgcaccacacactccttgctgcgggctcctgcagccagacctgagcagagagagaaggtggagaagcagcgggtctgcaagccttccctggggcctgcagagctagaaagggaggcccagcagactggcgctggtcagggtaggggagccaggcgggggacgggagcgggcagctcaggcctcagggcagccctgggaggcttctggcagtggtggccagagggctggactgtgcgggcagcttagcagggacagtggacgtgcacctgacgctgacctggactgcctcagtctagaagcaggccagagagcagaggcacgtggcatcccagggcgacctcagacggccagccggttagctagttctgctgttgcttcacgagttctgagcattctctgctagcctatggaagctgcagccctcggaggacagaagtgttgtgcgcccaacagaaccctctgagacgcaagctgctcccttggctagctcatatgtggaaatagccctgtaattcgaggtaactccttccgctcgtgtccacatccctcttgttgagagctcactgaaagtcatgtgcccggggaatgttcctgtgactgttttttgtttttccttttttttttaactttgtttttgtttttttcaattaagctggaactaaagtcaggcccagccattacgctccccacgtgcagccaggtgcagcctgggcccagtcatgcctggctcatagatgaaatcccttaagcaggattgaagaccagtgaacgcccccgccttttggattttttgctcaattgaccgtcttttccagacctctttaagtcacactcttaacttagctttctctgatgtctgttgccgccattagtttttttctagagcccacactggcccacatagctccatcccatacgggtagctggctccagctgcgccaaggtgcagacccgccctgggcatgctggcctgtgacggagcctgaggtcacagccccctgactagcctgagaccttcctaggggctgtggctgtttccggggaggccgggaggggcagctgtgagccctgtggaggacgttgggagtaacgctgctttgctttggcaggttgaaggggcccggccaggactcggggaagggtggcctgagagcagcgatgacctctggggtcactgtcccaggagggacttcacctggaacaagagctggaggcagccgcttgcccaggaggcttgtcccctgaggcgcttcgccagtgaggtgcgggctcagggcctcgagtctctcctggagcacgggctgcggtgcgccggcagcttacggggcggccagtccttgcccacaacgatgtggagccctgtgaaagtcggattcgaataaagggccacgtgtgcacccagaaa

SEQ ID NO: 445982 - DNA, 2453 bp, Homo sapiens
agtcatgggcaacgcatcgttcaggaacagaacgcggaaatccgcaggtggtggcgtggtggctctgccgggggccggggcttcttccgtgggggccgaggacggggccgtgggttctctagaggaggaggggaccgaggctatggggggaaccggttcgagtccaggagtgggggctacggaggctccagagactactatagcagccggagtcagagtggtggctacagtgaccggagctcgggcgggtcctacagagacagttacgacagttacgctacacacaacgagtaaaaacccttcctgctcaagatcgtccttccaatggctgtgtgtttaaagattgtgggagcttcgctgaacgttaatgtgtagtaaatgcacctccttgtattcccactttcgtagtcatttcggttctgatcttgtcaaacccagcctgaccgcttctgacgccgggatggcctcgttactagacttttctttttaaggaagtgctgtttttttttgagggttttcaaaacattttgaaaagcatttacttttttgaccacgagccatgagttttcaaaaaaatcgggggttgtgtgggtttttggtttttgttttagtttttggttgcgttgcctttttttttttagtggggttggccccatgaagtgggtgccccactcacttctctgagatcgaacggactgtgaatccgctctttgtcggaagctgagcaagctgtggcttttttccaactccgtgtgacgtttctgagtgtagtgtggtaggaccccggcgggtgtggcagcaactgccctggagccccagcccctgcgtccatctgtgctgtgcgccccacagtagacgtgcagacgtccctgagaggttcttgaagatgtttatttatattgtccttttttactggaagacgtacgcatactccatcgatgttgtatttgcagtggctgaggaattcttgtacgcagttttctttggctttacgaagccgattaaaagaccgtgtgaaatgaaccttgctctgacaattcccttgcattgcaccacacactccttgctgcgggctcctgcagccagacctgagcagagagagaaggtggagaagcagcgggtctgcaagccttccctggggcctgcagagctagaaagggaggcccagcagactggcgctggtcagggtaggggagccaggcgggggacgggagcgggcagctcaggcctcagggcagccctgggaggcttctggcagtggtggccagagggctggactgtgcgggcagcttagcagggacagtggacgtgcacctgacgctgacctggactgcctcagtctagaagcaggccagagagcagaggcacgtggcatcccagggcgacctcagacggccagccggttagctagttctgctgttgcttcacgagttctgagcattctctgctagcctatggaagctgcagccctcggaggacagaagtgttgtgcgcccaacagaaccctctgagacgcaagctgctcccttggctagctcatatgtggaaatagccctgtaattcgaggtaactccttccgctcgtgtccacatccctcttgttgagagctcactgaaagtcatgtgcccggggaatgttcctgtgactgttttttgtttttccttttttttttaactttgtttttgtttttttcaattaagctggaactaaagtcaggcccagccattacgctccccacgtgcagccaggtgcagcctgggcccagtcatgcctggctcatagatgaaatcccttaagcaggattgaagaccagtgaacgcccccgccttttggattttttgctcaattgaccgtcttttccagacctctttaagtcacactcttaacttagctttctctgatgtctgttgccgccattagtttttttctagagcccacactggcccacatagctccatcccatacgggtagctggctccagctgcgccaaggtgcagacccgccctgggcatgctggcctgtgacggagcctgaggtcacagccccctgactagcctgagaccttcctaggggctgtggctgtttccggggaggccgggaggggcagctgtgagccctgtggaggacgttgggagtaacgctgctttgctttggcaggttgaaggggcccggccaggactcggggaagggtggcctgagagcagcgatgacctctggggtcactgtcccaggagggacttcacctggaacaagagctggaggcagccgcttgcccaggaggcttgtcccctgaggcgcttcgccagtgaggtgcgggctcagggcctcgagtctctcctggagcacgggctgcggtgcgccggcagcttacggggcggccagtccttgcccacaacgatgtggagccctgtgaaagtcggattcgaataaagggccacgtgtgcacccagaaa

SEQ ID NO: 445983 - DNA, 3206 bp, Homo sapiens
gacccgccctcactcgcgcgttaggaggctcgggtcgttgtggtgcgctgtcttcccgcttgcgtcagggacctgcccgactcagtggaagcggggagaggtggtgagagatgacccctgttgaggatttcattggtgtctgccacagccgccatggcatcagatgaaggcaaactttttgttggagggctgagttttgacaccaatgagcagtcgctggagcaggtcttctcaaagtacggacagatctctgaagtggtggttgtgaaagacagggagacccagagatctcggggatttgggtttgtcacctttgagaacattgacgacgctaaggatgccatgatggccatgaatgggaagtctgtagatggacggcagatccgagtagaccaggcaggcaagtcgtcagacaaccgatcccgtgggtaccgtggtggctctgccgggggccggggcttcttccgtgggggccgaggacggggccgtgggttctctagaggaggaggggaccgaggctatggggggaaccggttcgagtccaggagtgggggctacggaggctccagagactactatagcagccggagtcagagtggtggctacagtgaccggagctcgggcgggtcctacagagacagttacgacagttacggtaagtcacactccgagggcgccacgctgctgtggcctgcggtgggagctcggttcaccttggtgccctctccaagcactttaggctggacactcagaccttgtcactgtgcttgcccagaagaggcgcatctgtcctctcagagccatttctatcgcaggacgcaaaagccaaatgagactgaccaaaaaggcaagggagagcgagggcccgctgggcagtcagctaggtgcatgtgtggccgcaggccagcctccctcggctgtggggggtggttgctccccggccgcaggccgcgccctggtctggcctctggggtgaagctgcctcttgttgcttcggtgcctttacactgtgcctgcttcttgtcctcagctacacacaacgagtaaaaacccttcctgctcaagatcgtccttccaatggctgtgtgtttaaagattgtgggagcttcgctgaacgttaatgtgtagtaaatgcacctccttgtattcccactttcgtagtcatttcggttctgatcttgtcaaacccagcctgaccgcttctgacgccgggatggcctcgttactagacttttctttttaaggaagtgctgtttttttttgagggttttcaaaacattttgaaaagcatttacttttttgaccacgagccatgagttttcaaaaaaatcgggggttgtgtgggtttttggtttttgttttagtttttggttgcgttgcctttttttttttagtggggttggccccatgaagtgggtgccccactcacttctctgagatcgaacggactgtgaatccgctctttgtcggaagctgagcaagctgtggcttttttccaactccgtgtgacgtttctgagtgtagtgtggtaggaccccggcgggtgtggcagcaactgccctggagccccagcccctgcgtccatctgtgctgtgcgccccacagtagacgtgcagacgtccctgagaggttcttgaagatgtttatttatattgtccttttttactggaagacgtacgcatactccatcgatgttgtatttgcagtggctgaggaattcttgtacgcagttttctttggctttacgaagccgattaaaagaccgtgtgaaatgaaccttgctctgacaattcccttgcattgcaccacacactccttgctgcgggctcctgcagccagacctgagcagagagagaaggtggagaagcagcgggtctgcaagccttccctggggcctgcagagctagaaagggaggcccagcagactggcgctggtcagggtaggggagccaggcgggggacgggagcgggcagctcaggcctcagggcagccctgggaggcttctggcagtggtggccagagggctggactgtgcgggcagcttagcagggacagtggacgtgcacctgacgctgacctggactgcctcagtctagaagcaggccagagagcagaggcacgtggcatcccagggcgacctcagacggccagccggttagctagttctgctgttgcttcacgagttctgagcattctctgctagcctatggaagctgcagccctcggaggacagaagtgttgtgcgcccaacagaaccctctgagacgcaagctgctcccttggctagctcatatgtggaaatagccctgtaattcgaggtaactccttccgctcgtgtccacatccctcttgttgagagctcactgaaagtcatgtgcccggggaatgttcctgtgactgttttttgtttttccttttttttttaactttgtttttgtttttttcaattaagctggaactaaagtcaggcccagccattacgctccccacgtgcagccaggtgcagcctgggcccagtcatgcctggctcatagatgaaatcccttaagcaggattgaagaccagtgaacgcccccgccttttggattttttgctcaattgaccgtcttttccagacctctttaagtcacactcttaacttagctttctctgatgtctgttgccgccattagtttttttctagagcccacactggcccacatagctccatcccatacgggtagctggctccagctgcgccaaggtgcagacccgccctgggcatgctggcctgtgacggagcctgaggtcacagccccctgactagcctgagaccttcctaggggctgtggctgtttccggggaggccgggaggggcagctgtgagccctgtggaggacgttgggagtaacgctgctttgctttggcaggttgaaggggcccggccaggactcggggaagggtggcctgagagcagcgatgacctctggggtcactgtcccaggagggacttcacctggaacaagagctggaggcagccgcttgcccaggaggcttgtcccctgaggcgcttcgccagtgaggtgcgggctcagggcctcgagtctctcctggagcacgggctgcggtgcgccggcagcttacggggcggccagtccttgcccacaacgatgtggagccctgtgaaagtcggattcgaataaagggccacgtgtgcacccagaaa

SEQ ID NO: 445984 - DNA, 3039 bp, Homo sapiens
gacccgccctcactcgcgcgttaggaggctcgggtcgttgtggtgcgctgtcttcccgcttgcgtcagggacctgcccgactcagtggccgccatggcatcagatgaaggcaaactttttgttggagggctgagttttgacaccaatgagcagtcgctggagcaggtcttctcaaagtacggacagatctctgaagtctgtagatggacggcagatccgagtagaccaggcaggcaagtcgtcagacaaccgatcccgtgggtaccgtggtggctctgccgggggccggggcttcttccgtgggggccgaggacggggccgtgggttctctagaggaggaggggaccgaggctatggggggaaccggttcgagtccaggagtgggggctacggaggctccagagactactatagcagccggagtcagagtggtggctacagtgaccggagctcgggcgggtcctacagagacagttacgacagttacggtaagtcacactccgagggcgccacgctgctgtggcctgcggtgggagctcggttcaccttggtgccctctccaagcactttaggctggacactcagaccttgtcactgtgcttgcccagaagaggcgcatctgtcctctcagagccatttctatcgcaggacgcaaaagccaaatgagactgaccaaaaaggcaagggagagcgagggcccgctgggcagtcagctaggtgcatgtgtggccgcaggccagcctccctcggctgtggggggtggttgctccccggccgcaggccgcgccctggtctggcctctggggtgaagctgcctcttgttgcttcggtgcctttacactgtgcctgcttcttgtcctcagctacacacaacgagtaaaaacccttcctgctcaagatcgtccttccaatggctgtgtgtttaaagattgtgggagcttcgctgaacgttaatgtgtagtaaatgcacctccttgtattcccactttcgtagtcatttcggttctgatcttgtcaaacccagcctgaccgcttctgacgccgggatggcctcgttactagacttttctttttaaggaagtgctgtttttttttgagggttttcaaaacattttgaaaagcatttacttttttgaccacgagccatgagttttcaaaaaaatcgggggttgtgtgggtttttggtttttgttttagtttttggttgcgttgcctttttttttttagtggggttggccccatgaagtgggtgccccactcacttctctgagatcgaacggactgtgaatccgctctttgtcggaagctgagcaagctgtggcttttttccaactccgtgtgacgtttctgagtgtagtgtggtaggaccccggcgggtgtggcagcaactgccctggagccccagcccctgcgtccatctgtgctgtgcgccccacagtagacgtgcagacgtccctgagaggttcttgaagatgtttatttatattgtccttttttactggaagacgtacgcatactccatcgatgttgtatttgcagtggctgaggaattcttgtacgcagttttctttggctttacgaagccgattaaaagaccgtgtgaaatgaaccttgctctgacaattcccttgcattgcaccacacactccttgctgcgggctcctgcagccagacctgagcagagagagaaggtggagaagcagcgggtctgcaagccttccctggggcctgcagagctagaaagggaggcccagcagactggcgctggtcagggtaggggagccaggcgggggacgggagcgggcagctcaggcctcagggcagccctgggaggcttctggcagtggtggccagagggctggactgtgcgggcagcttagcagggacagtggacgtgcacctgacgctgacctggactgcctcagtctagaagcaggccagagagcagaggcacgtggcatcccagggcgacctcagacggccagccggttagctagttctgctgttgcttcacgagttctgagcattctctgctagcctatggaagctgcagccctcggaggacagaagtgttgtgcgcccaacagaaccctctgagacgcaagctgctcccttggctagctcatatgtggaaatagccctgtaattcgaggtaactccttccgctcgtgtccacatccctcttgttgagagctcactgaaagtcatgtgcccggggaatgttcctgtgactgttttttgtttttccttttttttttaactttgtttttgtttttttcaattaagctggaactaaagtcaggcccagccattacgctccccacgtgcagccaggtgcagcctgggcccagtcatgcctggctcatagatgaaatcccttaagcaggattgaagaccagtgaacgcccccgccttttggattttttgctcaattgaccgtcttttccagacctctttaagtcacactcttaacttagctttctctgatgtctgttgccgccattagtttttttctagagcccacactggcccacatagctccatcccatacgggtagctggctccagctgcgccaaggtgcagacccgccctgggcatgctggcctgtgacggagcctgaggtcacagccccctgactagcctgagaccttcctaggggctgtggctgtttccggggaggccgggaggggcagctgtgagccctgtggaggacgttgggagtaacgctgctttgctttggcaggttgaaggggcccggccaggactcggggaagggtggcctgagagcagcgatgacctctggggtcactgtcccaggagggacttcacctggaacaagagctggaggcagccgcttgcccaggaggcttgtcccctgaggcgcttcgccagtgaggtgcgggctcagggcctcgagtctctcctggagcacgggctgcggtgcgccggcagcttacggggcggccagtccttgcccacaacgatgtggagccctgtgaaagtcggattcgaataaagggccacgtgtgcacccagaaa

SEQ ID NO: 445985 - DNA, 2299 bp, Homo sapiens
  misc_feature (22)..(22): n is a, c, g, or t
tgtttatcgatgccaccactcnggtacggaggctcagagactactatagcagccggagtcagagtggtggctacagtgaccggagctcgggcgggtcctacagagacagttacgacagttacgctacacacaacgagtaaaaacccttcctgctcaagatcgtccttccaatggctgtgtgtttaaagattgtgggagcttcgctgaacgttaatgtgtagtaaatgcacctccttgtattcccactttcgtagtcatttcggttctgatcttgtcaaacccagcctgaccgcttctgacgccgggatggcctcgttactagacttttctttttaaggaagtgctgtttttttttgagggttttcaaaacattttgaaaagcatttacttttttgaccacgagccatgagttttcaaaaaaatcgggggttgtgtgggtttttggtttttgttttagtttttggttgcgttgcctttttttttttagtggggttggccccatgaagtgggtgccccactcacttctctgagatcgaacggactgtgaatccgctctttgtcggaagctgagcaagctgtggcttttttccaactccgtgtgacgtttctgagtgtagtgtggtaggaccccggcgggtgtggcagcaactgccctggagccccagcccctgcgtccatctgtgctgtgcgccccacagtagacgtgcagacgtccctgagaggttcttgaagatgtttatttatattgtccttttttactggaagacgtacgcatactccatcgatgttgtatttgcagtggctgaggaattcttgtacgcagttttctttggctttacgaagccgattaaaagaccgtgtgaaatgaaccttgctctgacaattcccttgcattgcaccacacactccttgctgcgggctcctgcagccagacctgagcagagagagaaggtggagaagcagcgggtctgcaagccttccctggggcctgcagagctagaaagggaggcccagcagactggcgctggtcagggtaggggagccaggcgggggacgggagcgggcagctcaggcctcagggcagccctgggaggcttctggcagtggtggccagagggctggactgtgcgggcagcttagcagggacagtggacgtgcacctgacgctgacctggactgcctcagtctagaagcaggccagagagcagaggcacgtggcatcccagggcgacctcagacggccagccggttagctagttctgctgttgcttcacgagttctgagcattctctgctagcctatggaagctgcagccctcggaggacagaagtgttgtgcgcccaacagaaccctctgagacgcaagctgctcccttggctagctcatatgtggaaatagccctgtaattcgaggtaactccttccgctcgtgtccacatccctcttgttgagagctcactgaaagtcatgtgcccggggaatgttcctgtgactgttttttgtttttccttttttttttaactttgtttttgtttttttcaattaagctggaactaaagtcaggcccagccattacgctccccacgtgcagccaggtgcagcctgggcccagtcatgcctggctcatagatgaaatcccttaagcaggattgaagaccagtgaacgcccccgccttttggattttttgctcaattgaccgtcttttccagacctctttaagtcacactcttaacttagctttctctgatgtctgttgccgccattagtttttttctagagcccacactggcccacatagctccatcccatacgggtagctggctccagctgcgccaaggtgcagacccgccctgggcatgctggcctgtgacggagcctgaggtcacagccccctgactagcctgagaccttcctaggggctgtggctgtttccggggaggccgggaggggcagctgtgagccctgtggaggacgttgggagtaacgctgctttgctttggcaggttgaaggggcccggccaggactcggggaagggtggcctgagagcagcgatgacctctggggtcactgtcccaggagggacttcacctggaacaagagctggaggcagccgcttgcccaggaggcttgtcccctgaggcgcttcgccagtgaggtgcgggctcagggcctcgagtctctcctggagcacgggctgcggtgcgccggcagcttacggggcggccagtccttgcccacaacgatgtggagccctgtgaaagtcggattcgaataaagggccacgtgtgcacccagaaa

SEQ ID NO: 445986 - DNA, 2647 bp, Homo sapiens
gacccgccctcactcgcgcgttaggaggctcgggtcgttgtggtgcgctgtcttcccgcttgcgtcagggacctgcccgactcagtggccgccatggcatcagatgaaggcaaactttttgttggagggctgagttttgacaccaatgagcagtcgctggagcaggtcttctcaaagtacggacagatctctgaagtggtggttgtgaaagacagggagacccagagatctcggggatttgggtttgtcacctttgagaacattgacgacgctaaggatgccatgatggccatgaatgggaagtctgtagatggacggcagatccgagtagaccaggcaggcaagtcgtcagacaaccgatcccgtgggtaccgtggtggctctgccgggggccggggcttcttccgtgggggccgaggacggggccgtgggttctctagaggaggaggggaccgaggctatggggggaaccggttcgagtccaggagtgggggctacggaggctccagagactactatagcagccggagtcagagtggtggctacagtgaccggagctcgggcgggtcctacagagacagttacgacagttacgctacacacaatctttaaacacacagccattggaaggacgatcttgagtctgacgccgggatggcctcgttactagacttttctttttaaggaagtgctgtttttttttgagggttttcaaaacattttgaaaagcatttacttttttgaccacgagccatgagttttcaaaaaaatcgggggttgtgtgggtttttggtttttgttttagtttttggttgcgttgcctttttttttttagtggggttggccccatgaagtgggtgccccactcacttctctgagatcgaacggactgtgaatccgctctttgtcggaagctgagcaagctgtggcttttttccaactccgtgtgacgtttctgagtgtagtgtggtaggaccccggcgggtgtggcagcaactgccctggagccccagcccctgcgtccatctgtgctgtgcgccccacagtagacgtgcagacgtccctgagaggttcttgaagatgtttatttatattgtccttttttactggaagacgtacgcatactccatcgatgttgtatttgcagtggctgaggaattcttgtacgcagttttctttggctttacgaagccgattaaaagaccgtgtgaaatgaaccttgctctgacaattcccttgcattgcaccacacactccttgctgcgggctcctgcagccagacctgagcagagagagaaggtggagaagcagcgggtctgcaagccttccctggggcctgcagagctagaaagggaggcccagcagactggcgctggtcagggtaggggagccaggcgggggacgggagcgggcagctcaggcctcagggcagccctgggaggcttctggcagtggtggccagagggctggactgtgcgggcagcttagcagggacagtggacgtgcacctgacgctgacctggactgcctcagtctagaagcaggccagagagcagaggcacgtggcatcccagggcgacctcagacggccagccggttagctagttctgctgttgcttcacgagttctgagcattctctgctagcctatggaagctgcagccctcggaggacagaagtgttgtgcgcccaacagaaccctctgagacgcaagctgctcccttggctagctcatatgtggaaatagccctgtaattcgaggtaactccttccgctcgtgtccacatccctcttgttgagagctcactgaaagtcatgtgcccggggaatgttcctgtgactgttttttgtttttccttttttttttaactttgtttttgtttttttcaattaagctggaactaaagtcaggcccagccattacgctccccacgtgcagccaggtgcagcctgggcccagtcatgcctggctcatagatgaaatcccttaagcaggattgaagaccagtgaacgcccccgccttttggattttttgctcaattgaccgtcttttccagacctctttaagtcacactcttaacttagctttctctgatgtctgttgccgccattagtttttttctagagcccacactggcccacatagctccatcccatacgggtagctggctccagctgcgccaaggtgcagacccgccctgggcatgctggcctgtgacggagcctgaggtcacagccccctgactagcctgagaccttcctaggggctgtggctgtttccggggaggccgggaggggcagctgtgagccctgtggaggacgttgggagtaacgctgctttgctttggcaggttgaaggggcccggccaggactcggggaagggtggcctgagagcagcgatgacctctggggtcactgtcccaggagggacttcacctggaacaagagctggaggcagccgcttgcccaggaggcttgtcccctgaggcgcttcgccagtgaggtgcgggctcagggcctcgagtctctcctggagcacgggctgcggtgcgccggcagcttacggggcggccagtccttgcccacaacgatgtggagccctgtgaaagtcggattcgaataaagggccacgtgtgcacccagaaa

SEQ ID NO: 445987 - DNA, 1222 bp, Homo sapiens
gacccgccctcactcgcgcgttaggaggctcgggtcgttgtggtgcgctgtcttcccgcttgcgtcagggacctgcccgactcagtggccgccatggcatcagatgaaggcaaactttttgttggagggctgagttttgacaccaatgagcagtcgctggagcaggtcttctcaaagtacggacagatctctgaagtggtggttgtgaaagacagggagacccagagatctcggggatttgggtttgtcacctttgagaacattgacgacgctaaggatgccatgatggccatgaatgggaagtctgtagatggacggcagatccgagtagaccaggcaggcaagtcgtcagacaaccgatcccgtgggtaccgtggtggctctgccgggggccggggcttcttccgtgggggccgaggacggggccgtgggttctctagaggaggaggggaccgaggctatggggggaaccggttcgagtccaggagtgggggctacggaggctccagagactactatagcagccggagtcagagtggtggctacagtgaccggagctcgggcgggtcctacagagacagttacgacagttacgctacacacaacgagtaaaaacccttcctgctcaagatcgtccttccaatggctgtgtgtttaaagattgtgggagcttcgctgaacgttaatgtgtagtaaatgcacctccttgtattcccactttcgtagtcatttcggttctgatcttgtcaaacccagcctgaccgctcctagaccccttcctaagaccctaagggtcttagggagagacagggaatgtagtttaagaaaagcaagcatttatgtctgccagtgttctcaaatgagctcatgtatgaagtgggacatggaactcgctgacctttatttggcctctgcattcagactacctggggttgaattctaactcctctgccttctgactttatgagcttgggctgtttacctaacttctcagggtgtcttagtctatttttggtttcttataacagaatacctgaaacttggcaatttatgaggaaaaggaattcatttcttacagttatggaggctgagaagttcaaggtccaggggcataacaggtgagagccttcttactgtcgaggactctgctagagtcccaaggtagtacagggggtgagggggctgatacgctagctgagtctctcttcatcctcttataagc

SEQ ID NO: 445988 - DNA, 1964 bp, Homo sapiens
gacccgccctcactcgcgcgttaggaggctcgggtcgttgtggtgcgctgtcttcccgcttgcgtcagggacctgcccgactcagtggccgccatggcatcagatgaaggcaaactttttgttggagggctgagttttgacaccaatgagcagtcgctggagcaggtcttctcaaagtacggacagatctctgaagtggtggttgtgaaagacagggagacccagagatctcggggatttgggtttgtcacctttgagaacattgacgacgctaaggatgccatgatggccatgaatgggaagtctgtagatggacggcagatccgagtagaccagcgtccatctgtgctgtgcgccccacagtagacgtgcagacgtccctgagaggttcttgaagatgtttatttatattgtccttttttactggaagacgtacgcatactccatcgatgttgtatttgcagtggctgaggaattcttgtacgcagttttctttggctttacgaagccgattaaaagaccgtgtgaaatgaaccttgctctgacaattcccttgcattgcaccacacactccttgctgcgggctcctgcagccagacctgagcagagagagaaggtggagaagcagcgggtctgcaagccttccctggggcctgcagagctagaaagggaggcccagcagactggcgctggtcagggtaggggagccaggcgggggacgggagcgggcagctcaggcctcagggcagccctgggaggcttctggcagtggtggccagagggctggactgtgcgggcagcttagcagggacagtggacgtgcacctgacgctgacctggactgcctcagtctagaagcaggccagagagcagaggcacgtggcatcccagggcgacctcagacggccagccggttagctagttctgctgttgcttcacgagttctgagcattctctgctagcctatggaagctgcagccctcggaggacagaagtgttgtgcgcccaacagaaccctctgagacgcaagctgctcccttggctagctcatatgtggaaatagccctgtaattcgaggtaactccttccgctcgtgtccacatccctcttgttgagagctcactgaaagtcatgtgcccggggaatgttcctgtgactgttttttgtttttccttttttttttaactttgtttttgtttttttcaattaagctggaactaaagtcaggcccagccattacgctccccacgtgcagccaggtgcagcctgggcccagtcatgcctggctcatagatgaaatcccttaagcaggattgaagaccagtgaacgcccccgccttttggattttttgctcaattgaccgtcttttccagacctctttaagtcacactcttaacttagctttctctgatgtctgttgccgccattagtttttttctagagcccacactggcccacatagctccatcccatacgggtagctggctccagctgcgccaaggtgcagacccgccctgggcatgctggcctgtgacggagcctgaggtcacagccccctgactagcctgagaccttcctaggggctgtggctgtttccggggaggccgggaggggcagctgtgagccctgtggaggacgttgggagtaacgctgctttgctttggcaggttgaaggggcccggccaggactcggggaagggtggcctgagagcagcgatgacctctggggtcactgtcccaggagggacttcacctggaacaagagctggaggcagccgcttgcccaggaggcttgtcccctgaggcgcttcgccagtgaggtgcgggctcagggcctcgagtctctcctggagcacgggctgcggtgcgccggcagcttacggggcggccagtccttgcccacaacgatgtggagccctgtgaaagtcggattcgaataaagggccacgtgtgcacccagaaa

SEQ ID NO: 445989 - DNA, 1899 bp, Homo sapiens
gacccgccctcactcgcgcgttaggaggctcgggtcgttgtggtgcgctgtcttcccgcttgcgtcagggacctgcccgactcagtggccgccatggcatcagatgaaggcaaactttttgttggagggctgagttttgacaccaatgagcagtcgctggagcaggtcttctcaaagtacggacagatctctgaagtggtggttgtgaaagacagggagacccagagatctcggggatttgggtttgtcacctttgagaacattgacgacgctaaggatgccatgatggccatgaatgggaagcgtccatctgtgctgtgcgccccacagtagacgtgcagacgtccctgagaggttcttgaaagacgtacgcatactccatcgatgttgtatttgcagtggctgaggaattcttgtacgcagttttctttggctttacgaagccgattaaaagaccgtgtgaaatgaaccttgctctgacaattcccttgcattgcaccacacactccttgctgcgggctcctgcagccagacctgagcagagagagaaggtggagaagcagcgggtctgcaagccttccctggggcctgcagagctagaaagggaggcccagcagactggcgctggtcagggtaggggagccaggcgggggacgggagcgggcagctcaggcctcagggcagccctgggaggcttctggcagtggtggccagagggctggactgtgcgggcagcttagcagggacagtggacgtgcacctgacgctgacctggactgcctcagtctagaagcaggccagagagcagaggcacgtggcatcccagggcgacctcagacggccagccggttagctagttctgctgttgcttcacgagttctgagcattctctgctagcctatggaagctgcagccctcggaggacagaagtgttgtgcgcccaacagaaccctctgagacgcaagctgctcccttggctagctcatatgtggaaatagccctgtaattcgaggtaactccttccgctcgtgtccacatccctcttgttgagagctcactgaaagtcatgtgcccggggaatgttcctgtgactgttttttgtttttccttttttttttaactttgtttttgtttttttcaattaagctggaactaaagtcaggcccagccattacgctccccacgtgcagccaggtgcagcctgggcccagtcatgcctggctcatagatgaaatcccttaagcaggattgaagaccagtgaacgcccccgccttttggattttttgctcaattgaccgtcttttccagacctctttaagtcacactcttaacttagctttctctgatgtctgttgccgccattagtttttttctagagcccacactggcccacatagctccatcccatacgggtagctggctccagctgcgccaaggtgcagacccgccctgggcatgctggcctgtgacggagcctgaggtcacagccccctgactagcctgagaccttcctaggggctgtggctgtttccggggaggccgggaggggcagctgtgagccctgtggaggacgttgggagtaacgctgctttgctttggcaggttgaaggggcccggccaggactcggggaagggtggcctgagagcagcgatgacctctggggtcactgtcccaggagggacttcacctggaacaagagctggaggcagccgcttgcccaggaggcttgtcccctgaggcgcttcgccagtgaggtgcgggctcagggcctcgagtctctcctggagcacgggctgcggtgcgccggcagcttacggggcggccagtccttgcccacaacgatgtggagccctgtgaaagtcggattcgaataaagggccacgtgtgcacccagaaa

SEQ ID NO: 445990 - DNA, 1060 bp, Homo sapiens
gacccgccctcactcgcgcgttaggaggctcgggtcgttgtggtgcgctgtcttcccgcttgcgtcagggacctgcccgactcagtggccgccatggcatcagatgaaggcaaactttttgttggagggctgagttttgacaccaatgagcagtcgctggagcaggtcttctcaaagtacggacagatctctgaagtggtggttgtgaaagacagggagacccagagatctcggggatttgggtttgtcacctttgagaacattgacgacgctaaggatgccatgatggccatgaatgggaagtctgtagatggacggcagatccgagtagaccaggcaggcaagtcgtcagacaaccgatcccgtgggtaccgtggtggctctgccgggggccggggcttcttccgtgggggccgaggacggggccgtgggttctctagaggaggaggggaccgaggctatggggggaaccggttcgagtccaggagtgggggctacggaggctccagagactactatagcagccggagtcagagtggtggctacagtgaccggagctcgggcgggtcctacagagacagttacgacagttacggtaagtcacactccgagggcgccacgctgctgtggcctgcggtgggagctcggttcaccttggtgccctctccaagcactttaggctggacactcagaccttgtcactgtgcttgcccagaagaggcgcatctgtcctctcagagccatttctatcgcaggacgcaaaagccaaatgagactgaccaaaaaggcaagggagagcgagggcccgctgggcagtcagctaggtgcatgtgtggccgcaggccagcctccctcggctggagcccgcgcctgttctccctcccttcctcctccttccgaggcgcttcgccagtgaggtgcgggctcagggcctcgagtctctcctggagcacgggctgcggtgcgccggcagcttacggggcggccagtccttgcccacaacgatgtggagccctgtgaaagtcggattcgaataaagggccacgtgtgcacccagaaa

SEQ ID NO: 445991 - DNA, 1113 bp, Homo sapiens
gacccgccctcactcgcgcgttaggaggctcgggtcgttgtggtgcgctgtcttcccgcttgcgtcagggacctgcccgactcagtggccgccatggcatcagatgaaggcaaactttttgttggagggctgagttttgacaccaatgagcagtcgctggagcaggtcttctcaaagtacggacagatctctgaagtggtggttgtgaaagacagggagacccagagatctcggggatttgggtttgtcacctttgagaacattgacgacgctaaggatgccatgatggccatgaatgggaagtctgtagatggacggcagatccgagtagaccaggcaggcaagtcgtcagacaaccgatcccgtgggtaccgtggtggctctgccgggggccggggcttcttccgtgggggccgaggacggggccgtgggttctctagaggaggaggggaccgaggctatggggggaaccggttcgagtccaggagtgggggctacggaggctccagagactactatagcagccggagtcagagtggtggctacagtgaccggagctcgggcgggtcctacagagacagttacgacagttacgaagcaggccagagagcagaggcacgtggcatcccagggcgacctcagacggccagccggttagctagttctgctgttgcttcacgagttctgagcattctctgctagcctatggaagctgcagccctcggaggacagaagtgttgtgcgcccaacagaaccctctgagacgcaagctgctcccttggctagctcatatgtggaaatagccctgtaattcgaggttgaaggggcccggccaggactcggggaagggtggcctgagagcagcgatgacctctggggtcactgtcccaggagggacttcacctggaacaagagctggaggcagccgcttgcccaggaggcttgtcccctgaggcgcttcgccagtgaggtgcgggctcagggcctcgagtctctcctggagcacgggctgcggtgcgccggcagcttacggggcggccagtccttgcccacaacgatgtggagccctgtgaaagtcggattcgaataaagggccacgtgtgcacccagaaa

SEQ ID NO: 445992 - DNA, 1157 bp, Homo sapiens
gacccgccctcactcgcgcgttaggaggctcgggtcgttgtggtgcgctgtcttcccgcttgcgtcagggacctgcccgactcagtggaagcggggagaggtggtgagagatgacccctgttgaggatttcattggtgtctgccacagccgccatggcatcagatgaaggcaaactttttgttggagggctgagttttgacaccaatgagcagtcgctggagcaggtcttctcaaagtacggacagatctctgaagtggtggttgtgaaagacagggagacccagagatctcggggatttgggtttgtcacctttgagaacattgacgacgctaaggatgccatgatggccatgaatgggaagtctgtagatggacggcagatccgagtagaccaggcaggcaagtcgtcagacaaccgatcccgtgggtaccgtggtggctctgccgggggccggggcttcttccgtgggggccgaggacggggccgtgggttctctagaggaggaggggaccgaggctatggggggaaccggttcgagtccaggagtgggggctacggaggctccagagactactatagcagccggagtcagagtggtggctacagtgaccggagctcgggcgggtcctacagagacagttacgacagttacggttgaaggggcccggccaggactcggggaagggtggcctgagagcagcgatgacctctggggtcactgtcccaggagggacttcacctggaacaagagctggaggcagccgcttgcccaggaggcttgtcccctgtaagtgctttcgggaagagtggcatgtggcgctgagccctgtcccgggcggcacctgggcgtttcagtgagtcctgctctcccgcacctatggccccacggcgggcgcctttcggtgtgtgttgggtgcagggcagcgcctcccgggagcgccgggtccctcgcctggagcccgcgcctgttctccctcccttcctcctccttccgaggcgcttcgccagtgaggtgcgggctcagggcctcgagtctctcctggagcacgggctgcggtgcgccggcagcttacggggcggccagtccttgcccacaacgatgtggagccctgtgaaagtcggattcgaataaagggccacgtgtgcacccagaaa

SEQ ID NO: 445993 - DNA, 494 bp, Homo sapiens
ctggagcaggtcttctcaaagtacggacagatctctgaaggtgaggctgctgctgggcccgcggccctgggcgggggggcttgtgctcctcctacctggaagtacagctgggtgctgactgcagacctctctcccctgcacagtggtggttgtgaaagacagggagacccagagatctcggggatttgggtttgtcacctttgagaacattgacgacgctaaggatgccatgatggccatgaatgggaaggtgaggatcagggtgctgagcaggagtctcgtctcgaggatggggcacccacctgctaacccgtcccgccctctgtctccagtctgtagatggacggcagatccgagtagaccaggcaggcaagtcgtcagacaaccgatcccgtgggtaccgtggtggctctgccgggggccggggcttcttccgtgggggccgaggacggggccgtgggttctctagaggtgagtgccatgagtgggtccct

SEQ ID NO: 445994 - DNA, 891 bp, Homo sapiens
gacccgccctcactcgcgcgttaggaggctcgggtcgttgtggtgcgctgtcttcccgcttgcgtcagggacctgcccgactcagtggccgccatggcatcagatgaaggcaaactttttgttggagggctgagttttgacaccaatgagcagtcgctggagcaggtcttctcaaagtacggacagatctctgaagtggtggttgtgaaagacagggagacccagagatctcggggatttgggtttgtcacctttgagaacattgacgacgctaaggatgccatgatggccatgaatgggaagtctgtagatggacggcagatccgagtagaccaggcaggcaagtcgtcagacaaccgatcccgtgggtaccgtggtggctctgccgggggccggggcttcttccgtgggggccgaggacggggccgtgggttctctagaggaggaggggaccgaggctatggggggaaccggttcgagtccaggagtgggggctacggaggctccagagactactatagcagccggagtcagagtggtggctacagtgaccggagctcgggcgggtcctacagagacagttacgacagttacggttgaaggggcccggccaggactcggggaagggtggcctgagagcagcgatgacctctggggtcactgtcccaggagggacttcacctggaacaagagctggaggcagccgcttgcccaggaggcttgtcccctgaggcgcttcgccagtgaggtgcgggctcagggcctcgagtctctcctggagcacgggctgcggtgcgccggcagcttacggggcggccagtccttgcccacaacgatgtggagccctgtgaaagtcggattcgaataaagggccacgtgtgcacccagaaa

SEQ ID NO: 445995 - DNA, 302 bp, Homo sapiens
  misc_feature (17)..(17): n is a, c, g, or t
aggtgatctaaggatcncataaggcgcgtttctgagtgtagtgtggtaggaccccggcgggtgtggcagcaactgccctggagccccagcccctgcgtccatctgtgctgtgcgccccacagtagacgtgcagacgtccctgagaggttcttgaagatgtttatttatattgtccttttttactggaagacgtacgcatactccatcgatgttgtatttgcagtggctgaggaattcttgtacgcagaacgcgcctaattaggcgcgttctgcgtggcgggggtgcgtcgggtctgcgagag

SEQ ID NO: 445996 - DNA, 167 bp, Homo sapiens
tactcactttttcctgtatgtgcaggaggaggggaccgaggctatggggggaaccggttcgagtccaggagtgggggctacggaggctccagagactactatagcagccggagtcagagtgtggctacagtagtctctgagcctccgtagcccccaacgaaggtaca

SEQ ID NO: 445997 - DNA, 2922 bp, Homo sapiens
gacccgccctcactcgcgcgttaggaggctcgggtcgttgtggtgcgctgtcttcccgcttgcgtcagggacctgcccgactcagtggccgccatggcatcagatgaaggcaaactttttgttggagggctgagttttgacaccaatgagcagtcgctggagcaggtcttctcaaagtacggacagatctctgaagtggtggttgtgaaagacagggagacccagagatctcggggatttgggtttgtcacctttgagaacattgacgacgctaaggatgccatgatggccatgaatgggaagtctgtagatggacggcagatccgagtagaccaggcaggcaagtcgtcagacaaccgatcccgtgggtaccgtggtggctctgccgggggccggggcttcttccgtgggggccgaggacggggccgtgggttctctagaggaggaggggaccgaggctatggggggaaccggttcgagtccaggagtgggggctacggaggctccagagactactatagcagccggagtcagagtggtggctacagtgaccggagctcgggcgggtcctacagagacagttacgacagttacgctacacacaacgagtaaaaacccttcctgctcaagatcgtccttccaatggctgtgtgtttaaagattgtgggagcttcgctgaacgttaatgtgtagtaaatgcacctccttgtattcccactttcgtagtcatttcggttctgatcttgtcaaacccagcctgaccgcttctgacgccgggatggcctcgttactagacttttctttttaaggaagtgctgtttttttttgagggttttcaaaacattttgaaaagcatttacttttttgaccacgagccatgagttttcaaaaaaatcgggggttgtgtgggtttttggtttttgttttagtttttggttgcgttgcctttttttttttagtggggttggccccatgaagtgggtgccccactcacttctctgagatcgaacggactgtgaatccgctctttgtcggaagctgagcaagctgtggcttttttccaactccgtgtgacgtttctgagtgtagtgtggtaggaccccggcgggtgtggcagcaactgccctggagccccagcccctgcgtccatctgtgctgtgcgccccacagtagacgtgcagacgtccctgagaggttcttgaagatgtttatttatattgtccttttttactggaagacgtacgcatactccatcgatgttgtatttgcagtggctgaggaattcttgtacgcagttttctttggctttacgaagccgattaaaagaccgtgtgaaatgaaccttgctctgacaattcccttgcattgcaccacacactccttgctgcgggctcctgcagccagacctgagcagagagagaaggtggagaagcagcgggtctgcaagccttccctggggcctgcagagctagaaagggaggcccagcagactggcgctggtcagggtaggggagccaggcgggggacgggagcgggcagctcaggcctcagggcagccctgggaggcttctggcagtggtggccagagggctggactgtgcgggcagcttagcagggacagtggacgtgcacctgacgctgacctggactgcctcagtctagaagcaggccagagagcagaggcacgtggcatcccagggcgacctcagacggccagccggttagctagttctgctgttgcttcacgagttctgagcattctctgctagcctatggaagctgcagccctcggaggacagaagtgttgtgcgcccaacagaaccctctgagacgcaagctgctcccttggctagctcatatgtggaaatagccctgtaattcgaggtaactccttccgctcgtgtccacatccctcttgttgagagctcactgaaagtcatgtgcccggggaatgttcctgtgactgttttttgtttttccttttttttttaactttgtttttgtttttttcaattaagctggaactaaagtcaggcccagccattacgctccccacgtgcagccaggtgcagcctgggcccagtcatgcctggctcatagatgaaatcccttaagcaggattgaagaccagtgaacgcccccgccttttggattttttgctcaattgaccgtcttttccagacctctttaagtcacactcttaacttagctttctctgatgtctgttgccgccattagtttttttctagagcccacactggcccacatagctccatcccatacgggtagctggctccagctgcgccaaggtgcagacccgccctgggcatgctggcctgtgacggagcctgaggtcacagccccctgactagcctgagaccttcctaggggctgtggctgtttccggggaggccgggaggggcagctgtgagccctgtggaggacgttgggagtaacgctgctttgctttggcaggttgaaggggcccggccaggactcggggaagggtggcctgagagcagcgatgacctctggggtcactgtcccaggagggacttcacctggaacaagagctggaggcagccgcttgcccaggaggcttgtcccctgaggcgcttcgccagtgaggtgcgggctcagggcctcgagtctctcctggagcacgggctgcggtgcgccggcagcttacggggcggccagtccttgcccacaacgatgtggagccctgtgaaagtcggattcgaataaagggccacgtgtgcacccagaaaaacacaaaacgaacacaagcaataagaaaaaaagaaacaagcaagaaaacaccaaacaataacaagcagacagaaaaaaaagaaagcacacaagacagagaaaaaaaacagcgacaggaggacaaagaaaccccgacgaaggccaaccaac

SEQ ID NO: 445998 - DNA, 2562 bp, Homo sapiens
gacccgccctcactcgcgcgttaggaggctcgggtcgttgtggtgcgctgtcttcccgcttgcgtcagggacctgcccgactcagtggccgccatggcatcagatgaaggcaaactttttgttggagggctgagttttgacaccaatgagcagtcgctggagcaggtcttctcaaagtacggacagatctctgaagtggtggttgtgaaagacagggagacccagagatctcggggatttgggtttgtcacctttgagaacattgacgacgctaaggatgccatgatggccatgaatgggaagtctgtagatggacggcagatccgagtagaccaggcaggcaagtcgtcagacaaccgatcccgtgggtaccgtggtggctctgccgggggccggggcttcttccgtgggggccgaggacggggccgtgggttctctagaggaggaggggaccgaggctatggggggaaccggttcgagtccaggagtgggggctacggaggctccagagactactatagcagccggagtcagagtggtggctacagtgaccggagctcgggcgggtcctacagagacagttacgacagttacgctacacacaacgagtaaaaacccttcctgctcaagatcgtccttccaatggctgtgtgtttaaagattgtgggagcttcgctgaacgttaatgtgtagtaaatgcacctccttgtattcccactttcgtagtcatttcggttctgatcttgtcaaacccagcctgaccgcttctgacgccgggatggcctcgttactagacttttctttttaaggaagtgctgtttttttttgagggttttcaaaacattttgaaaagcatttacttttttgaccacgagccatgagttttcaaaaaaatcgggggttgtgtgggtttttggtttttgttttagtttttggttgcgttgcctttttttttttagtggggttggccccatgaagtgggtgccccactcacttctctgagatcgaacggactgtgaatccgctctttgtcggaagctgagcaagctgtggcttttttccaactccgtgtgacgtttctgagtgtagtgtggtaggaccccggcgggtgtggcagcaactgccctggagccccagcccctgcgtccatctgtgctgtgcgccccacagtagacgtgcagacgtccctgagaggttcttgaagatgtttatttatattgtccttttttactggaagacgtacgcatactccatcgatgttgtatttgcagtggctgaggaattcttgtacgcagttttctttggctttacgaagccgattaaaagaccgtgtgaaatgaaccttgctctgacaattcccttgcattgcaccacacactccttgctgcgggctcctgcagccagacctgagcagagagagaaggtggagaagcagcgggtctgcaagccttccctggggcctgcagagctagaaagggaggcccagcagactggcgctggtcagggtaggggagccaggcgggggacgggagcgggcagctcaggcctcagggcagccctgggaggcttctggcagtggtggccagagggctggactgtgcgggcagcttagcagggacagtggacgtgcacctgacgctgacctggactgcctcagtctagaagcaggccagagagcagaggcacgtggcatcccagggcgacctcagacggccagccggttagctagttctgctgttgcttcacgagttctgagcattctctgctagcctatggaagctgcagccctcggaggacagaagtgttgtgcgcccaacagaaccctctgagacgcaagctgctcccttggctagctcatatgtggaaatagccctgtaattcgaggtaactccttccgctcgtgtccacatccctcttgttgagagctcactgaaagtcatgtgcccggggaatgttcctgtgactgttttttgtttttccttttttttttaactttgtttttgtttttttcaattaagctggaactaaagtcaggcccagccattacgctccccacgtgcagccaggtgcagcctgggcccagtcatgcctggctcatagatgaaatcccttaagcaggattgaagaccagtgaacgcccccgccttttggattttttgctcaattgaccgtcttttccagacctctttaagtcacactcttaacttagctttctctgatgtctgttgccgccattagtttttttctagagcccacactggcccacatagctccatcccatacgggtagctggctccagctgcgccaaggtgcagacccgccctgggcatgctggcctgtgacggagcctgaggtcacagccccctgactagcctgagaccttcctaggggctgtggctgtttccggggaggccgggaggggcagctgtgagccctgtggaggacgttgggagtaacgctgctttgctttggcagcttacggggcggccagtccttgcccacaacgatgtggagccctgtgaaagtcggattcgaataaagggccacgtgtgcacccagaaa

SEQ ID NO: 445999 - DNA, 2860 bp, Homo sapiens
gacccgccctcactcgcgcgttaggaggctcgggtcgttgtggtgcgctgtcttcccgcttgcgtcagggacctgcccgactcagtggccgccatggcatcagatgaaggcaaactttttgttggagggctgagttttgacaccaatgagcagtcgctggagcaggtcttctcaaagtacggacagatctctgaagtggtggttgtgaaagacagggagacccagagatctcggggatttgggtttgtcacctttgagaacattgacgacgctaaggatgccatgatggccatgaatgggaagtctgtagatggacggcagatccgagtagaccaggcaggcaagtcgtcagacaaccgatcccgtgggtaccgtggtggctctgccgggggccggggcttcttccgtgggggccgaggacggggccgtgggttctctagaggaggaggggaccgaggctatggggggaaccggttcgagtccaggagtgggggctacggaggctccagagactactatagcagccggagtcagagtggtggctacagtgaccggagctcgggcgggtcctacagagacagttacgacagttacgctacacacaacgagtaaaaacccttcctgctcaagatcgtccttccaatggctgtgtgtttaaagattgtgggagcttcgctgaacgttaatgtgtagtaaatgcacctccttgtattcccactttcgtagtcatttcggttctgatcttgtcaaacccagcctgaccgcttctgacgccgggatggcctcgttactagacttttctttttaaggaagtgctgtttttttttgagggttttcaaaacattttgaaaagcatttacttttttgaccacgagccatgagttttcaaaaaaatcgggggttgtgtgggtttttggtttttgttttagtttttggttgcgttgcctttttttttttagtggggttggccccatgaagtgggtgccccactcacttctctgagatcgaacggactgtgaatccgctctttgtcggaagctgagcaagctgtggcttttttccaactccgtgtgacgtttctgagtgtagtgtggtaggaccccggcgggtgtggcagcaactgccctggagccccagcccctgcgtccatctgtgctgtgcgccccacagtagacgtgcagacgtccctgagaggttcttgaagatgtttatttatattgtccttttttactggaagacgtacgcatactccatcgatgttgtatttgcagtggctgaggaattcttgtacgcagttttctttggctttacgaagccgattaaaagaccgtgtgaaatgaaccttgctctgacaattcccttgcattgcaccacacactccttgctgcgggctcctgcagccagacctgagcagagagagaaggtggagaagcagcgggtctgcaagccttccctggggcctgcagagctagaaagggaggcccagcagactggcgctggtcagggtaggggagccaggcgggggacgggagcgggcagctcaggcctcagggcagccctgggaggcttctggcagtggtggccagagggctggactgtgcgggcagcttagcagggacagtggacgtgcacctgacgctgacctggactgcctcagtctagaagcaggccagagagcagaggcacgtggcatcccagggcgacctcagacggccagccggttagctagttctgctgttgcttcacgagttctgagcattctctgctagcctatggaagctgcagccctcggaggacagaagtgttgtgcgcccaacagaaccctctgagacgcaagctgctcccttggctagctcatatgtggaaatagccctgtaattcgaggtaactccttccgctcgtgtccacatccctcttgttgagagctcactgaaagtcatgtgcccggggaatgttcctgtgactgttttttgtttttccttttttttttaactttgtttttgtttttttcaattaagctggaactaaagtcaggcccagccattacgctccccacgtgcagccaggtgcagcctgggcccagtcatgcctggctcatagatgaaatcccttaagcaggattgaagaccagtgaacgcccccgccttttggattttttgctcaattgaccgtcttttccagacctctttaagtcacactcttaacttagctttctctgatgtctgttgccgccattagtttttttctagagcccacatggaagaaaagcctgcggacctcggttcagcgcacgagtaggacccgacagggaagactgcaagggtcattgtccgagcagtgaccgcggggggctcgccactgagggggttcgcagcgcggagactccagtctcgcgggatctgaggcgcactcggcttcgagggagcggcggccgcgcagccgctgtcaggccccgtcttgggccgagtcccgggttccctgtagcaggcttgggagcggggcgccaccttcctgggccctggacgtggccgacgcgttctcagtgtccgtgaggccggggcaggagtggcgggggtcgccccgaagtgggtgggaatgagcggcccgaggtcctgaagtcggggtccgccccgtctccccgctgccagcccgatttcctcggaagccgcgaccccccacgctgggctggcagttctgggctctgccggctgcgccttgccgggactcccacgggcgggctccgggcctccgtcctgatcccttggagcggttcgacgaagcaagttccgcggcgggcgcgcggggcactgtgggtagcgccggggctcaccaggcggaggcggggcccggcgtcaagctc

SEQ ID NO: 446000 - DNA, 3146 bp, Homo sapiens
gacccgccctcactcgcgcgttaggaggctcgggtcgttgtggtgcgctgtcttcccgcttgcgtcagggacctgcccgactcagtggccgccatggcatcagatgaaggcaaactttttgttggagggctgagttttgacaccaatgagcagtcgctggagcaggtcttctcaaagtacggacagatctctgaagtggtggttgtgaaagacagggagacccagagatctcggggatttgggtttgtcacctttgagaacattgacgacgctaaggatgccatgatggccatgaatgggaagtctgtagatggacggcagatccgagtagaccaggcaggcaagtcgtcagacaaccgatcccgtgggtaccgtggtggctctgccgggggccggggcttcttccgtgggggccgaggacggggccgtgggttctctagaggaggaggggaccgaggctatggggggaaccggttcgagtccaggagtgggggctacggaggctccagagactactatagcagccggagtcagagtggtggctacagtgaccggagctcgggcgggtcctacagagacagttacgacagttacggtaagtcacactccgagggcgccacgctgctgtggcctgcggtgggagctcggttcaccttggtgccctctccaagcactttaggctggacactcagaccttgtcactgtgcttgcccagaagaggcgcatctgtcctctcagagccatttctatcgcaggacgcaaaagccaaatgagactgaccaaaaaggcaagggagagcgagggcccgctgggcagtcagctaggtgcatgtgtggccgcaggccagcctccctcggctgtggggggtggttgctccccggccgcaggccgcgccctggtctggcctctggggtgaagctgcctcttgttgcttcggtgcctttacactgtgcctgcttcttgtcctcagctacacacaacgagtaaaaacccttcctgctcaagatcgtccttccaatggctgtgtgtttaaagattgtgggagcttcgctgaacgttaatgtgtagtaaatgcacctccttgtattcccactttcgtagtcatttcggttctgatcttgtcaaacccagcctgaccgcttctgacgccgggatggcctcgttactagacttttctttttaaggaagtgctgtttttttttgagggttttcaaaacattttgaaaagcatttacttttttgaccacgagccatgagttttcaaaaaaatcgggggttgtgtgggtttttggtttttgttttagtttttggttgcgttgcctttttttttttagtggggttggccccatgaagtgggtgccccactcacttctctgagatcgaacggactgtgaatccgctctttgtcggaagctgagcaagctgtggcttttttccaactccgtgtgacgtttctgagtgtagtgtggtaggaccccggcgggtgtggcagcaactgccctggagccccagcccctgcgtccatctgtgctgtgcgccccacagtagacgtgcagacgtccctgagaggttcttgaagatgtttatttatattgtccttttttactggaagacgtacgcatactccatcgatgttgtatttgcagtggctgaggaattcttgtacgcagttttctttggctttacgaagccgattaaaagaccgtgtgaaatgaaccttgctctgacaattcccttgcattgcaccacacactccttgctgcgggctcctgcagccagacctgagcagagagagaaggtggagaagcagcgggtctgcaagccttccctggggcctgcagagctagaaagggaggcccagcagactggcgctggtcagggtaggggagccaggcgggggacgggagcgggcagctcaggcctcagggcagccctgggaggcttctggcagtggtggccagagggctggactgtgcgggcagcttagcagggacagtggacgtgcacctgacgctgacctggactgcctcagtctagaagcaggccagagagcagaggcacgtggcatcccagggcgacctcagacggccagccggttagctagttctgctgttgcttcacgagttctgagcattctctgctagcctatggaagctgcagccctcggaggacagaagtgttgtgcgcccaacagaaccctctgagacgcaagctgctcccttggctagctcatatgtggaaatagccctgtaattcgaggtaactccttccgctcgtgtccacatccctcttgttgagagctcactgaaagtcatgtgcccggggaatgttcctgtgactgttttttgtttttccttttttttttaactttgtttttgtttttttcaattaagctggaactaaagtcaggcccagccattacgctccccacgtgcagccaggtgcagcctgggcccagtcatgcctggctcatagatgaaatcccttaagcaggattgaagaccagtgaacgcccccgccttttggattttttgctcaattgaccgtcttttccagacctctttaagtcacactcttaacttagctttctctgatgtctgttgccgccattagtttttttctagagcccacactggcccacatagctccatcccatacgggtagctggctccagctgcgccaaggtgcagacccgccctgggcatgctggcctgtgacggagcctgaggtcacagccccctgactagcctgagaccttcctaggggctgtggctgtttccggggaggccgggaggggcagctgtgagccctgtggaggacgttgggagtaacgctgctttgctttggcaggttgaaggggcccggccaggactcggggaagggtggcctgagagcagcgatgacctctggggtcactgtcccaggagggacttcacctggaacaagagctggaggcagccgcttgcccaggaggcttgtcccctgaggcgcttcgccagtgaggtgcgggctcagggcctcgagtctctcctggagcacgggctgcggtgcgccggcagcttacggggcggccagtccttgcccacaacgatgtggagccctgtgaaagtcggattcgaataaagggccacgtgtgcacccagaaa

SEQ ID NO: 446001 - DNA, 2734 bp, Homo sapiens
cgacgccccgcaggggaggaggcccgggaggagtatcagggtgcagtgaggccgccatggcatcagatgaaggcaaactttttgttggagggctgagttttgacaccaatgagcagtcgctggagcaggtcttctcaaagtacggacagatctctgaagtggtggttgtgaaagacagggagacccagagatctcggggatttgggtttgtcacctttgagaacattgacgacgctaaggatgccatgatggccatgaatgggaagtctgtagatggacggcagatccgagtagaccaggcaggcaagtcgtcagacaaccgatcccgtgggtaccgtggtggctctgccgggggccggggcttcttccgtgggggccgaggacggggccgtgggttctctagaggaggaggggaccgaggctatggggggaaccggttcgagtccaggagtgggggctacggaggctccagagactactatagcagccggagtcagagtggtggctacagtgaccggagctcgggcgggtcctacagagacagttacgacagttacgctacacacaacgagtaaaaacccttcctgctcaagatcgtccttccaatggctgtgtgtttaaagattgtgggagcttcgctgaacgttaatgtgtagtaaatgcacctccttgtattcccactttcgtagtcatttcggttctgatcttgtcaaacccagcctgaccgcttctgacgccgggatggcctcgttactagacttttctttttaaggaagtgctgtttttttttgagggttttcaaaacattttgaaaagcatttacttttttgaccacgagccatgagttttcaaaaaaatcgggggttgtgtgggtttttggtttttgttttagtttttggttgcgttgcctttttttttttagtggggttggccccatgaagtgggtgccccactcacttctctgagatcgaacggactgtgaatccgctctttgtcggaagctgagcaagctgtggcttttttccaactccgtgtgacgtttctgagtgtagtgtggtaggaccccggcgggtgtggcagcaactgccctggagccccagcccctgcgtccatctgtgctgtgcgccccacagtagacgtgcagacgtccctgagaggttcttgaagatgtttatttatattgtccttttttactggaagacgtacgcatactccatcgatgttgtatttgcagtggctgaggaattcttgtacgcagttttctttggctttacgaagccgattaaaagaccgtgtgaaatgaaccttgctctgacaattcccttgcattgcaccacacactccttgctgcgggctcctgcagccagacctgagcagagagagaaggtggagaagcagcgggtctgcaagccttccctggggcctgcagagctagaaagggaggcccagcagactggcgctggtcagggtaggggagccaggcgggggacgggagcgggcagctcaggcctcagggcagccctgggaggcttctggcagtggtggccagagggctggactgtgcgggcagcttagcagggacagtggacgtgcacctgacgctgacctggactgcctcagtctagaagcaggccagagagcagaggcacgtggcatcccagggcgacctcagacggccagccggttagctagttctgctgttgcttcacgagttctgagcattctctgctagcctatggaagctgcagccctcggaggacagaagtgttgtgcgcccaacagaaccctctgagacgcaagctgctcccttggctagctcatatgtggaaatagccctgtaattcgaggtaactccttccgctcgtgtccacatccctcttgttgagagctcactgaaagtcatgtgcccggggaatgttcctgtgactgttttttgtttttccttttttttttaactttgtttttgtttttttcaattaagctggaactaaagtcaggcccagccattacgctccccacgtgcagccaggtgcagcctgggcccagtcatgcctggctcatagatgaaatcccttaagcaggattgaagaccagtgaacgcccccgccttttggattttttgctcaattgaccgtcttttccagacctctttaagtcacactcttaacttagctttctctgatgtctgttgccgccattagtttttttctagagcccacactggcccacatagctccatcccatacgggtagctggctccagctgcgccaaggtgcagacccgccctgggcatgctggcctgtgacggagcctgaggtcacagccccctgactagcctgagaccttcctaggggctgtggctgtttccggggaggccgggaggggcagctgtgagccctgtggaggacgttgggagtaacgctgctttgctttggcaggttgaaggggcccggccaggactcggggaagggtggcctgagagcagcgatgacctctggggtcactgtcccaggagggacttcacctggaacaagagctggaggcagccgcttgcccaggaggcttgtcccctgaggcgcttcgccagtgaggtgcgggctcagggcctcgagtctctcctggagcacgggctgcggtgcgccggcagcttacggggcggccagtccttgcccacaacgatgtggagccctgtgaaagtcggattcgaataaagggccacgtgtgcacccagaaa

SEQ ID NO: 446002 - DNA, 3052 bp, Homo sapiens
actctgactgatccccgcgcctcgccgggcaggggcgagccccgcgcgtcgggcccggaatagcagtctcgcccccgcccggcgcggctattttgagctcctccgttggggccgaggcgcgggggcggcgggaggctgggggtcgacacgcaggctgcgtcctcgccccgcgagattggacccctcgaggactgtgcgctgtggccgcgcagggctgggcggcggggccccctctcccacgcgaggcgtctgcgtggagcggcggcaccgggagcccggccgctcgagccaaacgccgcggacggagcgaggccgcagcgccccctggtgtccgcaacgggcagcgcgtcccggtcgggtcccgcatggccgccatggcatcagatgaaggcaaactttttgttggagggctgagttttgacaccaatgagcagtcgctggagcaggtcttctcaaagtacggacagatctctgaagtggtggttgtgaaagacagggagacccagagatctcggggatttgggtttgtcacctttgagaacattgacgacgctaaggatgccatgatggccatgaatgggaagtctgtagatggacggcagatccgagtagaccaggcaggcaagtcgtcagacaaccgatcccgtgggtaccgtggtggctctgccgggggccggggcttcttccgtgggggccgaggacggggccgtgggttctctagaggaggaggggaccgaggctatggggggaaccggttcgagtccaggagtgggggctacggaggctccagagactactatagcagccggagtcagagtggtggctacagtgaccggagctcgggcgggtcctacagagacagttacgacagttacgctacacacaacgagtaaaaacccttcctgctcaagatcgtccttccaatggctgtgtgtttaaagattgtgggagcttcgctgaacgttaatgtgtagtaaatgcacctccttgtattcccactttcgtagtcatttcggttctgatcttgtcaaacccagcctgaccgcttctgacgccgggatggcctcgttactagacttttctttttaaggaagtgctgtttttttttgagggttttcaaaacattttgaaaagcatttacttttttgaccacgagccatgagttttcaaaaaaatcgggggttgtgtgggtttttggtttttgttttagtttttggttgcgttgcctttttttttttagtggggttggccccatgaagtgggtgccccactcacttctctgagatcgaacggactgtgaatccgctctttgtcggaagctgagcaagctgtggcttttttccaactccgtgtgacgtttctgagtgtagtgtggtaggaccccggcgggtgtggcagcaactgccctggagccccagcccctgcgtccatctgtgctgtgcgccccacagtagacgtgcagacgtccctgagaggttcttgaagatgtttatttatattgtccttttttactggaagacgtacgcatactccatcgatgttgtatttgcagtggctgaggaattcttgtacgcagttttctttggctttacgaagccgattaaaagaccgtgtgaaatgaaccttgctctgacaattcccttgcattgcaccacacactccttgctgcgggctcctgcagccagacctgagcagagagagaaggtggagaagcagcgggtctgcaagccttccctggggcctgcagagctagaaagggaggcccagcagactggcgctggtcagggtaggggagccaggcgggggacgggagcgggcagctcaggcctcagggcagccctgggaggcttctggcagtggtggccagagggctggactgtgcgggcagcttagcagggacagtggacgtgcacctgacgctgacctggactgcctcagtctagaagcaggccagagagcagaggcacgtggcatcccagggcgacctcagacggccagccggttagctagttctgctgttgcttcacgagttctgagcattctctgctagcctatggaagctgcagccctcggaggacagaagtgttgtgcgcccaacagaaccctctgagacgcaagctgctcccttggctagctcatatgtggaaatagccctgtaattcgaggtaactccttccgctcgtgtccacatccctcttgttgagagctcactgaaagtcatgtgcccggggaatgttcctgtgactgttttttgtttttccttttttttttaactttgtttttgtttttttcaattaagctggaactaaagtcaggcccagccattacgctccccacgtgcagccaggtgcagcctgggcccagtcatgcctggctcatagatgaaatcccttaagcaggattgaagaccagtgaacgcccccgccttttggattttttgctcaattgaccgtcttttccagacctctttaagtcacactcttaacttagctttctctgatgtctgttgccgccattagtttttttctagagcccacactggcccacatagctccatcccatacgggtagctggctccagctgcgccaaggtgcagacccgccctgggcatgctggcctgtgacggagcctgaggtcacagccccctgactagcctgagaccttcctaggggctgtggctgtttccggggaggccgggaggggcagctgtgagccctgtggaggacgttgggagtaacgctgctttgctttggcaggttgaaggggcccggccaggactcggggaagggtggcctgagagcagcgatgacctctggggtcactgtcccaggagggacttcacctggaacaagagctggaggcagccgcttgcccaggaggcttgtcccctgaggcgcttcgccagtgaggtgcgggctcagggcctcgagtctctcctggagcacgggctgcggtgcgccggcagcttacggggcggccagtccttgcccacaacgatgtggagccctgtgaaagtcggattcgaataaagggccacgtgtgcacccagaaa

SEQ ID NO: 446003 - DNA, 2724 bp, Homo sapiens
gacccgccctcactcgcgcgttaggaggctcgggtcgttgtggtgcgctgtcttcccgcttgcgtcagggacctgcccgactcagtggaagcggggagaggtggtgagagatgacccctgttgaggatttcattggtgtctgccacagccgccatggcatcagatgaaggcaaactttttgttggagggctgagttttgacaccaatgagcagtcgctggagcaggtcttctcaaagtacggacagatctctgaagtctgtagatggacggcagatccgagtagaccaggcaggcaagtcgtcagacaaccgatcccgtgggtaccgtggtggctctgccgggggccggggcttcttccgtgggggccgaggacggggccgtgggttctctagaggaggaggggaccgaggctatggggggaaccggttcgagtccaggagtgggggctacggaggctccagagactactatagcagccggagtcagagtggtggctacagtgaccggagctcgggcgggtcctacagagacagttacgacagttacgctacacacaacgagtaaaaacccttcctgctcaagatcgtccttccaatggctgtgtgtttaaagattgtgggagcttcgctgaacgttaatgtgtagtaaatgcacctccttgtattcccactttcgtagtcatttcggttctgatcttgtcaaacccagcctgaccgcttctgacgccgggatggcctcgttactagacttttctttttaaggaagtgctgtttttttttgagggttttcaaaacattttgaaaagcatttacttttttgaccacgagccatgagttttcaaaaaaatcgggggttgtgtgggtttttggtttttgttttagtttttggttgcgttgcctttttttttttagtggggttggccccatgaagtgggtgccccactcacttctctgagatcgaacggactgtgaatccgctctttgtcggaagctgagcaagctgtggcttttttccaactccgtgtgacgtttctgagtgtagtgtggtaggaccccggcgggtgtggcagcaactgccctggagccccagcccctgcgtccatctgtgctgtgcgccccacagtagacgtgcagacgtccctgagaggttcttgaagatgtttatttatattgtccttttttactggaagacgtacgcatactccatcgatgttgtatttgcagtggctgaggaattcttgtacgcagttttctttggctttacgaagccgattaaaagaccgtgtgaaatgaaccttgctctgacaattcccttgcattgcaccacacactccttgctgcgggctcctgcagccagacctgagcagagagagaaggtggagaagcagcgggtctgcaagccttccctggggcctgcagagctagaaagggaggcccagcagactggcgctggtcagggtaggggagccaggcgggggacgggagcgggcagctcaggcctcagggcagccctgggaggcttctggcagtggtggccagagggctggactgtgcgggcagcttagcagggacagtggacgtgcacctgacgctgacctggactgcctcagtctagaagcaggccagagagcagaggcacgtggcatcccagggcgacctcagacggccagccggttagctagttctgctgttgcttcacgagttctgagcattctctgctagcctatggaagctgcagccctcggaggacagaagtgttgtgcgcccaacagaaccctctgagacgcaagctgctcccttggctagctcatatgtggaaatagccctgtaattcgaggtaactccttccgctcgtgtccacatccctcttgttgagagctcactgaaagtcatgtgcccggggaatgttcctgtgactgttttttgtttttccttttttttttaactttgtttttgtttttttcaattaagctggaactaaagtcaggcccagccattacgctccccacgtgcagccaggtgcagcctgggcccagtcatgcctggctcatagatgaaatcccttaagcaggattgaagaccagtgaacgcccccgccttttggattttttgctcaattgaccgtcttttccagacctctttaagtcacactcttaacttagctttctctgatgtctgttgccgccattagtttttttctagagcccacactggcccacatagctccatcccatacgggtagctggctccagctgcgccaaggtgcagacccgccctgggcatgctggcctgtgacggagcctgaggtcacagccccctgactagcctgagaccttcctaggggctgtggctgtttccggggaggccgggaggggcagctgtgagccctgtggaggacgttgggagtaacgctgctttgctttggcaggttgaaggggcccggccaggactcggggaagggtggcctgagagcagcgatgacctctggggtcactgtcccaggagggacttcacctggaacaagagctggaggcagccgcttgcccaggaggcttgtcccctgaggcgcttcgccagtgaggtgcgggctcagggcctcgagtctctcctggagcacgggctgcggtgcgccggcagcttacggggcggccagtccttgcccacaacgatgtggagccctgtgaaagtcggattcgaataaagggccacgtgtgcacccagaaa

SEQ ID NO: 446004 - DNA, 2382 bp, Homo sapiens
  misc_feature (21)..(21): n is a, c, g, or t
  misc_feature (24)..(25): n is a, c, g, or t
  misc_feature (40)..(40): n is a, c, g, or t
aggctgattctagaggatccnatnnaggcaggacgaggcntgggttcctagaggaggaggggaccgaggctatggggggaaccggttcgagtccaggagtgggggctacggaggctccagagactactatagcagccggagtcagagtggtggctacagtgaccggagctcgggcgggtcctacagagacagttacgacagttacgctacacacaacgagtaaaaacccttcctgctcaagatcgtccttccaatggctgtgtgtttaaagattgtgggagcttcgctgaacgttaatgtgtagtaaatgcacctccttgtattcccactttcgtagtcatttcggttctgatcttgtcaaacccagcctgaccgcttctgacgccgggatggcctcgttactagacttttctttttaaggaagtgctgtttttttttgagggttttcaaaacattttgaaaagcatttacttttttgaccacgagccatgagttttcaaaaaaatcgggggttgtgtgggtttttggtttttgttttagtttttggttgcgttgcctttttttttttagtggggttggccccatgaagtgggtgccccactcacttctctgagatcgaacggactgtgaatccgctctttgtcggaagctgagcaagctgtggcttttttccaactccgtgtgacgtttctgagtgtagtgtggtaggaccccggcgggtgtggcagcaactgccctggagccccagcccctgcgtccatctgtgctgtgcgccccacagtagacgtgcagacgtccctgagaggttcttgaagatgtttatttatattgtccttttttactggaagacgtacgcatactccatcgatgttgtatttgcagtggctgaggaattcttgtacgcagttttctttggctttacgaagccgattaaaagaccgtgtgaaatgaaccttgctctgacaattcccttgcattgcaccacacactccttgctgcgggctcctgcagccagacctgagcagagagagaaggtggagaagcagcgggtctgcaagccttccctggggcctgcagagctagaaagggaggcccagcagactggcgctggtcagggtaggggagccaggcgggggacgggagcgggcagctcaggcctcagggcagccctgggaggcttctggcagtggtggccagagggctggactgtgcgggcagcttagcagggacagtggacgtgcacctgacgctgacctggactgcctcagtctagaagcaggccagagagcagaggcacgtggcatcccagggcgacctcagacggccagccggttagctagttctgctgttgcttcacgagttctgagcattctctgctagcctatggaagctgcagccctcggaggacagaagtgttgtgcgcccaacagaaccctctgagacgcaagctgctcccttggctagctcatatgtggaaatagccctgtaattcgaggtaactccttccgctcgtgtccacatccctcttgttgagagctcactgaaagtcatgtgcccggggaatgttcctgtgactgttttttgtttttccttttttttttaactttgtttttgtttttttcaattaagctggaactaaagtcaggcccagccattacgctccccacgtgcagccaggtgcagcctgggcccagtcatgcctggctcatagatgaaatcccttaagcaggattgaagaccagtgaacgcccccgccttttggattttttgctcaattgaccgtcttttccagacctctttaagtcacactcttaacttagctttctctgatgtctgttgccgccattagtttttttctagagcccacactggcccacatagctccatcccatacgggtagctggctccagctgcgccaaggtgcagacccgccctgggcatgctggcctgtgacggagcctgaggtcacagccccctgactagcctgagaccttcctaggggctgtggctgtttccggggaggccgggaggggcagctgtgagccctgtggaggacgttgggagtaacgctgctttgctttggcaggttgaaggggcccggccaggactcggggaagggtggcctgagagcagcgatgacctctggggtcactgtcccaggagggacttcacctggaacaagagctggaggcagccgcttgcccaggaggcttgtcccctgaggcgcttcgccagtgaggtgcgggctcagggcctcgagtctctcctggagcacgggctgcggtgcgccggcagcttacggggcggccagtccttgcccacaacgatgtggagccctgtgaaagtcggattcgaataaagggccacgtgtgcacccagaaa

SEQ ID NO: 446005 - DNA, 3165 bp, Homo sapiens
gacccgccctcactcgcgcgttaggaggctcgggtcgttgtggtgcgctgtcttcccgcttgcgtcagggacctgcccgactcagtggccgccatggcatcagatgaaggcaaactttttgttggagggctgagttttgacaccaatgagcagtcgctggagcaggtcttctcaaagtacggacagatctctgaagacctctctcccctgcacagtggtggttgtgaaagacagggagacccagagatctcggggatttgggtttgtcacctttgagaacattgacgacgctaaggatgccatgatggccatgaatgggaagtctgtagatggacggcagatccgagtagaccaggcaggcaagtcgtcagacaaccgatcccgtgggtaccgtggtggctctgccgggggccggggcttcttccgtgggggccgaggacggggccgtgggttctctagaggaggaggggaccgaggctatggggggaaccggttcgagtccaggagtgggggctacggaggctccagagactactatagcagccggagtcagagtggtggctacagtgaccggagctcgggcgggtcctacagagacagttacgacagttacggtaagtcacactccgagggcgccacgctgctgtggcctgcggtgggagctcggttcaccttggtgccctctccaagcactttaggctggacactcagaccttgtcactgtgcttgcccagaagaggcgcatctgtcctctcagagccatttctatcgcaggacgcaaaagccaaatgagactgaccaaaaaggcaagggagagcgagggcccgctgggcagtcagctaggtgcatgtgtggccgcaggccagcctccctcggctgtggggggtggttgctccccggccgcaggccgcgccctggtctggcctctggggtgaagctgcctcttgttgcttcggtgcctttacactgtgcctgcttcttgtcctcagctacacacaacgagtaaaaacccttcctgctcaagatcgtccttccaatggctgtgtgtttaaagattgtgggagcttcgctgaacgttaatgtgtagtaaatgcacctccttgtattcccactttcgtagtcatttcggttctgatcttgtcaaacccagcctgaccgcttctgacgccgggatggcctcgttactagacttttctttttaaggaagtgctgtttttttttgagggttttcaaaacattttgaaaagcatttacttttttgaccacgagccatgagttttcaaaaaaatcgggggttgtgtgggtttttggtttttgttttagtttttggttgcgttgcctttttttttttagtggggttggccccatgaagtgggtgccccactcacttctctgagatcgaacggactgtgaatccgctctttgtcggaagctgagcaagctgtggcttttttccaactccgtgtgacgtttctgagtgtagtgtggtaggaccccggcgggtgtggcagcaactgccctggagccccagcccctgcgtccatctgtgctgtgcgccccacagtagacgtgcagacgtccctgagaggttcttgaagatgtttatttatattgtccttttttactggaagacgtacgcatactccatcgatgttgtatttgcagtggctgaggaattcttgtacgcagttttctttggctttacgaagccgattaaaagaccgtgtgaaatgaaccttgctctgacaattcccttgcattgcaccacacactccttgctgcgggctcctgcagccagacctgagcagagagagaaggtggagaagcagcgggtctgcaagccttccctggggcctgcagagctagaaagggaggcccagcagactggcgctggtcagggtaggggagccaggcgggggacgggagcgggcagctcaggcctcagggcagccctgggaggcttctggcagtggtggccagagggctggactgtgcgggcagcttagcagggacagtggacgtgcacctgacgctgacctggactgcctcagtctagaagcaggccagagagcagaggcacgtggcatcccagggcgacctcagacggccagccggttagctagttctgctgttgcttcacgagttctgagcattctctgctagcctatggaagctgcagccctcggaggacagaagtgttgtgcgcccaacagaaccctctgagacgcaagctgctcccttggctagctcatatgtggaaatagccctgtaattcgaggtaactccttccgctcgtgtccacatccctcttgttgagagctcactgaaagtcatgtgcccggggaatgttcctgtgactgttttttgtttttccttttttttttaactttgtttttgtttttttcaattaagctggaactaaagtcaggcccagccattacgctccccacgtgcagccaggtgcagcctgggcccagtcatgcctggctcatagatgaaatcccttaagcaggattgaagaccagtgaacgcccccgccttttggattttttgctcaattgaccgtcttttccagacctctttaagtcacactcttaacttagctttctctgatgtctgttgccgccattagtttttttctagagcccacactggcccacatagctccatcccatacgggtagctggctccagctgcgccaaggtgcagacccgccctgggcatgctggcctgtgacggagcctgaggtcacagccccctgactagcctgagaccttcctaggggctgtggctgtttccggggaggccgggaggggcagctgtgagccctgtggaggacgttgggagtaacgctgctttgctttggcaggttgaaggggcccggccaggactcggggaagggtggcctgagagcagcgatgacctctggggtcactgtcccaggagggacttcacctggaacaagagctggaggcagccgcttgcccaggaggcttgtcccctgaggcgcttcgccagtgaggtgcgggctcagggcctcgagtctctcctggagcacgggctgcggtgcgccggcagcttacggggcggccagtccttgcccacaacgatgtggagccctgtgaaagtcggattcgaataaagggccacgtgtgcacccagaaa

SEQ ID NO: 446006 - DNA, 2305 bp, Homo sapiens
cccgggaatctcacggagccagggaatcgcacggaggctccagagactactatagcagccggagtcagagtggtggctacagtgaccggagctcgggcgggtcctacagagacagttacgacagttacgctacacacaacgagtaaaaacccttcctgctcaagatcgtccttccaatggctgtgtgtttaaagattgtgggagcttcgctgaacgttaatgtgtagtaaatgcacctccttgtattcccactttcgtagtcatttcggttctgatcttgtcaaacccagcctgaccgcttctgacgccgggatggcctcgttactagacttttctttttaaggaagtgctgtttttttttgagggttttcaaaacattttgaaaagcatttacttttttgaccacgagccatgagttttcaaaaaaatcgggggttgtgtgggtttttggtttttgttttagtttttggttgcgttgcctttttttttttagtggggttggccccatgaagtgggtgccccactcacttctctgagatcgaacggactgtgaatccgctctttgtcggaagctgagcaagctgtggcttttttccaactccgtgtgacgtttctgagtgtagtgtggtaggaccccggcgggtgtggcagcaactgccctggagccccagcccctgcgtccatctgtgctgtgcgccccacagtagacgtgcagacgtccctgagaggttcttgaagatgtttatttatattgtccttttttactggaagacgtacgcatactccatcgatgttgtatttgcagtggctgaggaattcttgtacgcagttttctttggctttacgaagccgattaaaagaccgtgtgaaatgaaccttgctctgacaattcccttgcattgcaccacacactccttgctgcgggctcctgcagccagacctgagcagagagagaaggtggagaagcagcgggtctgcaagccttccctggggcctgcagagctagaaagggaggcccagcagactggcgctggtcagggtaggggagccaggcgggggacgggagcgggcagctcaggcctcagggcagccctgggaggcttctggcagtggtggccagagggctggactgtgcgggcagcttagcagggacagtggacgtgcacctgacgctgacctggactgcctcagtctagaagcaggccagagagcagaggcacgtggcatcccagggcgacctcagacggccagccggttagctagttctgctgttgcttcacgagttctgagcattctctgctagcctatggaagctgcagccctcggaggacagaagtgttgtgcgcccaacagaaccctctgagacgcaagctgctcccttggctagctcatatgtggaaatagccctgtaattcgaggtaactccttccgctcgtgtccacatccctcttgttgagagctcactgaaagtcatgtgcccggggaatgttcctgtgactgttttttgtttttccttttttttttaactttgtttttgtttttttcaattaagctggaactaaagtcaggcccagccattacgctccccacgtgcagccaggtgcagcctgggcccagtcatgcctggctcatagatgaaatcccttaagcaggattgaagaccagtgaacgcccccgccttttggattttttgctcaattgaccgtcttttccagacctctttaagtcacactcttaacttagctttctctgatgtctgttgccgccattagtttttttctagagcccacactggcccacatagctccatcccatacgggtagctggctccagctgcgccaaggtgcagacccgccctgggcatgctggcctgtgacggagcctgaggtcacagccccctgactagcctgagaccttcctaggggctgtggctgtttccggggaggccgggaggggcagctgtgagccctgtggaggacgttgggagtaacgctgctttgctttggcaggttgaaggggcccggccaggactcggggaagggtggcctgagagcagcgatgacctctggggtcactgtcccaggagggacttcacctggaacaagagctggaggcagccgcttgcccaggaggcttgtcccctgaggcgcttcgccagtgaggtgcgggctcagggcctcgagtctctcctggagcacgggctgcggtgcgccggcagcttacggggcggccagtccttgcccacaacgatgtggagccctgtgaaagtcggattcgaataaagggccacgtgtgcacccagaaa

SEQ ID NO: 446007 - DNA, 2068 bp, Homo sapiens
cccctggcagcccctccgggtctagttccgcctgttccaggtcttccgcttccgccatgaggttctgacgccgggatggcctcgttactagacttttctttttaaggaagtgctgtttttttttgagggttttcaaaacattttgaaaagcatttacttttttgaccacgagccatgagttttcaaaaaaatcgggggttgtgtgggtttttggtttttgttttagtttttggttgcgttgcctttttttttttagtggggttggccccatgaagtgggtgccccactcacttctctgagatcgaacggactgtgaatccgctctttgtcggaagctgagcaagctgtggcttttttccaactccgtgtgacgtttctgagtgtagtgtggtaggaccccggcgggtgtggcagcaactgccctggagccccagcccctgcgtccatctgtgctgtgcgccccacagtagacgtgcagacgtccctgagaggttcttgaagatgtttatttatattgtccttttttactggaagacgtacgcatactccatcgatgttgtatttgcagtggctgaggaattcttgtacgcagttttctttggctttacgaagccgattaaaagaccgtgtgaaatgaaccttgctctgacaattcccttgcattgcaccacacactccttgctgcgggctcctgcagccagacctgagcagagagagaaggtggagaagcagcgggtctgcaagccttccctggggcctgcagagctagaaagggaggcccagcagactggcgctggtcagggtaggggagccaggcgggggacgggagcgggcagctcaggcctcagggcagccctgggaggcttctggcagtggtggccagagggctggactgtgcgggcagcttagcagggacagtggacgtgcacctgacgctgacctggactgcctcagtctagaagcaggccagagagcagaggcacgtggcatcccagggcgacctcagacggccagccggttagctagttctgctgttgcttcacgagttctgagcattctctgctagcctatggaagctgcagccctcggaggacagaagtgttgtgcgcccaacagaaccctctgagacgcaagctgctcccttggctagctcatatgtggaaatagccctgtaattcgaggtaactccttccgctcgtgtccacatccctcttgttgagagctcactgaaagtcatgtgcccggggaatgttcctgtgactgttttttgtttttccttttttttttaactttgtttttgtttttttcaattaagctggaactaaagtcaggcccagccattacgctccccacgtgcagccaggtgcagcctgggcccagtcatgcctggctcatagatgaaatcccttaagcaggattgaagaccagtgaacgcccccgccttttggattttttgctcaattgaccgtcttttccagacctctttaagtcacactcttaacttagctttctctgatgtctgttgccgccattagtttttttctagagcccacactggcccacatagctccatcccatacgggtagctggctccagctgcgccaaggtgcagacccgccctgggcatgctggcctgtgacggagcctgaggtcacagccccctgactagcctgagaccttcctaggggctgtggctgtttccggggaggccgggaggggcagctgtgagccctgtggaggacgttgggagtaacgctgctttgctttggcaggttgaaggggcccggccaggactcggggaagggtggcctgagagcagcgatgacctctggggtcactgtcccaggagggacttcacctggaacaagagctggaggcagccgcttgcccaggaggcttgtcccctgaggcgcttcgccagtgaggtgcgggctcagggcctcgagtctctcctggagcacgggctgcggtgcgccggcagcttacggggcggccagtccttgcccacaacgatgtggagccctgtgaaagtcggattcgaataaagggccacgtgtgcacccagaaa

SEQ ID NO: 446008 - DNA, 2107 bp, Homo sapiens
gacccgccctcactcgcgcgttaggaggctcgggtcgttgtggtgcgctgtcttcccgcttgcgtcagggacctgcccgactcagtggccgccatggcatcagatgaaggcaaactttttgttggagggctgagttttgacaccaatgagcagtcgctggagcaggtcttctcaaagtacggacagatctctgaagtggtggttgtgaaagacagggagacccagagatctcggggatttgggtttgtcacctttgagaacattgacgacgctaaggatgccatgatggccatgaatgggaagtctgtagatggacggcagatccgagtagaccaggcaggcaagtcgtcagacaaccgatcccgtgggtaccgtggtggctctgccgggggccggggcttcttccgtgggggccgaggacggggccgtgggttctctagaggaggaggggaccgaggctatggggggaaccggttcgacgtccatctgtgctgtgcgccccacagtagacgtgcagacgtccctgagaggttcttgaagatgtttatttatattgtccttttttactggaagacgtacgcatactccatcgatgttgtatttgcagtggctgaggaattcttgtacgcagttttctttggctttacgaagccgattaaaagaccgtgtgaaatgaaccttgctctgacaattcccttgcattgcaccacacactccttgctgcgggctcctgcagccagacctgagcagagagagaaggtggagaagcagcgggtctgcaagccttccctggggcctgcagagctagaaagggaggcccagcagactggcgctggtcagggtaggggagccaggcgggggacgggagcgggcagctcaggcctcagggcagccctgggaggcttctggcagtggtggccagagggctggactgtgcgggcagcttagcagggacagtggacgtgcacctgacgctgacctggactgcctcagtctagaagcaggccagagagcagaggcacgtggcatcccagggcgacctcagacggccagccggttagctagttctgctgttgcttcacgagttctgagcattctctgctagcctatggaagctgcagccctcggaggacagaagtgttgtgcgcccaacagaaccctctgagacgcaagctgctcccttggctagctcatatgtggaaatagccctgtaattcgaggtaactccttccgctcgtgtccacatccctcttgttgagagctcactgaaagtcatgtgcccggggaatgttcctgtgactgttttttgtttttccttttttttttaactttgtttttgtttttttcaattaagctggaactaaagtcaggcccagccattacgctccccacgtgcagccaggtgcagcctgggcccagtcatgcctggctcatagatgaaatcccttaagcaggattgaagaccagtgaacgcccccgccttttggattttttgctcaattgaccgtcttttccagacctctttaagtcacactcttaacttagctttctctgatgtctgttgccgccattagtttttttctagagcccacactggcccacatagctccatcccatacgggtagctggctccagctgcgccaaggtgcagacccgccctgggcatgctggcctgtgacggagcctgaggtcacagccccctgactagcctgagaccttcctaggggctgtggctgtttccggggaggccgggaggggcagctgtgagccctgtggaggacgttgggagtaacgctgctttgctttggcaggttgaaggggcccggccaggactcggggaagggtggcctgagagcagcgatgacctctggggtcactgtcccaggagggacttcacctggaacaagagctggaggcagccgcttgcccaggaggcttgtcccctgaggcgcttcgccagtgaggtgcgggctcagggcctcgagtctctcctggagcacgggctgcggtgcgccggcagcttacggggcggccagtccttgcccacaacgatgtggagccctgtgaaagtcggattcgaataaagggccacgtgtgcacccagaaa

SEQ ID NO: 446009 - DNA, 2046 bp, Homo sapiens
agttttgacaccaatgagcagtcgctggagcaggtcttctcaaagtacggacagatctctgaagtggtggttgtgaaagacagggagacccagagatctcggggatttgggtttgtcacctttgagaacattgacgacgctaaggatgccatgatggccatgaatgggaagtctgtagatggacggcagatccgagtagactgccgccatggcatcagatgaaggcaaactttttgttggagggctgagttttgacaccaatgagcagtcgctggagcaggtcttctcaaagtacggacagatctctgaagtggtggttgtgaaagacagggagacccagagatctcggggatttgggtttgtcacctttgagaacattgacgacgctaaggatgccatgatggccatgaatgggaagcgtccatctgtgctgtgcgccccacagtagacgtgcagacgtccctgagaggttcttgaagatgtttatttatattgtccttttttactggaagacgtacgcatactccatcgatgttgtatttgcagtggctgaggaattcttgtacgcagttttctttggctttacgaagccgattaaaagaccgtgtgaaatgaaccttgctctgacaattcccttgcattgcaccacacactccttgctgcgggctcctgcagccagacctgagcagagagagaaggtggagaagcagcgggtctgcaagccttccctggggcctgcagagctagaaagggaggcccagcagactggcgctggtcagggtaggggagccaggcgggggacgggagcgggcagctcaggcctcagggcagccctgggaggcttctggcagtggtggccagagggctggactgtgcgggcagcttagcagggacagtggacgtgcacctgacgctgacctggactgcctcagtctagaagcaggccagagagcagaggcacgtggcatcccagggcgacctcagacggccagccggttagctagttctgctgttgcttcacgagttctgagcattctctgctagcctatggaagctgcagccctcggaggacagaagtgttgtgcgcccaacagaaccctctgagacgcaagctgctcccttggctagctcatatgtggaaatagccctgtaattcgaggtaactccttccgctcgtgtccacatccctcttgttgagagctcactgaaagtcatgtgcccggggaatgttcctgtgactgttttttgtttttccttttttttttaactttgtttttgtttttttcaattaagctggaactaaagtcaggcccagccattacgctccccacgtgcagccaggtgcagcctgggcccagtcatgcctggctcatagatgaaatcccttaagcaggattgaagaccagtgaacgcccccgccttttggattttttgctcaattgaccgtcttttccagacctctttaagtcacactcttaacttagctttctctgatgtctgttgccgccattagtttttttctagagcccacactggcccacatagctccatcccatacgggtagctggctccagctgcgccaaggtgcagacccgccctgggcatgctggcctgtgacggagcctgaggtcacagccccctgactagcctgagaccttcctaggggctgtggctgtttccggggaggccgggaggggcagctgtgagccctgtggaggacgttgggagtaacgctgctttgctttggcaggttgaaggggcccggccaggactcggggaagggtggcctgagagcagcgatgacctctggggtcactgtcccaggagggacttcacctggaacaagagctggaggcagccgcttgcccaggaggcttgtcccctgaggcgcttcgccagtgaggtgcgggctcagggcctcgagtctctcctggagcacgggctgcggtgcgccggcagcttacggggcggccagtccttgcccacaacgatgtggagccctgtgaaagtcggattcgaataaagggccacgtgtgcacccagaaa

SEQ ID NO: 446010 - DNA, 717 bp, Homo sapiens
gacccgccctcactcgcgcgttaggaggctcgggtcgttgtggtgcgctgtcttcccgcttgcgtcagggacctgcccgactcagtggccgccatggcatcagatgaaggcaaactttttgttggagggctgagttttgacaccaatgagcagtcgctggagcaggtcttctcaaagtacggacagatctctgaagtggtggttgtgaaagacagggagacccagagatctcggggatttgggtttgtcacctttgagaacattgacgacgctaaggatgccatgatggccatgaatgggaagtctgtagatggacggcagatccgagtagaccaggcaggcaagtcgtcagacaaccgatcccgtgggtaccgtggtggctctgccgggggccggggcttcttccgtgggggccgaggacggggccgtgggttctctagaggaggaggggaccgaggctatggggggaaccggttcgagtccaggagtgggggctacggaggctccagagactactatagcagccggagtcagagtggtggctacagtgaccggagctcgggcgggtcctacagagacagttacgacagttacgctacacacaacgagtaaaaacccttcctcacagttgccatgtagaccccttgaagaggggaggggcctagggagccgcaccttgtcatgtaccatcaataaagtaccctgtgctcaaccaaa

SEQ ID NO: 446011 - DNA, 1116 bp, Homo sapiens
atgaaggggtcccagccgcctgagacccccggtggggacacaggatcgcggtgagatacctgggagtcacgggtgctcgcagacgcagctgaccccagaggcacaggccgccatggcatcagatgaaggcaaactttttgttggagggctgagttttgacaccaatgagcagtcgctggagcaggtcttctcaaagtacggacagatctctgaagtggtggttgtgaaagacagggagacccagagatctcggggatttgggtttgtcacctttgagaacattgacgacgctaaggatgccatgatggccatgaatgggaagtctgtagatggacggcagatccgagtagaccaggcaggcaagtcgtcagacaaccgatcccgtgggtaccgtggtggctctgccgggggccggggcttcttccgtgggggccgaggacggggccgtgggttctctagaggaggaggggaccgaggctatggggggaaccggttcgagtccaggagtgggggctacggaggctccagagactactatagcagccggagtcagagtggtggctacagtgaccggagctcgggcgggtcctacagagacagttacgacagttacggttgaaggggcccggccaggactcggggaagggtggcctgagagcagcgatgacctctggggtcactgtcccaggagggacttcacctggaacaagagctggaggcagccgcttgcccaggaggcttgtcccctgtaagtgctttcgggaagagtggcatgtggcgctgagccctgtcccgggcggcacctgggcgtttcagtgagtcctgctctcccgcacctatggccccacggcgggcgcctttcggtgtgtgttgggtgcagggcagcgcctcccgggagcgccgggtccctcgcctggagcccgcgcctgttctccctcccttcctcctccttccgaggcgcttcgccagtgaggtgcgggctcagggcctcgagtctctcctggagcacgggctgcggtgcgccggcagcttacggggcggccagtccttgcccacaacgatgtggagccctgtgaaagtcggattcgaataaagggccacgtgtgcacccagaaa

SEQ ID NO: 446012 - DNA, 307 bp, Homo sapiens
ggcggccgcgggcggagccagcccccatttcgagcggggcttctccctgcgccgagcctgacaaaatgggggcggcggcggcgcgggcctgcagggcctgccgggcgcacgtggcggcctcgggcctgggagccgggccgcgtcctctctcctcggccgcgcggccaccggcgaagttctaggggcggggggctcgccccgcgcaggagtcaccccaactttcacggctccaaaaaatacttccccattaggggccggtcattgcccagacaattgcgcaccacaattaaggtgttccaaggttcgc

SEQ ID NO: 446013 - DNA, 2323 bp, Homo sapiens
  misc_feature (17)..(17): n is a, c, g, or t
  misc_feature (22)..(23): n is a, c, g, or t
aggctaggtacgaggcnggtgnntgaatcggccggtgaggaggctgcgtctggctcccgctctcacagccattgcagtacattgagctccatagagacagcgccggggcaagtgagagccggacgggcactgggcgactctgtgcctcgctgaggaaaaataactaaacatgggcaaaggagatcctaagaagccgagaggcaaaatgtcatcatatgcattttttgtgcaaacttgtcgggaggagcataagaagaagcacccagatgcttcagtcaacttctcagagttttctaagaagtgctcagagaggtggaagaccatgtctgctaaagagaaaggaaaatttgaagatatggcaaaagcggacaaggcccgttatgaaagagaaatgaaaacctatatccctcccaaaggggagacaaaaaagaagttcaaggatcccaatgcacccaagaggcctccttcggccttcttcctcttctgctctgagtatcgcccaaaaatcaaaggagaacatcctggcctgtccattggtgatgttgcgaagaaactgggagagatgtggaataacactgctgcagatgacaagcagccttatgaaaagaaggctgcgaagctgaaggaaaaatacgaaaaggatattgctgcatatcgagctaaaggaaagcctgatgcagcaaaaaagggagttgtcaaggctgaaaaaagcaagaaaaagaaggaagaggaggaagatgaggaagatgaagaggatgaggaggaggaggaagatgaagaagatgaagatgaagaagaagatgatgatgatgaataagttggttctagcgcagtttttttttttcttgtctataaagcatttaacccccctgtacacaactcactccttttaaagaaaaaaattgaaatgtaaggctgtgtaagatttgtttttaaactgtacagtgtctttttttgtatagttaacacactaccgaatgtgtctttagatagccctgtcctggtggtattttcaatagccactaaccttgcctggtacagtatgggggttgtaaattggcatggaaatttaaagcaggttcttgttggtgcacagcacaaattagttatatatggggatggtagttttttcatcttcagttgtctctgatgcagcttatacgaaataattgttgttctgttaactgaataccactctgtaattgcaaaaaaaaaaaaaagttgcagctgttttgttgacattctgaatgcttctaagtaaatacaattttttttattagtattgttgtccttttcataggtctgaaatttttcttcttgaggggaagctagtcttttgcttttgcccattttgaatcacatgaattattacagtgtttatcctttcatatagttagctaataaaaagctttgtctacacaccctgcatatcataatgggggtaaagttaagttgagatagttttcatccataactgaacatccaaaatcttgatcagttaagaaatttcacatagcccacttacatttacaaactgaagagtaatcaatctactcaaagcatgggattattagaatcaaacattttgaaagtctgtccttgaaggactaatagaaaagtatgttctaacctttacatgaggactctattctttaactcccattaccatgtaatggcagttatattttgcagttcccacattaaagaagacctgagaatgtatccccaaaagcgtgagcttaaaatacaagactgccatattaaattttttgttgacattagtctcagtgaagactatgaaaatgctggctatagatgtcttttcccatttatctaaatatggactgctcaggaaacgagactttccattacaagtatttttaattaattgggccagcttttcaaacaaagatgccacattcaaaatagggtatattttcctatattacggtttgcccctttataaatccaagtagataggaagaaagaagacaaactttgcatctcagtatgaattattcaatttatttgaatgatttttctttacaaaacaaactcattcattagtcatgtttatctgcttaggagtttagggaacaatttggcaattttgtggttttcgagattatcgttttcttaaagtgccagtattttaaaatagcgttcttgtaattttacacgcttttgtgatggagtgctgttttgttatataatttagacttggattctttccatttgcatttgtttatgtaatttcaggaggaatactgaacatctgagtcctggatgatactaataaactaataattgcagaggttttaaa

SEQ ID NO: 446014 - DNA, 2271 bp, Homo sapiens
  misc_feature (17)..(17): n is a, c, g, or t
  misc_feature (22)..(23): n is a, c, g, or t
aggctaggtacgaggcnggtgnntgaatcggccggtgaggaggctgcgtctggctcccgctctcacagccattgcagtacattgagctccatagagacagcgccggggcaagtgagagccggacgggcactgggcgactctgtgcctcgctgaggaaaaataactaaacatgggcaaaggagatcctaagaagccgagaggcaaaatgtcatcatatgcattttttgtgcaaacttgtcgggaggagcataagaagaagcacccagatgcttcagtcaacttctcagagttttctaagaagtgctcagagaggtggaagaccatgtctgctaaagagaaaggaaaatttgaagatatggcaaaagcggacaaggcccgttatgaaagagaaatgaaaacctatatccctcccaaaggggagacaaaaaagaagttcaaggatcccaatgcacccaagaggcctccttcggccttcttcctcttctgctctgagtatcgcccaaaaatcaaaggagaacatcctggcctgtccattggtgatgttgcgaagaaactgggagagatgtggaataacactgctgcagatgacaagcagccttatgaaaagaaggctgcgaagctgaaggaaaaatacgaaaaggatattgctgcatatcgagctaaaggaaagcctgatgcagcaaaaaagggagttgtcaaggctgaaaaaagcaagaaaaagaaggaagaggaggaagatgaggaagatgaagaggatgaggaggaggaggaagatgaagaagatgaagatgaagaagaagatgatgatgatgaataagttggttctagcgcagtttttttttttcttgtctataaagcatttaacccccctgtacacaactcactccttttaaagaaaaaaattgaaatgtaaggctgtgtaagatttgtttttaaactgtacagtgtctttttttgtatagttaacacactaccgaatgtgtctttagatagccctgtcctggtggtattttcaatagccactaaccttgcctggtacagtatgggggttgtaaattggcatggaaatttaaagcaggttcttgttggtgcacagcacaaattagttatatatggggatggtagttttttcatcttcagttgtctctgatgcagcttatacgaaataattgttgttctgttaactgaataccactctgtaattgcaaaaaaaaaaaaaagttgcagctgttttgttgacattctgaatgcttctaagtaaatacaattttttttattagtattgttgtccttttcataggtctgaaatttttcttcttgaggggaagctagtcttttgcttttgcccattttgaatcacatgaattattacagtgtttatcctttcatatagttagctaataaaaagctttgtctacacaccctgcatatcataatgggggtaaagttaagttgagatagttttcatccataactgaacatccaaaatcttgatcagttaagaaatttcacatagcccacttacatttacaaactgaagagtaatcaatctactcaaagcatgggattattagaatcaaacattttgaaagtctgtccttgaaggactaatagcatgtaatggcagttatattttgcagttcccacattaaagaagacctgagaatgtatccccaaaagcgtgagcttaaaatacaagactgccatattaaattttttgttgacattagtctcagtgaagactatgaaaatgctggctatagatgtcttttcccatttatctaaatatggactgctcaggaaacgagactttccattacaagtatttttaattaattgggccagcttttcaaacaaagatgccacattcaaaatagggtatattttcctatattacggtttgcccctttataaatccaagtagataggaagaaagaagacaaactttgcatctcagtatgaattattcaatttatttgaatgatttttctttacaaaacaaactcattcattagtcatgtttatctgcttaggagtttagggaacaatttggcaattttgtggttttcgagattatcgttttcttaaagtgccagtattttaaaatagcgttcttgtaattttacacgcttttgtgatggagtgctgttttgttatataatttagacttggattctttccatttgcatttgtttatgtaatttcaggaggaatactgaacatctgagtcctggatgatactaataaactaataattgcagaggttttaaa

SEQ ID NO: 446015 - DNA, 1907 bp, Homo sapiens
  misc_feature (17)..(17): n is a, c, g, or t
  misc_feature (22)..(23): n is a, c, g, or t
aggctaggtacgaggcnggtgnntgaatcggccggtgaggaggctgcgtctggctcccgctctcacagccattgcagtacattgagctccatagagacagcgccggggcaagtgagagccggacgggcactgggcgactctgtgcctcgctgaggaaaaataactaaacatgggcaaaggagatcctaagaagccgagaggcaaaatgtcatcatatgcattttttgtgcaaacttgtcgggaggagcataagaagaagcacccagatgcttcagtcaacttctcagagttttctaagaagtgctcagagaggtggaagaccatgtctgctaaagagaaaggaaaatttgaagatatggcaaaagcggacaaggcccgttatgaaagagaaatgaaaacctatatccctcccaaaggggagacaaaaaagaagttcaaggatcccaatgcacccaagaggcctccttcggccttcttcctcttctgctctgagtatcgcccaaaaatcaaaggagaacatcctggcctgtccattggtgatgttgcgaagaaactgggagagatgtggaataacactgctgcagatgacaagcagccttatgaaaagaaggctgcgaagctgaaggaaaaatacgaaaaggatattgctgcatatcgagctaaaggaaagcctgatgcagcaaaaaagggagttgtcaaggctgaaaaaagcaagaaaaagaaggaagaggaggaagatgaggaagatgaagaggatgaggaggaggaggaagatgaagaagatgaagatgaagaagaagatgatgatgatgaataagttggttctagcgcagtttttttttttcttgtctataaagcatttaacccccctgtacacaactcactccttttaaagaaaaaaattgaaatgtaaggctgtgtaagatttgtttttaaactgtacagtgtctttttttgtatagttaacacactaccgaatgtgtctttagatagccctgtcctggtggtattttcaatagccactaaccttgcctggtacagtatgggggttgtaaattggcatggaaatttaaagcaggttcttgttggtgcacagcacaaattagttatatatggggatggtagttttttcatcttcagttgtctctgatgcagcttatacgaaataattgttgttctgttaactgaataccactctgtaattgcaaaaaaaaaaaaaagttgcagctgttttgttgacattctgaatgcttctaagtaaatacaattttttttattagagtatgtggtggtcccttttcaatagggtctcgtggaaaatttttccttccttggagaaggggaagacctagagtctctttgtggcctttgtggccccattttgggattctcacctgtgtgatttattttaaccggggggtttaatccccttctcaatatatatggttaggcctataatataaaaggctttgggttctatacacaacccgcgggaatatattacatatagtgggcggtgtaaaaggttgaaggttggacaatataggttttcaatctcaatatactgtgaatcatctcaaaaaatcctgggaaccaggtgaagaaacatttccaaattggcccaatttacactttttacacaaacgtggtagcacacgtcatccatatctcttaatctcaaaggcatggcggattcattgagagaatctcaaccatctttgggaacggtctgggcccttggagagggactatattgagaaaaaggttttggggttctaaacccttttaacctgtagaggaactctaaattctttaaaattcccaattaaccacgtgttaggggcggctaattaatttggagaggttcccccagttttaaggaaggaacctgggaatggttttcccca

SEQ ID NO: 446016 - DNA, 2269 bp, Homo sapiens
  misc_feature (17)..(17): n is a, c, g, or t
  misc_feature (22)..(23): n is a, c, g, or t
aggctaggtacgaggcnggtgnntgaatcggccggtgaggaggctgcgtctggctcccgctctcacagccattgcagtacattgagctccatagagacagcgccggggcaagtgagagccggacgggcactgggcgactctgtgcctcgctgaggaaaaataactaaacatgggcaaaggagatcctaagaagccgagaggcaaaatgtcatcatatgcattttttgtgcaaacttgtcgggaggagcataagaagaagcacccagatgcttcagtcaacttctcagagttttctaagaagtgctcagagaggtggaagaccatgtctgctaaagagaaaggaaaatttgaagatatggcaaaagcggacaaggcccgttatgaaagagaaatgaaaacctatatccctcccaaaggggagacaaaaaagaagttcaaggatcccaatgcacccaagaggcctccttcggccttcttcctcttctgctctgagtatcgcccaaaaatcaaaggagaacatcctggcctgtccattggtgatgttgcgaagaaactgggagagatgtggaataacactgctgcagatgacaagcagccttatgaaaagaaggctgcgaagctgaaggaaaaatacgaaaaggatattgctgcatatcgagctaaaggaaagcctgatgcagcaaaaaagggagttgtcaaggctgaaaaaagcaagaaaaagaaggaagaggaggaagatgaggaagatgaagaggatgaggaggaggaggaagatgaagaagatgaagatgaagaagaagatgatgatgatgaataagttggttctagcgcagtttttttttttcttgtctataaagcatttaacccccctgtacacaactcactccttttaaagaaattttgtatagttaacacactaccgaatgtgtctttagatagccctgtcctggtggtattttcaatagccactaaccttgcctggtacagtatgggggttgtaaattggcatggaaatttaaagcaggttcttgttggtgcacagcacaaattagttatatatggggatggtagttttttcatcttcagttgtctctgatgcagcttatacgaaataattgttgttctgttaactgaataccactctgtaattgcaaaaaaaaaaaaaagttgcagctgttttgttgacattctgaatgcttctaagtaaatacaattttttttattagtattgttgtccttttcataggtctgaaatttttcttcttgaggggaagctagtcttttgcttttgcccattttgaatcacatgaattattacagtgtttatcctttcatatagttagctaataaaaagctttgtctacacaccctgcatatcataatgggggtaaagttaagttgagatagttttcatccataactgaacatccaaaatcttgatcagttaagaaatttcacatagcccacttacatttacaaactgaagagtaatcaatctactcaaagcatgggattattagaatcaaacattttgaaagtctgtccttgaaggactaatagaaaagtatgttctaacctttacatgaggactctattctttaactcccattaccatgtaatggcagttatattttgcagttcccacattaaagaagacctgagaatgtatccccaaaagcgtgagcttaaaatacaagactgccatattaaattttttgttgacattagtctcagtgaagactatgaaaatgctggctatagatgtcttttcccatttatctaaatatggactgctcaggaaacgagactttccattacaagtatttttaattaattgggccagcttttcaaacaaagatgccacattcaaaatagggtatattttcctatattacggtttgcccctttataaatccaagtagataggaagaaagaagacaaactttgcatctcagtatgaattattcaatttatttgaatgatttttctttacaaaacaaactcattcattagtcatgtttatctgcttaggagtttagggaacaatttggcaattttgtggttttcgagattatcgttttcttaaagtgccagtattttaaaatagcgttcttgtaattttacacgcttttgtgatggagtgctgttttgttatataatttagacttggattctttccatttgcatttgtttatgtaatttcaggaggaatactgaacatctgagtcctggatgatactaataaactaataattgcagaggttttaaa

SEQ ID NO: 446017 - DNA, 2272 bp, Homo sapiens
cggacgcgtgggtccggacgcgtgggtacattgagctccatagagacagcgccggggcaagtgagagccggacgggcactgggcgactctgtgcctcgctgaggaaaaataactaaacatgggcaaaggagatcctaagaagccgagaggcaaaatgtcatcatatgcattttttgtgcaaacttgtcgggaggagcataagaagaagcacccagatgcttcagtcaacttctcagagttttctaagaagtgctcagagaggtggaagaccatgtctgctaaagagaaaggaaaatttgaagatatggcaaaagcggacaaggcccgttatgaaagagaaatgaaaacctatatccctcccaaaggggagacaaaaaagaagttcaaggatcccaatgcacccaagaggcctccttcggccttcttcctcttctgctctgagtatcgcccaaaaatcaaaggagaacatcctggcctgtccattggtgatgttgcgaagaaactgggagagatgtggaataacactgctgcagatgacaagcagccttatgaaaagaaggctgcgaagctgaaggaaaaatacgaaaaggatattgctgcatatcgagctaaaggaaagcctgatgcagcaaaaaagggagttgtcaaggctgaaaaaagcaagaaaaagaaggaagaggaggaagatgaggaagatgaagaggatgaggaggaggaggaagatgaagaagatgaagatgaagaagaagatgatgatgatgaataagttggttctagcgcagtttttttttttcttgtctataaagcatttaacccccctgtacacaactcactccttttaaagaaaaaaattgaaatgtaaggctgtgtaagatttgtttttaaactgtacagtgtctttttttgtatagttaacacactaccgaatgtgtctttagatagccctgtcctggtggtattttcaatagccactaaccttgcctggtacagtatgggggttgtaaattggcatggaaatttaaagcaggttcttgttggtgcacagcacaaattagttatatatggggatggtagttttttcatcttcagttgtctctgatgcagcttatacgaaataattgttgttctgttaactgaataccactctgtaattgcaaaaaaaaaaaaaagttgcagctgttttgttgacattctgaatgcttctaagtaaatacaattttttttattagtattgttgtccttttcataggtctgaaatttttcttcttgaggggaagctagtcttttgcttttgcccattttgaatcacatgaattattacagtgtttatcctttcatatagttagctaataaaaagctttgtctacacaccctgcatatcataatgggggtaaagttaagttgagatagttttcatccataactgaacatccaaaatcttgatcagttaagaaatttcacatagcccacttacatttacaaactgaagagtaatcaatctactcaaagcatgggattattagaatcaaacattttgaaagtctgtccttgaaggactaatagaaaagtatgttctaacctttacatgaggactctattctttaactcccattaccatgtaatggcagttatattttgcagttcccacattaaagaagacctgagaatgtatccccaaaagcgtgagcttaaaatacaagactgccatattaaattttttgttgacattagtctcagtgaagactatgaaaatgctggctatagatgtcttttcccatttatctaaatatggactgctcaggaaacgagactttccattacaagtatttttaattaattgggccagcttttcaaacaaagatgccacattcaaaatagggtatattttcctatattacggtttgcccctttataaatccaagtagataggaagaaagaagacaaactttgcatctcagtatgaattattcaatttatttgaatgatttttctttacaaaacaaactcattcattagtcatgtttatctgcttaggagtttagggaacaatttggcaattttgtggttttcgagattatcgttttcttaaagtgccagtattttaaaatagcgttcttgtaattttacacgcttttgtgatggagtgctgttttgttatataatttagacttggattctttccatttgcatttgtttatgtaatttcaggaggaatactgaacatctgagtcctggatgatactaataaactaataattgcagaggttttaaa

SEQ ID NO: 446018 - DNA, 1227 bp, Homo sapiens
  misc_feature (17)..(17): n is a, c, g, or t
  misc_feature (22)..(23): n is a, c, g, or t
aggctaggtacgaggcnggtgnntgaatcggccggtgaggaggctgcgtctggctcccgctctcacagccattgcagtacattgagctccatagagacagcgccggggcaagtgagagccggacgggcactgggcgactctgtgcctcgctgaggaaaaataactaaacatgggcaaaggagatcctaagaagccgagaggcaaaatgtcatcatatgcattttttgtgcaaacttgtcgggaggagcataagaagaagcacccagatgcttcagtcaacttctcagagttttctaagaagtgctcagagaggtggaagaccatgtctgctaaagagaaaggaaaatttgaagatatggcaaaagcggacaaggcccgttatgaaagagaaatgaaaacctatatccctcccaaaggggagacaaaaaagaagttcaaggatcccaatgcacccaagaggcctccttcggccttcttcctcttctgctctgagtatcgcccaaaaatcaaaggagaacatcctggcctgtccattggtgatgttgcgaagaaactgggagagatgtggaataacactgctgcagatgacaagcagccttatgaaaagaaggctgcgaagctgaaggaaaaatacgaaaaggatattgctgcatatcgagctaaaggaaagcctgatgcagcaaaaaagggagttgtcaaggctgaaaaaagcaagaaaaagaaggaagaggaggaagatgaggaagatgaagaggatgaggaggaggaggaagatgaagaagatgaagatgaagaagaagatgatgatgatgaataagttggttctagcgcagtttttttttttcttgtctataaagcatttaacccccctgtacacaactcactccttttaaagaaaaaaattgaaatgtaaggctgtgtaagatttgtttttaaactgtacagtgtctttttttgtatagttaacacactaccgaatgtgtctttagatattttatctgaaggctgcctattctcccaggaaccaaatggcctccgtcttaagaaagtatgcttactaggaaataccctgcctaccttaggaataaatgctacttaaggaaaaaataagagagctgaaaaagctggtgccatttgaaaaaaaaagggacggacatgagatttaactggtgctcaaagcttctccgatacaacatattgggtcatgtattcataatgtgcttgaca

SEQ ID NO: 446019 - DNA, 1015 bp, Homo sapiens
  misc_feature (17)..(17): n is a, c, g, or t
  misc_feature (22)..(23): n is a, c, g, or t
aggctaggtacgaggcnggtgnntgaatcggccggtgaggaggctgcgtctggctcccgctctcacagccattgcagtacattgagctccatagagacagcgccggggcaagtgagagccggacgggcactgggcgactctgtgcctcgctgaggaaaaataactaaacatgggcaaaggagatcctaagaagccgagaggcaaaatgtcatcatatgcattttttgtgcaaacttgtcgggaggagcataagaagaagcacccagatgcttcagtcaacttctcagagttttctaagaagtgctcagagaggtggaagaccatgtctgctaaagagaaaggaaaatttgaagatatggcaaaagcggacaaggcccgttatgaaagagaaatgaaaacctatatccctcccaaaggggagacaaaaaagaagttcaaggatcccaatgcacccaagaggcctccttcggccttcttcctcttctgctctgagtatcgcccaaaaatcaaaggagaacatcctggcctgtccattggtgatgttgcgaagaaactgggagagatgtggaataacactgctgcagatgacaagcagccttatgaaaagaaggctgcgaagctgaaggaaaaatacgaaaaggatattgctgcatatcgagctaaaggaaagcctgatgcagcaaaaaagggagttgtcaaggctgaaaaaagcaagaaaaagaaggaagaggaggaagatgaggaagatgaagaggatgaggaggaggaggaagatgaagaagatgaagatgaagaagaagatgatgatgatgaataagttggttctagcgcagtttttttttttcttgtctataaagcatttaacccccctgtacacaactcactccttttaaagaaaaaaattgaagtataaagcgttgagaaagtataaagcgttgaggaagtataaagcgttgagctcaacgctttatacttctccatgcatacttaatattatacttgagattcatacggg

SEQ ID NO: 446020 - DNA, 1232 bp, Homo sapiens
  misc_feature (17)..(17): n is a, c, g, or t
  misc_feature (22)..(23): n is a, c, g, or t
aggctaggtacgaggcnggtgnntgaatcggccggtgaggaggctgcgtctggctcccgctctcacagccattgcagtacattgagctccatagagacagcgccggggcaagtgagagccggacgggcactgggcgactctgtgcctcgctgaggaaaaataactaaacatgggcaaaggagatcctaagaagccgagaggcaaaatgtcatcatatgcattttttgtgcaaacttgtcgggaggagcataagaagaagcacccagatgcttcagtcaacttctcagagttttctaagaagtgctcagagaggtggaagaccatgtctgctaaagagaaaggaaaatttgaagatatggcaaaagcggacaaggcccgttatgaaagagaaatgaaaacctatatccctcccaaaggggagacaaaaaagaagttcaaggatcccaatgcacccaagaggcctccttcggccttcttcctcttctgctctgagtatcgcccaaaaatcaaaggagaacatcctggcctgtccattggtgatgttgcgaagaaactgggagagatgtggaataacactgctgcagatgacaagcagccttatgaaaagaaggctgcgaagctgaaggaaaaatacgaaaaggatattgctgcatatcgagctaaaggaaagcctgatgcagcaaaaaagggagttgtcaaggctgaaaaaagcaagaaaaagaaggaagaggaggaagatgaggaagatgaagaggatgaggaggaggaggaagatgaagaagatgaagatgaagaagaagatgatgatgatgaataagttggttctagcgcagtgtgcgctactgctcgtgtatctagcaaccaaccgtctggctcacagcttcctcctgtttaagacgtgaccagcactgtatcgctgagtgagattaggaatacacagccagcatgccttctgcttactatcacactaccgatagtgtctctgatcgacttgactgattcaattctcaatagccactaaccttgcctggcacgagattatggtggttaattgaccttggaatcctgaggatgacccagatgggtcacactccattgtaggaatatttagtgtatatcctactgtcacactatcatctattagatacagtgatagccctgggtttgtccccaatccggcctattccgcgtcctatcaccattgactgcccctcaccttccaccgtcggaac

SEQ ID NO: 446021 - DNA, 2270 bp, Homo sapiens
  misc_feature (17)..(17): n is a, c, g, or t
  misc_feature (22)..(23): n is a, c, g, or t
aggctaggtacgaggcnggtgnntgaatcggccggtgaggaggctgcgtctggctcccgctctcacagccattgcagtacattgagctccatagagacagcgccggggcaagtgagagccggacgggcactgggcgactctgtgcctcgctgaggaaaaataactaaacatgggcaaaggagatcctaagaagccgagaggcaaaatgtcatcatatgcattttttgtgcaaacttgtcgggaggagcataagaagaagcacccagatgcttcagtcaacttctcagagttttctaagaagtgctcagagaggtggaagaccatgtctgctaaagagaaaggaaaatttgaagatatggcaaaagcggacaaggcccgttatgaaagagaaatgaaaacctatatccctcccaaaggggagacaaaaaagaagttcaaggatcccaatgcacccaagaggcctccttcggccttcttcctcttctgctctgagtatcgcccaaaaatcaaaggagaacatcctggcctgtccattggtgatgttgcgaagaaactgggagagatgtggaataacactgctgcagatgacaagcagccttatgaaaagaaggctgcgaagctgaaggaaaaatacgaaaaggatattgctgcatatcgagctaaaggaaagcctgatgcagcaaaaaagggagttgtcaaggctgaaaaaagcaagaaaagatgaagaagatgaagatgaagaagaagatgatgatgatgaataagttggttctagcgcagtttttttttttcttgtctataaagcatttaacccccctgtacacaactcactccttttaaagaaaaaaattgaaatgtaaggctgtgtaagatttgtttttaaactgtacagtgtctttttttgtatagttaacacactaccgaatgtgtctttagatagccctgtcctggtggtattttcaatagccactaaccttgcctggtacagtatgggggttgtaaattggcatggaaatttaaagcaggttcttgttggtgcacagcacaaattagttatatatggggatggtagttttttcatcttcagttgtctctgatgcagcttatacgaaataattgttgttctgttaactgaataccactctgtaattgcaaaaaaaaaaaaaagttgcagctgttttgttgacattctgaatgcttctaagtaaatacaattttttttattagtattgttgtccttttcataggtctgaaatttttcttcttgaggggaagctagtcttttgcttttgcccattttgaatcacatgaattattacagtgtttatcctttcatatagttagctaataaaaagctttgtctacacaccctgcatatcataatgggggtaaagttaagttgagatagttttcatccataactgaacatccaaaatcttgatcagttaagaaatttcacatagcccacttacatttacaaactgaagagtaatcaatctactcaaagcatgggattattagaatcaaacattttgaaagtctgtccttgaaggactaatagaaaagtatgttctaacctttacatgaggactctattctttaactcccattaccatgtaatggcagttatattttgcagttcccacattaaagaagacctgagaatgtatccccaaaagcgtgagcttaaaatacaagactgccatattaaattttttgttgacattagtctcagtgaagactatgaaaatgctggctatagatgtcttttcccatttatctaaatatggactgctcaggaaacgagactttccattacaagtatttttaattaattgggccagcttttcaaacaaagatgccacattcaaaatagggtatattttcctatattacggtttgcccctttataaatccaagtagataggaagaaagaagacaaactttgcatctcagtatgaattattcaatttatttgaatgatttttctttacaaaacaaactcattcattagtcatgtttatctgcttaggagtttagggaacaatttggcaattttgtggttttcgagattatcgttttcttaaagtgccagtattttaaaatagcgttcttgtaattttacacgcttttgtgatggagtgctgttttgttatataatttagacttggattctttccatttgcatttgtttatgtaatttcaggaggaatactgaacatctgagtcctggatgatactaataaactaataattgcagaggttttaaa

SEQ ID NO: 446022 - DNA, 3328 bp, Homo sapiens
  misc_feature (17)..(17): n is a, c, g, or t
  misc_feature (22)..(23): n is a, c, g, or t
aggctaggtacgaggcnggtgnntgaatcggccggtgaggaggctgcgtctggctcccgctctcacagccattgcagtacattgagctccatagagacagcgccggggcaagtgagagccggacgggcactgggcgactctgtgcctcgctgaggaaaaataactaaacatgggcaaaggagatcctaagaagccgagaggcaaaatgtcatcatatgcattttttgtgcaaacttgtcgggaggagcataagaagaagcacccagatgcttcagtcaacttctcagagttttctaagaagtgctcagagaggtggaagaccatgtctgctaaagagaaaggaaaatttgaagatatggcaaaagcggacaaggcccgttatgaaagagaaatgaaaacctatatccctcccaaaggggagacaaaaaagaagttcaaggatcccaatgcacccaagaggcctccttcggccttcttcctcttctgctctgagtatcgcccaaaaatcaaaggagaacatcctggcctgtccattggtgatgttgcgaagaaactgggagagatgtggaataacactgctgcagatgacaagcagccttatgaaaagaaggctgcgaagctgaaggaaaaatacgaaaagggtaagaagtgtgggtttgcttggtaaaatgatgacaagtacgccagatgtatgattgtacttagtttgaggtgtaataagtttttagggtaacagctacattaagtatggtgttgatataagtcctcatccttcaaagaatgcagaggaccaaataaattagggtttttttgactaaaatgtaatcagactcagacaaaggctgtgtacatttatgttggttttgttattccccagtatcttgaagttcatgaaaatgttggtagtcacttcaagtcaaaaatgagcattttcaaatggcttggcatacagtacaaaaacaggctagacaaagtaatataggctatatttttcttagtcatatcctgaaacatttatgttcttttcctttagatactcaaaaaaccacagcatcactaagttaaattacaagtctgctgctctgtccagtaaattaataagattaaggaaatctataactcttatagttcagtaaattgaaatattaaatacttaattttcagctttagtcattctgaaaagtgtttatttctagatgtttcttaacctaattgcatgtttattgacaaattaccttttttttttaagaccacatttcctactaaggattaaggtctgacagtgtaaacctgtagagtgcttttttgcattcagaaggtggcagtgtctaccctttaatcaaagtctctacattctggttttaatagagttaggatgtggtacataattgcacctcaatgaggcataactttgcaaatattagactatgccatttcatgagttatagattgttataatgatcttgtatttttatgttcatttattgaagttctagttatttctggagttgctgtggatctacagatacgtgatattttggtataactagaatcttgatttctttcataaagttctgccatgttctatttctttccttaatgtttttttcttccctactgttttatcctccctttgctttggaaggatattgctgcatatcgagctaaaggaaagcctgatgcagcaaaaaagggagttgtcaaggctgaaaaaagcaagaaaaagaaggaagaggaggaagatgaggaagatgaagaggatgaggaggaggaggaagatgaagaagatgaagatgaagaagaagatgatgatgatgaataagttggttctagcgcagtttttttttttcttgtctataaagcatttaacccccctgtacacaactcactccttttaaagaaaaaaattgaaatgtaaggctgtgtaagatttgtttttaaactgtacagtgtctttttttgtatagttaacacactaccgaatgtgtctttagatagccctgtcctggtggtattttcaatagccactaaccttgcctggtacagtatgggggttgtaaattggcatggaaatttaaagcaggttcttgttggtgcacagcacaaattagttatatatggggatggtagttttttcatcttcagttgtctctgatgcagcttatacgaaataattgttgttctgttaactgaataccactctgtaattgcaaaaaaaaaaaaaagttgcagctgttttgttgacattctgaatgcttctaagtaaatacaattttttttattagtattgttgtccttttcataggtctgaaatttttcttcttgaggggaagctagtcttttgcttttgcccattttgaatcacatgaattattacagtgtttatcctttcatatagttagctaataaaaagctttgtctacacaccctgcatatcataatgggggtaaagttaagttgagatagttttcatccataactgaacatccaaaatcttgatcagttaagaaatttcacatagcccacttacatttacaaactgaagagtaatcaatctactcaaagcatgggattattagaatcaaacattttgaaagtctgtccttgaaggactaatagaaaagtatgttctaacctttacatgaggactctattctttaactcccattaccatgtaatggcagttatattttgcagttcccacattaaagaagacctgagaatgtatccccaaaagcgtgagcttaaaatacaagactgccatattaaattttttgttgacattagtctcagtgaagactatgaaaatgctggctatagatgtcttttcccatttatctaaatatggactgctcaggaaacgagactttccattacaagtatttttaattaattgggccagcttttcaaacaaagatgccacattcaaaatagggtatattttcctatattacggtttgcccctttataaatccaagtagataggaagaaagaagacaaactttgcatctcagtatgaattattcaatttatttgaatgatttttctttacaaaacaaactcattcattagtcatgtttatctgcttaggagtttagggaacaatttggcaattttgtggttttcgagattatcgttttcttaaagtgccagtattttaaaatagcgttcttgtaattttacacgcttttgtgatggagtgctgttttgttatataatttagacttggattctttccatttgcatttgtttatgtaatttcaggaggaatactgaacatctgagtcctggatgatactaataaactaataattgcagaggttttaaa

SEQ ID NO: 446023 - DNA, 2501 bp, Homo sapiens
  misc_feature (17)..(17): n is a, c, g, or t
  misc_feature (22)..(23): n is a, c, g, or t
aggctaggtacgaggcnggtgnntgaatcggccggtgaggaggctgcgtctggctcccgctctcacagccattgcagtacattgagctccatagagacagcgccggggcaagtgagagccggacgggcactgggcgactctgtgcctcgctgaggaaaaataactaaacatgggcaaaggagatcctaagaagccgagaggcaaaatgtcatcatatgcattttttgtgcaaacttgtcgggaggagcataagaagaagcacccagatgcttcagtcaacttctcagagttttctaagaagtgctcagagaggtggaaggtaagagggcttaaaacatgctaacaaggtaattaaaagacagtttccaattgaggatgcaaaaaaaagcctagttggcattctcgtagtgggacgctattacatagcaaaagacattggttttgaggataatttacttaaatgttacaacttaaacttacaaataattattttgtagaccatgtctgctaaagagaaaggaaaatttgaagatatggcaaaagcggacaaggcccgttatgaaagagaaatgaaaacctatatccctcccaaaggggagacaaaaaagaagttcaaggatcccaatgcacccaagaggcctccttcggccttcttcctcttctgctctgagtatcgcccaaaaatcaaaggagaacatcctggcctgtccattggtgatgttgcgaagaaactgggagagatgtggaataacactgctgcagatgacaagcagccttatgaaaagaaggctgcgaagctgaaggaaaaatacgaaaaggatattgctgcatatcgagctaaaggaaagcctgatgcagcaaaaaagggagttgtcaaggctgaaaaaagcaagaaaaagaaggaagaggaggaagatgaggaagatgaagaggatgaggaggaggaggaagatgaagaagatgaagatgaagaagaagatgatgatgatgaataagttggttctagcgcagtttttttttttcttgtctataaagcatttaacccccctgtacacaactcactccttttaaagaaaaaaattgaaatgtaaggctgtgtaagatttgtttttaaactgtacagtgtctttttttgtatagttaacacactaccgaatgtgtctttagatagccctgtcctggtggtattttcaatagccactaaccttgcctggtacagtatgggggttgtaaattggcatggaaatttaaagcaggttcttgttggtgcacagcacaaattagttatatatggggatggtagttttttcatcttcagttgtctctgatgcagcttatacgaaataattgttgttctgttaactgaataccactctgtaattgcaaaaaaaaaaaaaagttgcagctgttttgttgacattctgaatgcttctaagtaaatacaattttttttattagtattgttgtccttttcataggtctgaaatttttcttcttgaggggaagctagtcttttgcttttgcccattttgaatcacatgaattattacagtgtttatcctttcatatagttagctaataaaaagctttgtctacacaccctgcatatcataatgggggtaaagttaagttgagatagttttcatccataactgaacatccaaaatcttgatcagttaagaaatttcacatagcccacttacatttacaaactgaagagtaatcaatctactcaaagcatgggattattagaatcaaacattttgaaagtctgtccttgaaggactaatagaaaagtatgttctaacctttacatgaggactctattctttaactcccattaccatgtaatggcagttatattttgcagttcccacattaaagaagacctgagaatgtatccccaaaagcgtgagcttaaaatacaagactgccatattaaattttttgttgacattagtctcagtgaagactatgaaaatgctggctatagatgtcttttcccatttatctaaatatggactgctcaggaaacgagactttccattacaagtatttttaattaattgggccagcttttcaaacaaagatgccacattcaaaatagggtatattttcctatattacggtttgcccctttataaatccaagtagataggaagaaagaagacaaactttgcatctcagtatgaattattcaatttatttgaatgatttttctttacaaaacaaactcattcattagtcatgtttatctgcttaggagtttagggaacaatttggcaattttgtggttttcgagattatcgttttcttaaagtgccagtattttaaaatagcgttcttgtaattttacacgcttttgtgatggagtgctgttttgttatataatttagacttggattctttccatttgcatttgtttatgtaatttcaggaggaatactgaacatctgagtcctggatgatactaataaactaataattgcagaggttttaaa

SEQ ID NO: 446024 - DNA, 2443 bp, Homo sapiens
  misc_feature (17)..(17): n is a, c, g, or t
  misc_feature (22)..(23): n is a, c, g, or t
aggctaggtacgaggcnggtgnntgaatcggccggtgaggaggctgcgtctggctcccgctctcacagccattgcagtacattgagctccatagagacagcgccggggcaagtgagagccggacgggcactgggcgactctgtgcctcgctgaggaaaaataactaaacatgggcaaaggagatcctaagaagccgagaggcaaaatgtcatcatatgcattttttgtgcaaacttgtcgggaggagcataagaagaagcacccagatgcttcagtcaacttctcagagttttctaagaagtgctcagagaggtggaaggtaagagggcttaaaacatgctaacaaggtaattaaaagacagtttccaattgaggatgcggttttgaggataatttacttaaatgttacaacttaaacttacaaataattattttgtagaccatgtctgctaaagagaaaggaaaatttgaagatatggcaaaagcggacaaggcccgttatgaaagagaaatgaaaacctatatccctcccaaaggggagacaaaaaagaagttcaaggatcccaatgcacccaagaggcctccttcggccttcttcctcttctgctctgagtatcgcccaaaaatcaaaggagaacatcctggcctgtccattggtgatgttgcgaagaaactgggagagatgtggaataacactgctgcagatgacaagcagccttatgaaaagaaggctgcgaagctgaaggaaaaatacgaaaaggatattgctgcatatcgagctaaaggaaagcctgatgcagcaaaaaagggagttgtcaaggctgaaaaaagcaagaaaaagaaggaagaggaggaagatgaggaagatgaagaggatgaggaggaggaggaagatgaagaagatgaagatgaagaagaagatgatgatgatgaataagttggttctagcgcagtttttttttttcttgtctataaagcatttaacccccctgtacacaactcactccttttaaagaaaaaaattgaaatgtaaggctgtgtaagatttgtttttaaactgtacagtgtctttttttgtatagttaacacactaccgaatgtgtctttagatagccctgtcctggtggtattttcaatagccactaaccttgcctggtacagtatgggggttgtaaattggcatggaaatttaaagcaggttcttgttggtgcacagcacaaattagttatatatggggatggtagttttttcatcttcagttgtctctgatgcagcttatacgaaataattgttgttctgttaactgaataccactctgtaattgcaaaaaaaaaaaaaagttgcagctgttttgttgacattctgaatgcttctaagtaaatacaattttttttattagtattgttgtccttttcataggtctgaaatttttcttcttgaggggaagctagtcttttgcttttgcccattttgaatcacatgaattattacagtgtttatcctttcatatagttagctaataaaaagctttgtctacacaccctgcatatcataatgggggtaaagttaagttgagatagttttcatccataactgaacatccaaaatcttgatcagttaagaaatttcacatagcccacttacatttacaaactgaagagtaatcaatctactcaaagcatgggattattagaatcaaacattttgaaagtctgtccttgaaggactaatagaaaagtatgttctaacctttacatgaggactctattctttaactcccattaccatgtaatggcagttatattttgcagttcccacattaaagaagacctgagaatgtatccccaaaagcgtgagcttaaaatacaagactgccatattaaattttttgttgacattagtctcagtgaagactatgaaaatgctggctatagatgtcttttcccatttatctaaatatggactgctcaggaaacgagactttccattacaagtatttttaattaattgggccagcttttcaaacaaagatgccacattcaaaatagggtatattttcctatattacggtttgcccctttataaatccaagtagataggaagaaagaagacaaactttgcatctcagtatgaattattcaatttatttgaatgatttttctttacaaaacaaactcattcattagtcatgtttatctgcttaggagtttagggaacaatttggcaattttgtggttttcgagattatcgttttcttaaagtgccagtattttaaaatagcgttcttgtaattttacacgcttttgtgatggagtgctgttttgttatataatttagacttggattctttccatttgcatttgtttatgtaatttcaggaggaatactgaacatctgagtcctggatgatactaataaactaataattgcagaggttttaaa

SEQ ID NO: 446025 - DNA, 2283 bp, Homo sapiens
  misc_feature (17)..(17): n is a, c, g, or t
  misc_feature (22)..(23): n is a, c, g, or t
aggctaggtacgaggcnggtgnntgaatcggccggtgaggaggctgcgtctggctcccgctctcacagccattgcagtacattgagctccatagagacagcgccggggcaagtgagagccggacgggcactgggcgactctgtgcctcgctgaggaaaaataactaaacatgggcaaaggagatcctaagaagccgagaggcaaaatgtcatcatatgcattttttgtgcaaacttgtcgggaggagcataagaagaagcacccagatgcttcagtcaacttctcagagttttctaagaagtgctcagagaggtggaagaccatgtctgctaaagagaaaggaaaatttgaagatatggcaaaagcggacaaggcccgttatgaaagagaaatgaaaacctatatccctcccaaaggggagacaattcggccttcttcctcttctgctctgagtatcgcccaaaaatcaaaggagaacatcctggcctgtccattggtgatgttgcgaagaaactgggagagatgtggaataacactgctgcagatgacaagcagccttatgaaaagaaggctgcgaagctgaaggaaaaatacgaaaaggatattgctgcatatcgagctaaaggaaagcctgatgcagcaaaaaagggagttgtcaaggctgaaaaaagcaagaaaaagaaggaagaggaggaagatgaggaagatgaagaggatgaggaggaggaggaagatgaagaagatgaagatgaagaagaagatgatgatgatgaataagttggttctagcgcagtttttttttttcttgtctataaagcatttaacccccctgtacacaactcactccttttaaagaaaaaaattgaaatgtaaggctgtgtaagatttgtttttaaactgtacagtgtctttttttgtatagttaacacactaccgaatgtgtctttagatagccctgtcctggtggtattttcaatagccactaaccttgcctggtacagtatgggggttgtaaattggcatggaaatttaaagcaggttcttgttggtgcacagcacaaattagttatatatggggatggtagttttttcatcttcagttgtctctgatgcagcttatacgaaataattgttgttctgttaactgaataccactctgtaattgcaaaaaaaaaaaaaagttgcagctgttttgttgacattctgaatgcttctaagtaaatacaattttttttattagtattgttgtccttttcataggtctgaaatttttcttcttgaggggaagctagtcttttgcttttgcccattttgaatcacatgaattattacagtgtttatcctttcatatagttagctaataaaaagctttgtctacacaccctgcatatcataatgggggtaaagttaagttgagatagttttcatccataactgaacatccaaaatcttgatcagttaagaaatttcacatagcccacttacatttacaaactgaagagtaatcaatctactcaaagcatgggattattagaatcaaacattttgaaagtctgtccttgaaggactaatagaaaagtatgttctaacctttacatgaggactctattctttaactcccattaccatgtaatggcagttatattttgcagttcccacattaaagaagacctgagaatgtatccccaaaagcgtgagcttaaaatacaagactgccatattaaattttttgttgacattagtctcagtgaagactatgaaaatgctggctatagatgtcttttcccatttatctaaatatggactgctcaggaaacgagactttccattacaagtatttttaattaattgggccagcttttcaaacaaagatgccacattcaaaatagggtatattttcctatattacggtttgcccctttataaatccaagtagataggaagaaagaagacaaactttgcatctcagtatgaattattcaatttatttgaatgatttttctttacaaaacaaactcattcattagtcatgtttatctgcttaggagtttagggaacaatttggcaattttgtggttttcgagattatcgttttcttaaagtgccagtattttaaaatagcgttcttgtaattttacacgcttttgtgatggagtgctgttttgttatataatttagacttggattctttccatttgcatttgtttatgtaatttcaggaggaatactgaacatctgagtcctggatgatactaataaactaataattgcagaggttttaaa

SEQ ID NO: 446026 - DNA, 910 bp, Homo sapiens
  misc_feature (17)..(17): n is a, c, g, or t
  misc_feature (22)..(23): n is a, c, g, or t
aggctaggtacgaggcnggtgnntgaatcggccggtgaggaggctgcgtctggctcccgctctcacagccattgcagtacattgagctccatagagacagcgccggggcaagtgagagccggacgggcactgggcgactctgtgcctcgctgaggaaaaataactaaacatgggcaaaggagatcctaagaagccgagaggcaaaatgtcatcatatgcattttttgtgcaaacttgtcgggaggagcataagaagaagcacccagatgcttcagtcaacttctcagagttttctaagaagtgctcagagaggtggaagaccatgtctgctaaagagaaaggaaaatttgaagatatggcaaaagcggacaaggcccgttatgaaagagaaatgaaaacctatatccctcccaaaggggagacaaaaaagaagttcaaggatcccaatgcacccaagaggcctccttcggccttcttcctcttctgctctgagtatcgcccaaaaatcaaaggagaacatcctggcctgtccattggtgatgttgcgaagaaactgggagagatgtggaataacactgctgcagatgacaagcagccttatgaaaagaaggctgcgaagctgaaggaaaaatacgaaaaggatattgctgcatatcgagctaaaggaaagcctgatgcagcaaaaaagggagttgtcaaggctgaaaaaagcaagaaaaagaaggaagaggaggaagatgaggaagatgaagaggatgaggaggaggaggactctcctttctattgtcttgacattctttctcttatttatctctttttttctaatgtattgatttttttttcagttacacgtgtggccctcttatgtattcttatttctattacttatccttcgctcctttgtctctgc

SEQ ID NO: 446027 - DNA, 2269 bp, Homo sapiens
  misc_feature (17)..(17): n is a, c, g, or t
  misc_feature (22)..(23): n is a, c, g, or t
aggctaggtacgaggcnggtgnntgaatcggccggtgaggaggctgcgtctggctcccgctctcacagccattgcagtacattgagctccatagagacagcgccggggcaagtgagagccggacgggcactgggcgactctgtgcctcgctgaggaaaaataactaaacatgggcaaaggagatcctaagaagccgagaggcaaaatgtcatcatatgcattttttgtgcaaacttgtcgggaggagcataagaagaagcacccagatgcttcagtcaacttctcagagttttctaagaagtgctcagagaggtggaagaccatgtctgctaaagagaaaggaaaatttgaagatatggcaaaagcggacaaggcccgttatgaaagagaaatgaaaacctatatccctcccaaaggggagacaaaaaagaagttcaaggatcccaatgcacccaagaggcctccttcggccttcttcctcttctgctctgagtatcgcccaggagagatgtggaataacactgctgcagatgacaagcagccttatgaaaagaaggctgcgaagctgaaggaaaaatacgaaaaggatattgctgcatatcgagctaaaggaaagcctgatgcagcaaaaaagggagttgtcaaggctgaaaaaagcaagaaaaagaaggaagaggaggaagatgaggaagatgaagaggatgaggaggaggaggaagatgaagaagatgaagatgaagaagaagatgatgatgatgaataagttggttctagcgcagtttttttttttcttgtctataaagcatttaacccccctgtacacaactcactccttttaaagaaaaaaattgaaatgtaaggctgtgtaagatttgtttttaaactgtacagtgtctttttttgtatagttaacacactaccgaatgtgtctttagatagccctgtcctggtggtattttcaatagccactaaccttgcctggtacagtatgggggttgtaaattggcatggaaatttaaagcaggttcttgttggtgcacagcacaaattagttatatatggggatggtagttttttcatcttcagttgtctctgatgcagcttatacgaaataattgttgttctgttaactgaataccactctgtaattgcaaaaaaaaaaaaaagttgcagctgttttgttgacattctgaatgcttctaagtaaatacaattttttttattagtattgttgtccttttcataggtctgaaatttttcttcttgaggggaagctagtcttttgcttttgcccattttgaatcacatgaattattacagtgtttatcctttcatatagttagctaataaaaagctttgtctacacaccctgcatatcataatgggggtaaagttaagttgagatagttttcatccataactgaacatccaaaatcttgatcagttaagaaatttcacatagcccacttacatttacaaactgaagagtaatcaatctactcaaagcatgggattattagaatcaaacattttgaaagtctgtccttgaaggactaatagaaaagtatgttctaacctttacatgaggactctattctttaactcccattaccatgtaatggcagttatattttgcagttcccacattaaagaagacctgagaatgtatccccaaaagcgtgagcttaaaatacaagactgccatattaaattttttgttgacattagtctcagtgaagactatgaaaatgctggctatagatgtcttttcccatttatctaaatatggactgctcaggaaacgagactttccattacaagtatttttaattaattgggccagcttttcaaacaaagatgccacattcaaaatagggtatattttcctatattacggtttgcccctttataaatccaagtagataggaagaaagaagacaaactttgcatctcagtatgaattattcaatttatttgaatgatttttctttacaaaacaaactcattcattagtcatgtttatctgcttaggagtttagggaacaatttggcaattttgtggttttcgagattatcgttttcttaaagtgccagtattttaaaatagcgttcttgtaattttacacgcttttgtgatggagtgctgttttgttatataatttagacttggattctttccatttgcatttgtttatgtaatttcaggaggaatactgaacatctgagtcctggatgatactaataaactaataattgcagaggttttaaa

SEQ ID NO: 446028 - DNA, 2219 bp, Homo sapiens
cggacgcgtgggtccggacgcgtgggtacattgagctccatagagacagcgccggggcaagtgagagccggacgggcactgggcgactctgtgcctcgctgaggaaaaataactaaacatgggcaaaggagatcctaagaagccgagaggcaaaatgtcatcatatgcattttttgtgcaaacttgtcgggaggagcataagaagaagcacccagatgcttcagtcaacttctcagagttttctaagaagtgctcagagaggtggaagaccatgtctgctaaagagaaaggaaaatttgaagatatggcaaaagcggacaaggcccgttatgaaagagaaatgaaaacctatatccctcccaaaggggagacaaaaaagaagttcaaggatcccaatgcacccaagaggcctccttcggccttcttcctcttctgctctgagtatcgcccaaaaatcaaaggagaacatcctggcctgtccattggtgatgttgcgaagaaactgggagagatgtggaataacactgctgcagatgacaagcagccttatgaaaagaaggctgcgaagctgaaggaaaaatacgaaaaggatattgctgcatatcgagctaaaggaaagcctgatgcagcaaaaaagggagttgtcaaggctgaaaaaagcaagaaaagatgaagaagatgaagatgaagaagaagatgatgatgatgaataagttggttctagcgcagtttttttttttcttgtctataaagcatttaacccccctgtacacaactcactccttttaaagaaaaaaattgaaatgtaaggctgtgtaagatttgtttttaaactgtacagtgtctttttttgtatagttaacacactaccgaatgtgtctttagatagccctgtcctggtggtattttcaatagccactaaccttgcctggtacagtatgggggttgtaaattggcatggaaatttaaagcaggttcttgttggtgcacagcacaaattagttatatatggggatggtagttttttcatcttcagttgtctctgatgcagcttatacgaaataattgttgttctgttaactgaataccactctgtaattgcaaaaaaaaaaaaaagttgcagctgttttgttgacattctgaatgcttctaagtaaatacaattttttttattagtattgttgtccttttcataggtctgaaatttttcttcttgaggggaagctagtcttttgcttttgcccattttgaatcacatgaattattacagtgtttatcctttcatatagttagctaataaaaagctttgtctacacaccctgcatatcataatgggggtaaagttaagttgagatagttttcatccataactgaacatccaaaatcttgatcagttaagaaatttcacatagcccacttacatttacaaactgaagagtaatcaatctactcaaagcatgggattattagaatcaaacattttgaaagtctgtccttgaaggactaatagaaaagtatgttctaacctttacatgaggactctattctttaactcccattaccatgtaatggcagttatattttgcagttcccacattaaagaagacctgagaatgtatccccaaaagcgtgagcttaaaatacaagactgccatattaaattttttgttgacattagtctcagtgaagactatgaaaatgctggctatagatgtcttttcccatttatctaaatatggactgctcaggaaacgagactttccattacaagtatttttaattaattgggccagcttttcaaacaaagatgccacattcaaaatagggtatattttcctatattacggtttgcccctttataaatccaagtagataggaagaaagaagacaaactttgcatctcagtatgaattattcaatttatttgaatgatttttctttacaaaacaaactcattcattagtcatgtttatctgcttaggagtttagggaacaatttggcaattttgtggttttcgagattatcgttttcttaaagtgccagtattttaaaatagcgttcttgtaattttacacgcttttgtgatggagtgctgttttgttatataatttagacttggattctttccatttgcatttgtttatgtaatttcaggaggaatactgaacatctgagtcctggatgatactaataaactaataattgcagaggttttaaa

SEQ ID NO: 446029 - DNA, 1669 bp, Homo sapiens
atgtacagcccagagctgattcttgagtatcccggtcatcttgctacacaagacacagagagtgaagaaggaagaggaggaagatgaggaagatgaagaggatgaggaggaggaggaagatgaagaagatgaagatgaagaagaagatgatgatgatgaataagttggttctagcgcagtttttttttttcttgtctataaagcatttaacccccctgtacacaactcactccttttaaagaaaaaaattgaaatgtaaggctgtgtaagatttgtttttaaactgtacagtgtctttttttgtatagttaacacactaccgaatgtgtctttagatagccctgtcctggtggtattttcaatagccactaaccttgcctggtacagtatgggggttgtaaattggcatggaaatttaaagcaggttcttgttggtgcacagcacaaattagttatatatggggatggtagttttttcatcttcagttgtctctgatgcagcttatacgaaataattgttgttctgttaactgaataccactctgtaattgcaaaaaaaaaaaaaagttgcagctgttttgttgacattctgaatgcttctaagtaaatacaattttttttattagtattgttgtccttttcataggtctgaaatttttcttcttgaggggaagctagtcttttgcttttgcccattttgaatcacatgaattattacagtgtttatcctttcatatagttagctaataaaaagctttgtctacacaccctgcatatcataatgggggtaaagttaagttgagatagttttcatccataactgaacatccaaaatcttgatcagttaagaaatttcacatagcccacttacatttacaaactgaagagtaatcaatctactcaaagcatgggattattagaatcaaacattttgaaagtctgtccttgaaggactaatagaaaagtatgttctaacctttacatgaggactctattctttaactcccattaccatgtaatggcagttatattttgcagttcccacattaaagaagacctgagaatgtatccccaaaagcgtgagcttaaaatacaagactgccatattaaattttttgttgacattagtctcagtgaagactatgaaaatgctggctatagatgtcttttcccatttatctaaatatggactgctcaggaaacgagactttccattacaagtatttttaattaattgggccagcttttcaaacaaagatgccacattcaaaatagggtatattttcctatattacggtttgcccctttataaatccaagtagataggaagaaagaagacaaactttgcatctcagtatgaattattcaatttatttgaatgatttttctttacaaaacaaactcattcattagtcatgtttatctgcttaggagtttagggaacaatttggcaattttgtggttttcgagattatcgttttcttaaagtgccagtattttaaaatagcgttcttgtaattttacacgcttttgtgatggagtgctgttttgttatataatttagacttggattctttccatttgcatttgtttatgtaatttcaggaggaatactgaacatctgagtcctggatgatactaataaactaataattgcagaggttttaaa

SEQ ID NO: 446030 - DNA, 1578 bp, Homo sapiens
  misc_feature (17)..(17): n is a, c, g, or t
  misc_feature (22)..(23): n is a, c, g, or t
aggctaggtacgaggcnggtgnntgaatcggccggtgaggaggctgcgtctggctcccgctctcacagccattgcagtacattgagctccatagagacagcgccggggcaagtgagagccggacgggcactgggcgactctgtgcctcgctgaggaaaaataactaaacatgggcaaaggagatcctaagaagccgagaggcaaaatgtcatcatatgcattttttgtgcaaacttgtcgggaggagcataagaagaagcacccagatgcttcagtcaacttctcagagttttctaagaagtgctcagagaggtggaagaccatgtctgctaaagagaaaggaaaatttgaagatatggcaaaagcggacaaggcccgttatgaaagagaaatgaaaacctatatccctcccaaaggggagacaaaaaagaagttcaaggatcccaatgcacccaagaggcctccttcggccttcttcctcttctgctctgagtatcgcccaaaaatcaaaggagaacatcctggcctgtccattggtgatgttgcgaagaaactgggagagatgtggaataacactgctgcagatgacaagcagccttatgaaaagaaggctgcgaagctgaaggaaaaatacgaaaagggtaagaagtgtgggtttgcttggtaaaatgatgacaagtacgccagatgtatgattgtacttagtttgaggtgtaataagtttttagggtaacagctacattaagtatggtgttgatataagtcctcatccttcaaagaatgcagaggaccaaataaattagggtttttttgactaaaatgtaatcagactcagacaaaggctgtgtacatttatgttggttttgttattccccagtatcttgaagttcatgaaaatgttggtagtcacttcaagtcaaaaatgagcattttcaaatggcttggcatacagtacaaaaacaggctagacaaagtaatataggctatatttttcttagtcatatcctgaaacatttatgttcttttcctttagatactcaaaaaaccacagcatcactaagttaaattacaagtctgctgctctgtccagtaaattaataagattaaggaaatctataactcttatagttcagtaaattgaaatattaaatacttaattttcagctttagtcattctgaaaagtgtttatttctagatgtttcttaacctaattgcatgtttattgacaaattaccttttttttttaagaccacatttcctactaaggattaaggtctgacagtgtaaacctgtagagtgcttttttgcattcagaaggtggcagtgtctaccctttaatcaaagtctctacattctggttttaatagagttaggatgtggtacataattgcacctcaatgaggcataactttgcaaatattagactatgccatttcatgagttatagattgttataatgatcttgtattttaacttagtgatgctgtggttttttgagtatctaaaggaaaagaacataaatgtttcaggatatgactaagaaaaatatagcctatattactttgtctagcctgttt

SEQ ID NO: 446031 - DNA, 722 bp, Homo sapiens
  misc_feature (17)..(17): n is a, c, g, or t
  misc_feature (22)..(23): n is a, c, g, or t
aggctaggtacgaggcnggtgnntgaatcggccggtgaggaggctgcgtctggctcccgctctcacagccattgcagtacattgagctccatagagacagcgccggggcaagtgagagccggacgggcactgggcgactctgtgcctcgctgaggaaaaataactaaacatgggcaaaggagatcctaagaagccgagaggcaaaatgtcatcatatgcattttttgtgcaaacttgtcgggaggagcataagaagaagcacccagatgcttcagtcaacttctcagagttttctaagaagtgctcagagaggtggaagaccatgtctgctaaagagaaaggaaaatttgaagatatggcaaaagcggacaaggcccgttatgaaagagaaatgaaaacctatatccctcccaaaggggagacaaaaaagaagttcaaggatcccaatgcacccaagaggcctccttcggccttcttcctcttctgctctgagtatcgcccaaaaatcaaaggagaacatcctggcctgtccattggtgatgttgcgaagaaactgggagagatgtggaataacactgctgcagatgacaagcagccttatgagacgctttccaccctgaaggcataatcccaaaaggcttttcgctgatattgagctaaagaaagccctgtgccacacaaagggactttcaaggctgtaaaagcccgatcgaacccccccg

SEQ ID NO: 446032 - DNA, 663 bp, Homo sapiens
tcaactctttatacttcctcacgctttatacttccgtattgaattcaagtataatattaagtatgcatggacgaagtataaagcgttgagctcaacgctttatacttcctcatttcggccttcttcctcttctgctctgagtatcgcccaaaaatcaaaggagaacatcctggcctgtccattggtgatgttgcgaagaaactgggagagatgtggaataacactgctgcagatgacaagcagccttatgaaaagaaggctgcgaagctgaaggaaaaatacgaaaaggatattgctgcatatcgagctaaaggaaagcctgatgcagcaaaaaagggagttgtcaaggctgaaaaaagcaagaaaaagaaggaagaggaggaagatgaggaagatgaagaggatgaggaggaggaggaagatgaagaagatgaagatgaagaagaagatgatgatgatgaataagttggttctagcgcagtttttttttttcttgtctataaagcatttaacccccctgtacacaactcactccttttaaagaaaaaaattgaagtataaagcgttgagaaagtataaagcgttgaggaagtataaagcgttgagctcaacgctttatacttctccatgcatacttaatattatacttgagattcatacggg

SEQ ID NO: 446033 - DNA, 857 bp, Homo sapiens
  misc_feature (17)..(17): n is a, c, g, or t
  misc_feature (22)..(23): n is a, c, g, or t
aggctaggtacgaggcnggtgnntgaatcggccggtgaggaggctgcgtctggctcccgctctcacagccattgcagtacattgagctccatagagacagcgccggggcaagtgagagccggacgggcactgggcgactctgtgcctcgctgaggaaaaataactaaacatgggcaaaggagatcctaagaagccgagaggcaaaatgtcatcatatgcattttttgtgcaaacttgtcgggaggagcataagaagaagcacccagatgcttcagtcaacttctcagagttttctaagaagtgctcagagaggtggaaggaccatggtctggttaagaggaagggaaatttggaggattgtggcaaagagcggacaaggcgcggttatgaaaaaaaaaaaaaaaaaaaaaaaaaaaaaaaaaaaaaaaaaaaaaaaaaaaaaaaaaaaaaaaaaaaaaaaaaaacaaaaaaaaaagagaggagggggcgggcggcgaagaaaaaactactcccgggggggagcggccacaccgttacgagcgcgaccacgaacatctttttttagacagagggggctccccctatggggggacgacgttcaataatacaggccgagggagggcggcgggacggccccgtttataaaaaaccacaggcggcgcggcgaggggcacaaacaacgtcgaagcgccgcagcactattcttgggggaaggcaagaacacccccacgcgggggggggaggccaacaagagtggcggcaaccaccctacccccaaacacacttaaccacgccgggaggaagataacaaaacacagcaacaaatcgagaggtgtgacaacccgacggccaacatc

SEQ ID NO: 446034 - DNA, 1046 bp, Homo sapiens
gacgctgacgaaagagacctgcttgcgcgtcgctgttccgtggtccgcgcgagcgtggtcgggagccgctggttcctggggtgacccgcggaggtgggagagggaagggcttccgaagccggcgggggtgccatggaccctctccgccggcgcggccttcacagctgggccgcgccgggcatccgtagtccgctctcccaaagcctcggtggagctgaagctgccacagagtgcatgttcacaaagggtcatcacacacggagctgcccctccctgtctccctagagcccatcttcgaggccagggcttttctaccaggattctggggtgtttctcctcctttcctccctcccagatcttctcacggtaaggggagcagcgaaagcgcagggactttgcattccacgacccgttctgactagtcaacagccgatctgtccctgctgctctaattccagctgccctgccttgttttaacttcagagaaagggggagttctcatttgataagtttaagcctttgctttcgtaggaaggtcatgtggcttaagggacatcgtgaccgcgtatgctatttctgcctgtgcattctaaatcttgggggcagcatattccagaagtccttttggtcgattggttctgtgtcctaggataacaatttgtagtttctgaccatttctttacagaaaaaccacaattggtattttggactgcggggtttttagtggtctcaaactaaatgattatattctggaataatgctgacaatttggatagggtggtgtggaggaaacaagtctcgtgtagaagaaattatttagtaaaaaggattttagtttttggtacttctgaatgcaaatggccaaggaatccagcagtttgttggggtttctccagacaaaaataggctggttagtttgtttacctttttctgttgctttactagattgttaatgtatttgtatatttaagatctagctagttaggtttttcttttttatgaattgtgattaaaattggagaaagtagtacttcctcctgaaatag

SEQ ID NO: 446035 - DNA, 3826 bp, Homo sapiens
  misc_feature (17)..(17): n is a, c, g, or t
  misc_feature (22)..(23): n is a, c, g, or t
aggctaggtacgaggcnggtgnntgaatcggccggtgaggaggctgcgtctggctcccgctctcacagccattgcagtacattgagctccatagagacagcgccggggcaagtgagagccggacgggcactgggcgactctgtgcctcgctgaggaaaaataactaaacatgggcaaaggagatcctaagaagccgagaggcaaaatgtcatcatatgcattttttgtgcaaacttgtcgggaggagcataagaagaagcacccagatgcttcagtcaacttctcagagttttctaagaagtgctcagagaggtggaagaccatgtctgctaaagagaaaggaaaatttgaagatatggcaaaagcggacaaggcccgttatgaaagagaaatgaaaacctatatccctcccaaaggggagacaaaaaagaagttcaaggatcccaatgcacccaagaggcctccttcggccttcttcctcttctgctctgagtatcgcccaaaaatcaaaggagaacatcctggcctgtccattggtgatgttgcgaagaaactgggagagatgtggaataacactgctgcagatgacaagcagccttatgaaaagaaggctgcgaagctgaaggaaaaatacgaaaaggatattgctgcatatcgagctaaaggaaagcctgatgcagcaaaaaagggagttgtcaaggctgaaaaaagcaagaaaaagaaggaagaggaggaagatgaggaagatgaagaggatgaggaggaggaggaagatgaagaagatgaagatgaagaagaagatgatgatgatgaataagttggttctagcgcagtttttttttttcttgtctataaagcatttaacccccctgtacacaactcactccttttaaagaaaaaaattgaaatgtaaggctgtgtaagatttgtttttaaactgtacagtgtctttttttgtatagttaacacactaccgaatgtgtctttagatagccctgtcctggtggtattttcaatagccactaaccttgcctggtacagtatgggggttgtaaattggcatggaaatttaaagcaggttcttgttggtgcacagcacaaattagttatatatggggatggtagttttttcatcttcagttgtctctgatgcagcttatacgaaataattgttgttctgttaactgaataccactctgtaattgcaaaaaaaaaaaaaagttgcagctgttttgttgacattctgaatgcttctaagtaaatacaattttttttattagtattgttgtccttttcataggtctgaaatttttcttcttgaggggaagctagtcttttgcttttgcccattttgaatcacatgaattattacagtgtttatcctttcatatagttagctaataaaaagctttgtctacacaccctgcatatcataatgggggtaaagttaagttgagatagttttcatccataactgaacatccaaaatcttgatcagttaagaaatttcacatagcccacttacatttacaaactgaagagtaatcaatctactcaaagcatgggattattagaatcaaacattttgaaagtctgtccttgaaggactaatagaaaagtatgttctaacctttacatgaggactctattctttaactcccattaccatgtaatggcagttatattttgcagttcccacattaaagaagacctgagaatgtatccccaaaagcgtgagcttaaaatacaagactgccatattaaattttttgttgacattagtctcagtgaagactatgaaaatgctggctatagatgtcttttcccatttatctaaatatggactgctcaggaaacgagactttccattacaagtatttttaattaattgggccagcttttcaaacaaagatgccacattcaaaatagggtatattttcctatattacggtttgcccctttataaatccaagtagataggaagaaagaagacaaactttgcatctcagtatgaattattcaatttatttgaatgatttttctttacaaaacaaactcattcattagtcatgtttatctgcttaggagtttagggaacaatttggcaattttgtggttttcgagattatcgttttcttaaagtgccagtattttaaaatagcgttcttgtaattttacacgcttttgtgatggagtgctgttttgttatataatttagacttggattctttccatttgcatttgtttatgtaatttcaggaggaatactgaacatctgagtcctggatgatactaataaactaataattgcagaggttttaaatactagttaaatggctttcacttaagaacttaagattttgttacatatttttaaatcttgtttctaataatacctcttagcagtaccttttaaataagtataagggatggcaaagtttttccctttaaaaatactcactttatgcttataaataggttaatgggctgataaaaggttttgtcaaacattgcaagtattcggtgctatatataaaggaggaaaaactagttttactttcagaatgatttaaacaagatttttaaaaacaagatacatgcaagcgaacagcagggttagtgataggctgcaattgtgtcgaacatcagattttttgttaagaggagcaaatgactcaatctgatttagatggaagtttctactgtatagaaatcaccattaatcaccaacattaataattctgatccatttaaaatgaattctggctcaaggagaatttgtaactttagtaggtacgtcatgacaactaccatttttttaagatgttgagaatgggaacagtttttttagggtttattcttgaccacagatcttaagaaaatggacaaaacccctcttcaatctgaagattagtatggtttggtgttctaacagtatcccctagaagttggatgtctaaaactcaagtaaatggaagtgggaggcaatttagaataagtgtaaagccttgtaactgaagatgattttttttagaaagtgtatagaaactattttaatgccaagatagttacagtgctgtggggtttaaagactttgttgacatcaagaaaagactaaatctataattaattgggccaacttttaaaatgaagatgctttttaaaactaatgaactaagatgtataaatcttagtttttttgtattttaaagataggcatatggcatattgattaacgagtcaaatttcctaactttgctgtgcaaaggttgagagctattgctgattagttaccacagttctgatgatcgtcccatcacagtgttgttaatgtttgctgtatttattaattttcttaaagtgaaatctgaaaaatgaaatttgtgtgtcctgtgtacccgaggggtaatgattaaatgataaagataagaaaagcgcccatgtaacacaaactgccattcaacaggtatttcccttactacctaaggaattgtaaccattgctcagacattgtaggatttaactatgttgaaaactacaggagaggccgggcgcagtggctcacgcctgtaatcccagcactttgggaggccaaggcgggcagatcacgaggtcaggagattgagaccatcctggctaacgtggtgaaaccccgcctctactaaaaatacaaaaaattagccaagcgtggtgctgggcgcctgtagtcccagtaactcaggaggctgaggcaggagaatggcgtgaacccgggaggcggaggttgcagtgagccgagattgtgccactgcactccagcctgggtgacagagcaagactccatctc

SEQ ID NO: 446036 - DNA, 1748 bp, Homo sapiens
  misc_feature (17)..(17): n is a, c, g, or t
  misc_feature (22)..(23): n is a, c, g, or t
aggctaggtacgaggcnggtgnntgaatcggccggtgaggaggctgcgtctggctcccgctctcacagccattgcagtacattgagctccatagagacagcgccggggcaagtgagagccggacgggcactgggcgactctgtgcctcgctgaggaaaaataactaaacatgggcaaaggagatcctaagaagccgagaggcaaaatgtcatcatatgcattttttgtgcaaacttgtcgggaggagcataagaagaagcacccagatgcttcagtcaacttctcagagttttctaagaagtgctcagagaggtggaagaccatgtctgctaaagagaaaggaaaatttgaagatatggcaaaagcggacaaggcccgttatgaaagagaaatgaaaacctatatccctcccaaaggggagacaaaaaagaagttcaaggatcccaatgcacccaagaggcctccttcggccttcttcctcttctgctctgagtatcgcccaaaaatcaaaggagaacatcctggcctgtccattggtgatgttgcgaagaaactgggagagatgtggaataacactgctgcagatgacaagcagccttatgaaaagaaggctgcgaagctgaaggaaaaatacgaaaaggatattgctgcatatcgagctaaaggaaagcctgatgcagcaaaaaagggagttgtcaaggctgaaaaaagcaagaaaaagaaggaagaggaggaagatgaggaagatgaagaggatgaggaggaggaggaagatgaagaagatgaagatgaagaagaagatgatgatgatgaataagttggttctagcgcagtttttttttttcttgtctataaagcatttaacccccctgtacacaactcactccttttaaagaaaaaaattgaaatgtaaggctgtgtaagatttgtttttaaactgtacagtgtctttttttgtatagttaacacactaccgaatgtgtctttagatagccctgtcctggtggtattttcaatagccactaaccttgcctggtacagtatgggggttgtaaattggcatggaaatttaaagcaggttcttgttggtgcacagcacaaattagttatatatggggatggtagttttttcatcttcagttgtctctgatgcagcttatacgaaataattgttgttctgttaactgaataccactctgtaattgcaaaaaaaaaaaaaagttgcagctgttttgttgacattctgaatgcttctaagtaaatacaattttttttattagaaaaaaaaaaaaaaaaaaaaaaaaaaaaaaaaaaaaaaaaaaaaaaaaaaaaaaaaaaaaaaaaaaaaaaaaaaacaaaaaaaaaagagaggagggggcgggcggcgaagaaaaaactactcccgggggggagcggccacaccgttacgagcgcgaccacgaacatctttttttagacagagggggctccccctatggggggacgacgttcaataatacaggccgagggagggcggcgggacggccccgtttataaaaaaccacaggcggcgcggcgaggggcacaaacaacgtcgaagcgccgcagcactattcttgggggaaggcaagaacacccccacgcgggggggggaggccaacaagagtggcggcaaccaccctacccccaaacacacttaaccacgccgggaggaagataacaaaacacagcaacaaatcgagaggtgtgacaacccgacggccaacatc

SEQ ID NO: 446037 - DNA, 1513 bp, Homo sapiens
  misc_feature (17)..(17): n is a, c, g, or t
  misc_feature (22)..(23): n is a, c, g, or t
aggctaggtacgaggcnggtgnntgaatcggccggtgaggaggctgcgtctggctcccgctctcacagccattgcagtacattgagctccatagagacagcgccggggcaagtgagagccggacgggcactgggcgactctgtgcctcgctgaggaaaaataactaaacatgggcaaaggagatcctaagaagccgagaggcaaaatgtcatcatatgcattttttgtgcaaacttgtcgggaggagcataagaagaagcacccagatgcttcagtcaacttctcagagttttctaagaagtgctcagagaggtggaagaccatgtctgctaaagagaaaggaaaatttgaagatatggcaaaagcggacaaggcccgttatgaaagagaaatgaaaacctatatccctcccaaaggggagacaaaaaagaagttcaaggatcccaatgcacccaagaggcctccttcggccttcttcctcttctgctctgagtatcgcccaaaaatcaaaggagaacatcctggcctgtccattggtgatgttgcgaagaaactgggagagatgtggaataacactgctgcagatgacaagcagccttatgaaaagaaggctgcgaagctgaaggaaaaatacgaaaaggatattgctgcatatcgagctaaaggaaagcctgatgcagcaaaaaagggagttgtcaaggctgaaaaaagcaagaaaaagaaggaagaggaggaagatgaggaagatgaagaggatgaggaggaggaggaagatgaagaagatgaagatgaagaagaagatgatgatgatgaataagttggttctagcgcagtttttttttttcttgtctataaagcatttaacccccctgtacacaactcactccttttaaagaaaaaaattgaaatgtaaggctgtgtaagatttgtttttaaactgtacagtgtctttttttgtatagttaacacactaccgaatgtgtctttagatagccctgtcctggtggtattttcaatagccactaaccttgcctggtacagtatgggggttgtaaattggcatggaaatttaaagcaggttcttgttggtgcacagcacaaattagttatatatggggatggtagttttttcatcttcagttgtctctgatgcagcttatacgaaataattgttgttctgttaactgaataccactctgtaattgcaaaaaaaaaaaaaagttgcagctgttttgttgacattctgaatgcttctaagtaaactcacccatcgtttcataaagtatggtggccctttcatagggtccggacattttccttcgcgagggggagagcgcagcctttgggctttgggccacttcgtgatccaccatgacttatcacgggggtgaccctttcaataataggtgggcaatctaaaagggttgtggtgtaaccccggggttatacaaacggggggagggcaagctcggaaaagtcccccatcaggggagacccacacctgtctccggaa

SEQ ID NO: 446038 - DNA, 1076 bp, Homo sapiens
  misc_feature (17)..(17): n is a, c, g, or t
  misc_feature (22)..(23): n is a, c, g, or t
aggctaggtacgaggcnggtgnntgaatcggccggtgaggaggctgcgtctggctcccgctctcacagccattgcagtacattgagctccatagagacagcgccggggcaagtgagagccggacgggcactgggcgactctgtgcctcgctgaggaaaaataactaaacatgggcaaaggagatcctaagaagccgagaggcaaaatgtcatcatatgcattttttgtgcaaacttgtcgggaggagcataagaagaagcacccagatgcttcagtcaacttctcagagttttctaagaagtgctcagagaggtggaagaccatgtctgctaaagagaaaggaaaatttgaagatatggcaaaagcggacaaggcccgttatgaaagagaaatgaaaacctatatccctcccaaaggggagacaaaaaagaagttcaaggatcccaatgcacccaagaggcctccttcggccttcttcctcttctgctctgagtatcgcccaaaaatcaaaggagaacatcctggcctgtccattggtgatgttgcgaagaaactgggagagatgtggaataacactgctgcagatgacaagcagccttatgaaaagaaggctgcgaagctgaaggaaaaatacgaaaaggatattgctgcatatcgagctaaaggaaagcctgatgcagcaaaaaagggagttgtcaaggctgaaaaaagcaagaaaaagaaggaagaggaggaagatgaggaagatgaagaggatgaggaggaggaggaagatgaagaagatgaagatgaagaagaagatgatgatgatgaataagttggttctagcgcagtttttttttttcttgtctataaagcatttaacccccctgtacacaactcactccttttaaagaaaaaaattgaaatgtaaggctgtgtaagatttgtttttaaactgtacagtgtctttttttgtatagttaacacactaccgaatgtgtctttagatagccctgtcctggtggtattttcaatagccactaaccttgcctggtacagtcaggaagttgctaggtaagaagtgcgaggggacg

SEQ ID NO: 446039 - DNA, 2260 bp, Homo sapiens
  misc_feature (17)..(17): n is a, c, g, or t
  misc_feature (22)..(23): n is a, c, g, or t
aggctaggtacgaggcnggtgnntgaatcggccggtgaggaggctgcgtctggctcccgctctcacagccattgcagtacattgagctccatagagacagcgccggggcaagtgagagccggacgggcactgggcgactctgtgcctcgctgaggaaaaataactaaacatgggcaaaggagatcctaagaagccgagaggcaaaatgtcatcatatgcattttttgtgcaaacttgtcgggaggagcataagaagaagcacccagatgcttcagtcaacttctcagagttttctaagaagtgctcagagaggtggaagaccatgtctgctaaagagaaaggaaaatttgaagatatggcaaaagcggacaaggcccgttatgaaagagaaatgaaaacctatatccctcccaaaggggagacaaaaaagaagttcaaggatcccaatgcacccaagaggcctccttcggccttcttcctcttctgctctgagtatcgcccaaaaatcaaaggagaacatcctggcctgtccattggtgatgttgcgaagaaactgggagagatgtggaataacactgctgcagatgacaagcagccttatgaaaagaaggctgcgaagctgaaggaaaaatacgaaaaggatattgctgcatatcgagctaaaggaaagcctgatgcagcaaaaaagggagttgtcaaggctgaaaaaagcaagaaaaagaaggaagaggaggaagatgaggaagatgaagaggatgaggaggaggaggattttttttttcttgtctataaagcatttaacccccctgtacacaactcactccttttaaagaaaaaaattgaaatgtaaggctgtgtaagatttgtttttaaactgtacagtgtctttttttgtatagttaacacactaccgaatgtgtctttagatagccctgtcctggtggtattttcaatagccactaaccttgcctggtacagtatgggggttgtaaattggcatggaaatttaaagcaggttcttgttggtgcacagcacaaattagttatatatggggatggtagttttttcatcttcagttgtctctgatgcagcttatacgaaataattgttgttctgttaactgaataccactctgtaattgcaaaaaaaaaaaaaagttgcagctgttttgttgacattctgaatgcttctaagtaaatacaattttttttattagtattgttgtccttttcataggtctgaaatttttcttcttgaggggaagctagtcttttgcttttgcccattttgaatcacatgaattattacagtgtttatcctttcatatagttagctaataaaaagctttgtctacacaccctgcatatcataatgggggtaaagttaagttgagatagttttcatccataactgaacatccaaaatcttgatcagttaagaaatttcacatagcccacttacatttacaaactgaagagtaatcaatctactcaaagcatgggattattagaatcaaacattttgaaagtctgtccttgaaggactaatagaaaagtatgttctaacctttacatgaggactctattctttaactcccattaccatgtaatggcagttatattttgcagttcccacattaaagaagacctgagaatgtatccccaaaagcgtgagcttaaaatacaagactgccatattaaattttttgttgacattagtctcagtgaagactatgaaaatgctggctatagatgtcttttcccatttatctaaatatggactgctcaggaaacgagactttccattacaagtatttttaattaattgggccagcttttcaaacaaagatgccacattcaaaatagggtatattttcctatattacggtttgcccctttataaatccaagtagataggaagaaagaagacaaactttgcatctcagtatgaattattcaatttatttgaatgatttttctttacaaaacaaactcattcattagtcatgtttatctgcttaggagtttagggaacaatttggcaattttgtggttttcgagattatcgttttcttaaagtgccagtattttaaaatagcgttcttgtaattttacacgcttttgtgatggagtgctgttttgttatataatttagacttggattctttccatttgcatttgtttatgtaatttcaggaggaatactgaacatctgagtcctggatgatactaataaactaataattgcagaggttttaaa

SEQ ID NO: 446040 - DNA, 2230 bp, Homo sapiens
ttaattcggcggccgcggatccgagccggacgggcactgggcgactctgtgcctcgctgaggaaaaataactaaacatgggcaaaggagatcctaagaagccgagaggcaaaatgtcatcatatgcattttttgtgcaaacttgtcgggaggagcataagaagaagcacccagatgcttcagtcaacttctcagagttttctaagaagtgctcagagaggtggaagaccatgtctgctaaagagaaaggaaaatttgaagatatggcaaaagcggacaaggcccgttatgaaagagaaatgaaaacctatatccctcccaaaggggagacaaaaaagaagttcaaggatcccaatgcacccaagaggcctccttcggccttcttcctcttctgctctgagtatcgcccaaaaatcaaaggagaacatcctggcctgtccattggtgatgttgcgaagaaactgggagagatgtggaataacactgctgcagatgacaagcagccttatgaaaagaaggctgcgaagctgaaggaaaaatacgaaaaggatattgctgcatatcgagctaaaggaaagcctgatgcagcaaaaaagggagttgtcaaggctgaaaaaagcaagaaaaagaaggaagaggaggaagatgaggaagatgaagaggatgaggaggaggaggaagatgaagaagatgaagatgaagaagaagatgatgatgatgaataagttggttctagcgcagtttttttttttcttgtctataaagcatttaacccccctgtacacaactcactccttttaaagaaaaaaattgaaatgtaaggctgtgtaagatttgtttttaaactgtacagtgtctttttttgtatagttaacacactaccgaatgtgtctttagatagccctgtcctggtggtattttcaatagccactaaccttgcctggtacagtatgggggttgtaaattggcatggaaatttaaagcaggttcttgttggtgcacagcacaaattagttatatatggggatggtagttttttcatcttcagttgtctctgatgcagcttatacgaaataattgttgttctgttaactgaataccactctgtaattgcaaaaaaaaaaaaaagttgcagctgttttgttgacattctgaatgcttctaagtaaatacaattttttttattagtattgttgtccttttcataggtctgaaatttttcttcttgaggggaagctagtcttttgcttttgcccattttgaatcacatgaattattacagtgtttatcctttcatatagttagctaataaaaagctttgtctacacaccctgcatatcataatgggggtaaagttaagttgagatagttttcatccataactgaacatccaaaatcttgatcagttaagaaatttcacatagcccacttacatttacaaactgaagagtaatcaatctactcaaagcatgggattattagaatcaaacattttgaaagtctgtccttgaaggactaatagaaaagtatgttctaacctttacatgaggactctattctttaactcccattaccatgtaatggcagttatattttgcagttcccacattaaagaagacctgagaatgtatccccaaaagcgtgagcttaaaatacaagactgccatattaaattttttgttgacattagtctcagtgaagactatgaaaatgctggctatagatgtcttttcccatttatctaaatatggactgctcaggaaacgagactttccattacaagtatttttaattaattgggccagcttttcaaacaaagatgccacattcaaaatagggtatattttcctatattacggtttgcccctttataaatccaagtagataggaagaaagaagacaaactttgcatctcagtatgaattattcaatttatttgaatgatttttctttacaaaacaaactcattcattagtcatgtttatctgcttaggagtttagggaacaatttggcaattttgtggttttcgagattatcgttttcttaaagtgccagtattttaaaatagcgttcttgtaattttacacgcttttgtgatggagtgctgttttgttatataatttagacttggattctttccatttgcatttgtttatgtaatttcaggaggaatactgaacatctgagtcctggatgatactaataaactaataattgcagaggttttaaa

SEQ ID NO: 446041 - DNA, 2281 bp, Homo sapiens
tcaactctttatacttcctcacgctttatacttccgtattgaattcaagtataatattaagtatgcatggacgaagtataaagcgttgagctcaacgctttatacttcctcataaaaataactaaacatgggcaaaggagatcctaagaagccgagaggcaaaatgtcatcatatgcattttttgtgcaaacttgtcgggaggagcataagaagaagcacccagatgcttcagtcaacttctcagagttttctaagaagtgctcagagaggtggaagaccatgtctgctaaagagaaaggaaaatttgaagatatggcaaaagcggacaaggcccgttatgaaagagaaatgaaaacctatatccctcccaaaggggagacaaaaaagaagttcaaggatcccaatgcacccaagaggcctccttcggccttcttcctcttctgctctgagtatcgcccaaaaatcaaaggagaacatcctggcctgtccattggtgatgttgcgaagaaactgggagagatgtggaataacactgctgcagatgacaagcagccttatgaaaagaaggctgcgaagctgaaggaaaaatacgaaaaggatattgctgcatatcgagctaaaggaaagcctgatgcagcaaaaaagggagttgtcaaggctgaaaaaagcaagaaaaagaaggaagaggaggaagatgaggaagatgaagaggatgaggaggaggaggaagatgaagaagatgaagatgaagaagaagatgatgatgatgaataagttggttctagcgcagtttttttttttcttgtctataaagcatttaacccccctgtacacaactcactccttttaaagaaaaaaattgaaatgtaaggctgtgtaagatttgtttttaaactgtacagtgtctttttttgtatagttaacacactaccgaatgtgtctttagatagccctgtcctggtggtattttcaatagccactaaccttgcctggtacagtatgggggttgtaaattggcatggaaatttaaagcaggttcttgttggtgcacagcacaaattagttatatatggggatggtagttttttcatcttcagttgtctctgatgcagcttatacgaaataattgttgttctgttaactgaataccactctgtaattgcaaaaaaaaaaaaaagttgcagctgttttgttgacattctgaatgcttctaagtaaatacaattttttttattagtattgttgtccttttcataggtctgaaatttttcttcttgaggggaagctagtcttttgcttttgcccattttgaatcacatgaattattacagtgtttatcctttcatatagttagctaataaaaagctttgtctacacaccctgcatatcataatgggggtaaagttaagttgagatagttttcatccataactgaacatccaaaatcttgatcagttaagaaatttcacatagcccacttacatttacaaactgaagagtaatcaatctactcaaagcatgggattattagaatcaaacattttgaaagtctgtccttgaaggactaatagaaaagtatgttctaacctttacatgaggactctattctttaactcccattaccatgtaatggcagttatattttgcagttcccacattaaagaagacctgagaatgtatccccaaaagcgtgagcttaaaatacaagactgccatattaaattttttgttgacattagtctcagtgaagactatgaaaatgctggctatagatgtcttttcccatttatctaaatatggactgctcaggaaacgagactttccattacaagtatttttaattaattgggccagcttttcaaacaaagatgccacattcaaaatagggtatattttcctatattacggtttgcccctttataaatccaagtagataggaagaaagaagacaaactttgcatctcagtatgaattattcaatttatttgaatgatttttctttacaaaacaaactcattcattagtcatgtttatctgcttaggagtttagggaacaatttggcaattttgtggttttcgagattatcgttttcttaaagtgccagtattttaaaatagcgttcttgtaattttacacgcttttgtgatggagtgctgttttgttatataatttagacttggattctttccatttgcatttgtttatgtaatttcaggaggaatactgaacatctgagtcctggatgatactaataaactaataattgcagaggttttaaa

SEQ ID NO: 446042 - DNA, 2478 bp, Homo sapiens
  misc_feature (17)..(17): n is a, c, g, or t
  misc_feature (22)..(23): n is a, c, g, or t
aggctaggtacgaggcnggtgnntgaatcggccggtgaggaggctgcgtctggctcccgctctcacagccattgcagtacattgagctccatagagacagcgccggggcaagtgagagccggacgggcactgggcgactctgtgcctcgctgaggaaaaataactaaacatgggcaaaggagatcctaagaagccgagaggcaaaatgtcatcatatgcattttttgtgcaaacttgtcgggaggagcataagaagaagcacccagatgcttcagtcaacttctcagagttttctaagaagtgctcagagaggtggaagaccatgtctgctaaagagaaaggaaaatttgaagatatggcaaaagcggacaaggcccgttatgaaagagaaatgaaaacctatatccctcccaaaggggagacaaaaaagaagttcaaggatcccaatgcacccaagaggcctccttcggccttcttcctcttctgctctgagtatcgcccaaaaatcaaaggagaacatcctggcctgtccattggtgatgttgcgaagaaactgggagagatgtggaataacactgctgcagatgacaagcagccttatgaaaagaaggctgcgaagctgaaggaaaaatacgaaaagttctagttatttctggagttgctgtggatctacagatacgtgatattttggtataactagaatcttgatttctttcataaagttctgccatgttctatttctttccttaatgtttttttcttccctactgttttatcctccctttgctttggaaggatattgctgcatatcgagctaaaggaaagcctgatgcagcaaaaaagggagttgtcaaggctgaaaaaagcaagaaaaagaaggaagaggaggaagatgaggaagatgaagaggatgaggaggaggaggaagatgaagaagatgaagatgaagaagaagatgatgatgatgaataagttggttctagcgcagtttttttttttcttgtctataaagcatttaacccccctgtacacaactcactccttttaaagaaaaaaattgaaatgtaaggctgtgtaagatttgtttttaaactgtacagtgtctttttttgtatagttaacacactaccgaatgtgtctttagatagccctgtcctggtggtattttcaatagccactaaccttgcctggtacagtatgggggttgtaaattggcatggaaatttaaagcaggttcttgttggtgcacagcacaaattagttatatatggggatggtagttttttcatcttcagttgtctctgatgcagcttatacgaaataattgttgttctgttaactgaataccactctgtaattgcaaaaaaaaaaaaaagttgcagctgttttgttgacattctgaatgcttctaagtaaatacaattttttttattagtattgttgtccttttcataggtctgaaatttttcttcttgaggggaagctagtcttttgcttttgcccattttgaatcacatgaattattacagtgtttatcctttcatatagttagctaataaaaagctttgtctacacaccctgcatatcataatgggggtaaagttaagttgagatagttttcatccataactgaacatccaaaatcttgatcagttaagaaatttcacatagcccacttacatttacaaactgaagagtaatcaatctactcaaagcatgggattattagaatcaaacattttgaaagtctgtccttgaaggactaatagaaaagtatgttctaacctttacatgaggactctattctttaactcccattaccatgtaatggcagttatattttgcagttcccacattaaagaagacctgagaatgtatccccaaaagcgtgagcttaaaatacaagactgccatattaaattttttgttgacattagtctcagtgaagactatgaaaatgctggctatagatgtcttttcccatttatctaaatatggactgctcaggaaacgagactttccattacaagtatttttaattaattgggccagcttttcaaacaaagatgccacattcaaaatagggtatattttcctatattacggtttgcccctttataaatccaagtagataggaagaaagaagacaaactttgcatctcagtatgaattattcaatttatttgaatgatttttctttacaaaacaaactcattcattagtcatgtttatctgcttaggagtttagggaacaatttggcaattttgtggttttcgagattatcgttttcttaaagtgccagtattttaaaatagcgttcttgtaattttacacgcttttgtgatggagtgctgttttgttatataatttagacttggattctttccatttgcatttgtttatgtaatttcaggaggaatactgaacatctgagtcctggatgatactaataaactaataattgcagaggttttaaa

SEQ ID NO: 446043 - DNA, 989 bp, Homo sapiens
  misc_feature (17)..(17): n is a, c, g, or t
  misc_feature (22)..(23): n is a, c, g, or t
aggctaggtacgaggcnggtgnntgaatcggccggtgaggaggctgcgtctggctcccgctctcacagccattgcagtacattgagctccatagagacagcgccggggcaagtgagagccggacgggcactgggcgactctgtgcctcgctgaggaaaaataactaaacatgggcaaaggagatcctaagaagccgagaggcaaaatgtcatcatatgcattttttgtgcaaacttgtcgggaggagcataagaagaagcacccagatgcttcagtcaacttctcagagttttctaagaagtgctcagagaggtggaagaccatgtctgctaaagagaaaggaaaatttgaagatatggcaaaagcggacaaggcccgttatgaaagagaaatgaaaacctatatccctcccaaaggggagacaaaaaagaagttcaaggatcccaatgcacccaagaggcctccttcggccttcttcctcttctgctctgagtatcgcccaaaaatcaaaggagaacatcctggcctgtccattggtgatgttgcgaagaaactgggagagatgtggaataacactgctgcagatgacaagcagccttatgaaaagaaggctgcgaagctgaaggaaaaatacgaaaaggatattgctgcatatcgagctaaaggaaagcctgatgcagcaaaaaagggagttgtcaaggctgaaaaaagcaagaaaaagaaggaagaggaggaagatgaggaagatgaagaggatgaggaggaggaggaaatgatcggggcatcgaagcagtgggtctcatagtcgtcggtagctgagacaactgtctcgttgcccagctgggttggcaaatgggggtcgcatttctgttcagggatacgggataggtgggaccaggtgatagaagtatggtgtagagggtgatgagcgagggctgcagcagatctgagttgggctgtacgtactgtagcttgggatggacaggagc

SEQ ID NO: 446044 - DNA, 1971 bp, Homo sapiens
tcaactctttatacttcctcacgctttatacttccgtattgaattcaagtataatattaagtatgcatggacgaagtataaagcgttgagctcaacgctttatacttcctcatttcggccttcttcctcttctgctctgagtatcgcccaaaaatcaaaggagaacatcctggcctgtccattggtgatgttgcgaagaaactgggagagatgtggaataacactgctgcagatgacaagcagccttatgaaaagaaggctgcgaagctgaaggaaaaatacgaaaaggatattgctgcatatcgagctaaaggaaagcctgatgcagcaaaaaagggagttgtcaaggctgaaaaaagcaagaaaaagaaggaagaggaggaagatgaggaagatgaagaggatgaggaggaggaggaagatgaagaagatgaagatgaagaagaagatgatgatgatgaataagttggttctagcgcagtttttttttttcttgtctataaagcatttaacccccctgtacacaactcactccttttaaagaaaaaaattgaaatgtaaggctgtgtaagatttgtttttaaactgtacagtgtctttttttgtatagttaacacactaccgaatgtgtctttagatagccctgtcctggtggtattttcaatagccactaaccttgcctggtacagtatgggggttgtaaattggcatggaaatttaaagcaggttcttgttggtgcacagcacaaattagttatatatggggatggtagttttttcatcttcagttgtctctgatgcagcttatacgaaataattgttgttctgttaactgaataccactctgtaattgcaaaaaaaaaaaaaagttgcagctgttttgttgacattctgaatgcttctaagtaaatacaattttttttattagtattgttgtccttttcataggtctgaaatttttcttcttgaggggaagctagtcttttgcttttgcccattttgaatcacatgaattattacagtgtttatcctttcatatagttagctaataaaaagctttgtctacacaccctgcatatcataatgggggtaaagttaagttgagatagttttcatccataactgaacatccaaaatcttgatcagttaagaaatttcacatagcccacttacatttacaaactgaagagtaatcaatctactcaaagcatgggattattagaatcaaacattttgaaagtctgtccttgaaggactaatagaaaagtatgttctaacctttacatgaggactctattctttaactcccattaccatgtaatggcagttatattttgcagttcccacattaaagaagacctgagaatgtatccccaaaagcgtgagcttaaaatacaagactgccatattaaattttttgttgacattagtctcagtgaagactatgaaaatgctggctatagatgtcttttcccatttatctaaatatggactgctcaggaaacgagactttccattacaagtatttttaattaattgggccagcttttcaaacaaagatgccacattcaaaatagggtatattttcctatattacggtttgcccctttataaatccaagtagataggaagaaagaagacaaactttgcatctcagtatgaattattcaatttatttgaatgatttttctttacaaaacaaactcattcattagtcatgtttatctgcttaggagtttagggaacaatttggcaattttgtggttttcgagattatcgttttcttaaagtgccagtattttaaaatagcgttcttgtaattttacacgcttttgtgatggagtgctgttttgttatataatttagacttggattctttccatttgcatttgtttatgtaatttcaggaggaatactgaacatctgagtcctggatgatactaataaactaataattgcagaggttttaaa

SEQ ID NO: 446045 - DNA, 1882 bp, Homo sapiens
ctcgaccgatacattctgctctatctatcatcgatatctgctgttgtgtatcgcccgagcggatcagggcgtgagaattctggtctagtccaaaggggaggtattaaagcaatctggagagatgtggaataacactgctgcagatgacaagcagccttatgaaaagaaggctgcgaagctgaaggaaaaatacgaaaaggatattgctgcatatcgagctaaaggaaagcctgatgcagcaaaaaagggagttgtcaaggctgaaaaaagcaagaaaaagaaggaagaggaggaagatgaggaagatgaagaggatgaggaggaggaggaagatgaagaagatgaagatgaagaagaagatgatgatgatgaataagttggttctagcgcagtttttttttttcttgtctataaagcatttaacccccctgtacacaactcactccttttaaagaaaaaaattgaaatgtaaggctgtgtaagatttgtttttaaactgtacagtgtctttttttgtatagttaacacactaccgaatgtgtctttagatagccctgtcctggtggtattttcaatagccactaaccttgcctggtacagtatgggggttgtaaattggcatggaaatttaaagcaggttcttgttggtgcacagcacaaattagttatatatggggatggtagttttttcatcttcagttgtctctgatgcagcttatacgaaataattgttgttctgttaactgaataccactctgtaattgcaaaaaaaaaaaaaagttgcagctgttttgttgacattctgaatgcttctaagtaaatacaattttttttattagtattgttgtccttttcataggtctgaaatttttcttcttgaggggaagctagtcttttgcttttgcccattttgaatcacatgaattattacagtgtttatcctttcatatagttagctaataaaaagctttgtctacacaccctgcatatcataatgggggtaaagttaagttgagatagttttcatccataactgaacatccaaaatcttgatcagttaagaaatttcacatagcccacttacatttacaaactgaagagtaatcaatctactcaaagcatgggattattagaatcaaacattttgaaagtctgtccttgaaggactaatagaaaagtatgttctaacctttacatgaggactctattctttaactcccattaccatgtaatggcagttatattttgcagttcccacattaaagaagacctgagaatgtatccccaaaagcgtgagcttaaaatacaagactgccatattaaattttttgttgacattagtctcagtgaagactatgaaaatgctggctatagatgtcttttcccatttatctaaatatggactgctcaggaaacgagactttccattacaagtatttttaattaattgggccagcttttcaaacaaagatgccacattcaaaatagggtatattttcctatattacggtttgcccctttataaatccaagtagataggaagaaagaagacaaactttgcatctcagtatgaattattcaatttatttgaatgatttttctttacaaaacaaactcattcattagtcatgtttatctgcttaggagtttagggaacaatttggcaattttgtggttttcgagattatcgttttcttaaagtgccagtattttaaaatagcgttcttgtaattttacacgcttttgtgatggagtgctgttttgttatataatttagacttggattctttccatttgcatttgtttatgtaatttcaggaggaatactgaacatctgagtcctggatgatactaataaactaataattgcagaggttttaaa

SEQ ID NO: 446046 - DNA, 780 bp, Homo sapiens
  misc_feature (17)..(17): n is a, c, g, or t
  misc_feature (22)..(23): n is a, c, g, or t
aggctaggtacgaggcnggtgnntgaatcggccggtgaggaggctgcgtctggctcccgctctcacagccattgcagtacattgagctccatagagacagcgccggggcaagtgagagccggacgggcactgggcgactctgtgcctcgctgaggaaaaataactaaacatgggcaaaggagatcctaagaagccgagaggcaaaatgtcatcatatgcattttttgtgcaaacttgtcgggaggagcataagaagaagcacccagatgcttcagtcaacttctcagagttttctaagaagtgctcagagaggtggaagaccatgtctgctaaagagaaaggaaaatttgaagatatggcaaaagcggacaaggcccgttatgaaagagaaatgaaaacctatatccctcccaaaggggagacaaaaaagaagttcaaggatcccaatgcacccaagaggcctccttcggccttcttcctcttctgctctgagtatcgcccaaaaatcaaaggagaacatcctggcctgtccattggtgatgttgcgaagaaactgggagagatgtggaataacactgctgcagatgacaagcagccttatgaaaagaaggctgcgaagctgaaggaaaaatacgaaaagcaatcaacgacgaagaatatgcgggcggaattcgggcccattgggcaatcggcctatagagagtcgtattacattactgggcggcgtttaacacgtcgtgctgggacaccctgggtatcccattaacggctggagaactc

SEQ ID NO: 446047 - DNA, 2103 bp, Homo sapiens
ctccagcgtcgccggccccgttccatttccacagctcctcctccccggccgcgcgcccctcccgccccgcgcgcgcctcctctttctcgcggccgagttcagcccgggcagccatatgggggatacgccagcaacagacgccggccgccaagatctgcatccctaggccacgctaagaccctggggaagagcgcaggagcccgggagaagggctggaaggaggggactggacgtgcggagaattcccccctaaaaggcagaagcccccgcccccaccctcgagctccgctcgggcagagcgcctgcctgcctgccgctgctgcgggcgcccacctcgcccagccatgccaggcccggccaccgacgcggggaagatccctttctgcgacgccaaggaagaaatccgtgccgggctcgaaagctctgagggcggcggcggcccggagaggccaggcgcgcgcgggcagcggcagaacatcgtctggaggaatgtcgtcctgatgagcttgctccacttgggggccgtgtactccctggtgctcatccccaaagccaagccactcactctgctctgggcctacttctgcttcctcctggccgctctgggtgtgacagctggtgcccatcgcttgtggagccacaggtcctaccgggccaagctgcctctgaggatatttctggctgtcgccaactccatggctttccagaatgacatcttcgagtggtccagggaccaccgagcccaccacaagtactcagagacggatgctgacccccacaatgcccgccggggcttcttcttctcccatattgggtggctgtttgttcgcaagcatcgagatgttattgagaaggggagaaagcttgacgtcactgacctgcttgctgatcctgtggtccggatccagagaaatacacagcacatccagaaagaaggaagagctctcaatcaagaggcagcgtgtgagatgcttcgtgagtggcatcaagggcatatattgaaagtcacccttcccggattacacattttagctttgttacatactcattgtaaccactccgaaaagtgctgcttgatgctgcgtgctctttctgtgtccctggaggtattctgaaggtcagaagagagatatacaacagcgaggcttggtgataacgtatagaataacagacggggactccacacccaggccttttttaacggtgtgaagcatagacagagctgcagtctgtgctaacattaggttatttattgattcaatcagttgacacaaggaggcagctacggggaggtaaaatatggtcctaaaatcaaaaagatttcagttttgtcattctgtctctgagattctatttccacatctagagcagggtaataatgatacctaccttacaaaattattgggagaatacattagttaatatatgtgaaagtatggaggagatgtgcaataaatatttgtgttattaactacacatacagcactctataggagatattccatttataaaaactttaggttctaaaaacctgtacacgttgattatttttgtaagtcaaaagtgattaagaggagtttaagctatcatttccagatgtatttctataaataaaaacataagtatattcagttgatttggggtggagagttccatagatgtctgttaggtccgcttggtccagagctgagttcaagtcctgaatatccttgttaattttctgtcttgttgatctgtctaatattgacagtggggtattaaagtctcccactattattatatgggagtctaagtctccttgtaggtctctaagaacttgctttatgaatctgggtgctcctgtattaggtgcatacatatttaggatagttagctcttcttgctgcattgatcccattaccattatataatgcccttctttgtcttttttgatctttgttggtttaaagtctgttttattagagactaggattgcaacccctgctatttttttttttttttttgcttgataaatattcctgtatccctttattttgagcctatatgtgtctttgcacgtgaggtgggtctcctgaatacagcacaccgatgggttttgactct

SEQ ID NO: 446048 - DNA, 3154 bp, Homo sapiens
tcgctcagttcgacaaacctcgccccgcctcccgcaacgaacgcccgggggcagatatcaatacagcacagacgcccagggacgccctctccacgacacgcagtagcccaggacgccaaattaaattgcgcgggagcacttaagctgggggatacgccagcaacagacgccggccgccaagatctgcatccctaggccacgctaagaccctggggaagagcgcaggagcccgggagaagggctggaaggaggggactggacgtgcggagaattcccccctaaaaggcagaagcccccgcccccaccctcgagctccgctcgggcagagcgcctgcctgcctgccgctgctgcgggcgcccacctcgcccagccatgccaggcccggccaccgacgcggggaagatccctttctgcgacgccaaggaagaaatccgtgccgggctcgaaagctctgagggcggcggcggcccggagaggccaggcgcgcgcgggcagcggcagaacatcgtctggaggaatgtcgtcctgatgagcttgctccacttgggggccgtgtactccctggtgctcatccccaaagccaagccactcactctgctctgggcctacttctgcttcctcctggccgctctgggtgtgacagctggtgcccatcgcttgtggagccacaggtcctaccgggccaagctgcctctgaggatatttctggctgtcgccaactccatggctttccagaatgacatcttcgagtggtccagggaccaccgagcccaccacaagtactcagagacggatgctgacccccacaatgcccgccggggcttcttcttctcccatattgggtggctgtttgttcgcaagcatcgagatgttattgagaaggggagaaagcttgacgtcactgacctgcttgctgatcctgtggtccggatccagagaaagtactataagatctccgtggtgctcatgtgctttgtggtccccacgctggtgccctggtacatctggggagagagtctgtggaattcctacttcttggcctctattctccgctataccatctcactcaacatcagctggctggtcaacagcgccgcccacatgtatggaaaccggccctatgacaagcacatcagccctcggcagaacccactcgtcgctctgggtgccattggtgaaggcttccataattaccatcacacctttccctttgactactctgcgagtgaatttggcttaaattttaacccaaccacctggttcattgatttcatgtgctggctggggctggccactgaccgcaaacgggcaaccaagccgatgatcgaggcccggaaggccaggactggagacagcagtgcttgaacttggaacagccatcccacatgtctgccgttgcaacctcggttcatggctttggttacaatagctctcttgtacattggatcgtgggagggggcagagggtggggaaggaacgagtcaatgtggtttgggaatgttttgtttatctcaaaataatgttgaaatacaattatcaatgaaaaaactttcgtttttttttttggttggtttggtttttgagacagagtctcactctgtcacccaggctggagtgcagtggcgcagtctcggctcactgcagcctccacctacctggttcaagcaattctcctgcctcagcctcctgagtagctgagattacaggagcctgccaccacacccagctaattttttggtatttttagtagagacagggtttcatcatgttggccagactggcctcgaattcctgacctcaggcaatccacccgcctcggcctcccaaagagctgggattacaggcgtgagccaccgcaccctgccgaaaaaaactttttttttttggagacggaggctcgctctgtcccccaggctggagtgcagtggcgagatctcagctcactgcaagctccgcctcccgggttcacgccattctcctgcctcagcctcccgagtagctgggagccagcgcgcccagcctaaaaaacttttcaagtcaatattactacgatttaacattagagtgtggacatgtgatttaatcgctatagctaaaatacgtcaaatatacgttgtcatgtgcttgaacatgatgctaaccctgacaggatgaaggaaagtaatattctttcagtgtagttcaggagagcatttgttttcttttctaccaattaacccatcattgcttttaaacaaccatctgaaggagcagagaggcagggtagaagacagaagggggatctatgtggtaactaaagaatgtttctgttttgttaattattgtgtgtgtgtggttttattgtttgcttaagagaatcaaaaactgaaaaaaatgagaatacaggaaatggctcttgtttatttttttgctgtgtttacagcttgttaatgctctactgtctttgtttcaagagagatttgttcactgcccagctcgttttgtgtcctgagccctatgcccagcccaccttataaatcatgcctgtttagatgtttgattttgttctgtttgctattgttatcttaaaggtgtataactctgacatgccagacatcaaattaagctcaaattaagctctcgtttaaatgtttaaacacctaatttatattctaattgatcccagccactgatgcatgtactttagctacttctgctaaataagcatattaattttccacatcaggccatcagatcttgagaaccaacagttatctagaattccgtgtctactaatgtttcacctgcatgcagccttcattaattttgtagcaaaatataaagtgatcattatgtagtttctggattaaaaaaatttgtgtgtgaagttgctttgtaaagtgcatgtggaattaatgggacagtgtgccctttgtgttagatgttagagcaaaagaaagggcttatagtgttagtattggagcactttgaagatagatattttcagaaaagatgtaggatttaaaagttaaattttaaattttagaaaaagatatgatggcaattggaaatagtcacaatgaagttcttcatccagtaggtgtttaacagtgttattttgccactggtaatgtgtaaactgtgagtgatttacaataaatgattatgaattca

SEQ ID NO: 446049 - DNA, 2892 bp, Homo sapiens
ctccagcgtcgccggccccgttccatttccacagctcctcctccccggccgcgcgcccctcccgccccgcgcgcgcctcctctttctcgcggccgagttcagcccgggcagccatatgggggatacgccagcaacagacgccggccgccaagatctgcatccctaggccacgctaagaccctggggaagagcgcaggagcccgggagaagggctggaaggaggggactggacgtgcggagaattcccccctaaaaggcagaagcccccgcccccaccctcgagctccgctcgggcagagcgcctgcctgcctgccgctgctgcgggcgcccacctcgcccagccatgccaggcccggccaccgacgcggggaagatccctttctgcgacgccaaggaagaaatccgtgccgggctcgaaagctctgagggcggcggcggcccggagaggccaggcgcgcgcgggcagcggcagaacatcgtctggaggaatgtcgtcctgatgagcttgctccacttgggggccgtgtactccctggtgctcatccccaaagccaagccactcactctgctctgggcctacttctgcttcctcctggccgctctgggtgtgacagctggtgcccatcgcttgtggagccacaggtcctaccgggccaagctgcctctgaggatatttctggctgtcgccaactccatggctttccagaatgacatcttcgagtggtccagggaccaccgagcccaccacaagtactcagagacggatgctgacccccacaatgcccgccggggcttcttcttctcccatattgggtggctgtttgttcgcaagcatcgagatgttattgagaaggggagaaagcttgacgtcactgacctgcttgctgatcctgtggtccggatccagagaaagtgaaggcttccataattaccatcacacctttccctttgactactctgcgagtgaatttggcttaaattttaacccaaccacctggttcattgatttcatgtgctggctggggctggccactgaccgcaaacgggcaaccaagccgatgatcgaggcccggaaggccaggactggagacagcagtgcttgaacttggaacagccatcccacatgtctgccgttgcaacctcggttcatggctttggttacaatagctctcttgtacattggatcgtgggagggggcagagggtggggaaggaacgagtcaatgtggtttgggaatgttttgtttatctcaaaataatgttgaaatacaattatcaatgaaaaaactttcgtttttttttttggttggtttggtttttgagacagagtctcactctgtcacccaggctggagtgcagtggcgcagtctcggctcactgcagcctccacctacctggttcaagcaattctcctgcctcagcctcctgagtagctgagattacaggagcctgccaccacacccagctaattttttggtatttttagtagagacagggtttcatcatgttggccagactggcctcgaattcctgacctcaggcaatccacccgcctcggcctcccaaagagctgggattacaggcgtgagccaccgcaccctgccgaaaaaaactttttttttttggagacggaggctcgctctgtcccccaggctggagtgcagtggcgagatctcagctcactgcaagctccgcctcccgggttcacgccattctcctgcctcagcctcccgagtagctgggagccagcgcgcccagcctaaaaaacttttcaagtcaatattactacgatttaacattagagtgtggacatgtgatttaatcgctatagctaaaatacgtcaaatatacgttgtcatgtgcttgaacatgatgctaaccctgacaggatgaaggaaagtaatattctttcagtgtagttcaggagagcatttgttttcttttctaccaattaacccatcattgcttttaaacaaccatctgaaggagcagagaggcagggtagaagacagaagggggatctatgtggtaactaaagaatgtttctgttttgttaattattgtgtgtgtgtggttttattgtttgcttaagagaatcaaaaactgaaaaaaatgagaatacaggaaatggctcttgtttatttttttgctgtgtttacagcttgttaatgctctactgtctttgtttcaagagagatttgttcactgcccagctcgttttgtgtcctgagccctatgcccagcccaccttataaatcatgcctgtttagatgtttgattttgttctgtttgctattgttatcttaaaggtgtataactctgacatgccagacatcaaattaagctcaaattaagctctcgtttaaatgtttaaacacctaatttatattctaattgatcccagccactgatgcatgtactttagctacttctgctaaataagcatattaattttccacatcaggccatcagatcttgagaaccaacagttatctagaattccgtgtctactaatgtttcacctgcatgcagccttcattaattttgtagcaaaatataaagtgatcattatgtagtttctggattaaaaaaatttgtgtgtgaagttgctttgtaaagtgcatgtggaattaatgggacagtgtgccctttgtgttagatgttagagcaaaagaaagggcttatagtgttagtattggagcactttgaagatagatattttcagaaaagatgtaggatttaaaagttaaattttaaattttagaaaaagatatgatggcaattggaaatagtcacaatgaagttcttcatccagtaggtgtttaacagtgttattttgccactggtaatgtgtaaactgtgagtgatttacaataaatgattatgaattca

SEQ ID NO: 446050 - DNA, 3163 bp, Homo sapiens
tgtctaggccggtataactgcagttctttcattacagttagtaccgagacgtcatggtgagtcaggcgctatctccggactgaatgcgtctgcacgttccgtcggacgacgctggagaccctagtggcgagatagcgccagactacaataacgccggtcgcacaagtatctgacattccctagtgctacgctcaggaccctggggtaaagagcgcagagatgccgccgcgtgataaatgggctcggtaattgaggtgacatggccgctgtgtgttacatcaaccccctagaatggcagaagcccccgcccccaccctcgagctccgctcgggcagagcgcctgcctgcctgccgctgctgcgggcgcccacctcgcccagccatgccaggcccggccaccgacgcggggaagatccctttctgcgacgccaaggaagaaatccgtgccgggctcgaaagctctgagggcggcggcggcccggagaggccaggcgcgcgcgggcagcggcagaacatcgtctggaggaatgtcgtcctgatgagcttgctccacttgggggccgtgtactccctggtgctcatccccaaagccaagccactcactctgctctgggcctacttctgcttcctcctggccgctctgggtgtgacagctggtgcccatcgcttgtggagccacaggtcctaccgggccaagctgcctctgaggatatttctggctgtcgccaactccatggctttccagaatgacatcttcgagtggtccagggaccaccgagcccaccacaagtactcagagacggatgctgacccccacaatgcccgccggggcttcttcttctcccatattgggtggctgtttgttcgcaagcatcgagatgttattgagaaggggagaaagcttgacgtcactgacctgcttgctgatcctgtggtccggatccagagaaagtactataagatctccgtggtgctcatgtgctttgtggtccccacgctggtgccctggtacatctggggagagagtctgtggaattcctacttcttggcctctattctccgctataccatctcactcaacatcagctggctggtcaacagcgccgcccacatgtatggaaaccggccctatgacaagcacatcagccctcggcagaacccactcgtcgctctgggtgccattggtgaaggcttccataattaccatcacacctttccctttgactactctgcgagtgaatttggcttaaattttaacccaaccacctggttcattgatttcatgtgctggctggggctggccactgaccgcaaacgggcaaccaagccgatgatcgaggcccggaaggccaggactggagacagcagtgcttgaacttggaacagccatcccacatgtctgccgttgcaacctcggttcatggctttggttacaatagctctcttgtacattggatcgtgggagggggcagagggtggggaaggaacgagtcaatgtggtttgggaatgttttgtttatctcaaaataatgttgaaatacaattatcaatgaaaaaactttcgtttttttttttggttggtttggtttttgagacagagtctcactctgtcacccaggctggagtgcagtggcgcagtctcggctcactgcagcctccacctacctggttcaagcaattctcctgcctcagcctcctgagtagctgagattacaggagcctgccaccacacccagctaattttttggtatttttagtagagacagggtttcatcatgttggccagactggcctcgaattcctgacctcaggcaatccacccgcctcggcctcccaaagagctgggattacaggcgtgagccaccgcaccctgccgaaaaaaactttttttttttggagacggaggctcgctctgtcccccaggctggagtgcagtggcgagatctcagctcactgcaagctccgcctcccgggttcacgccattctcctgcctcagcctcccgagtagctgggagccagcgcgcccagcctaaaaaacttttcaagtcaatattactacgatttaacattagagtgtggacatgtgatttaatcgctatagctaaaatacgtcaaatatacgttgtcatgtgcttgaacatgatgctaaccctgacaggatgaaggaaagtaatattctttcagtgtagttcaggagagcatttgttttcttttctaccaattaacccatcattgcttttaaacaaccatctgaaggagcagagaggcagggtagaagacagaagggggatctatgtggtaactaaagaatgtttctgttttgttaattattgtgtgtgtgtggttttattgtttgcttaagagaatcaaaaactgaaaaaaatgagaatacaggaaatggctcttgtttatttttttgctgtgtttacagcttgttaatgctctactgtctttgtttcaagagagatttgttcactgcccagctcgttttgtgtcctgagccctatgcccagcccaccttataaatcatgcctgtttagatgtttgattttgttctgtttgctattgttatcttaaaggtgtataactctgacatgccagacatcaaattaagctcaaattaagctctcgtttaaatgtttaaacacctaatttatattctaattgatcccagccactgatgcatgtactttagctacttctgctaaataagcatattaattttccacatcaggccatcagatcttgagaaccaacagttatctagaattccgtgtctactaatgtttcacctgcatgcagccttcattaattttgtagcaaaatataaagtgatcattatgtagtttctggattaaaaaaatttgtgtgtgaagttgctttgtaaagtgcatgtggaattaatgggacagtgtgccctttgtgttagatgttagagcaaaagaaagggcttatagtgttagtattggagcactttgaagatagatattttcagaaaagatgtaggatttaaaagttaaattttaaattttagaaaaagatatgatggcaattggaaatagtcacaatgaagttcttcatccagtaggtgtttaacagtgttattttgccactggtaatgtgtaaactgtgagtgatttacaataaatgattatgaattca

SEQ ID NO: 446051 - DNA, 2919 bp, Homo sapiens
ctccagcgtcgccggccccgttccatttccacagctcctcctccccggccgcgcgcccctcccgccccgcgcgcgcctcctctttctcgcggccgagttcagcccgggcagccatatgggggatacgccagcaacagacgccggccgccaagatctgcatccctaggccacgctaagaccctggggaagagcgcaggagcccgggagaagggctggaaggaggggactggacgtgcggagaattcccccctaaaaggcagaagcccccgcccccaccctcgagctccgctcgggcagagcgcctgcctgcctgccgctgctgcgggcgcccacctcgcccagccatgccaggcccggccaccgacgcggggaagatccctttctgcgacgccaaggaagaaatccgtgccgggctcgaaagctctgagggcggcggcggcccggagaggccaggcgcgcgcgggcagcggcagaacatcgtctggaggaatgtcgtcctgatgagcttgctccacttgggggccgtgtactccctggtgctcatccccaaagccaagccactcactctgctctgggcctacttctgcttcctcctggccgctctgggtgtgacagctggtgcccatcgcttgtggagccacaggtcctaccgggccaagctgcctctgaggatatttctggctgtcgccaactccatggctttccaggtactataagatctccgtggtgctcatgtgctttgtggtccccacgctggtgccctggtacatctggggagagagtctgtggaattcctacttcttggcctctattctccgctataccatctcactcaacatcagctggctggtcaacagcgccgcccacatgtatggaaaccggccctatgacaagcacatcagccctcggcagaacccactcgtcgctctgggtgccattggtgaaggcttccataattaccatcacacctttccctttgactactctgcgagtgaatttggcttaaattttaacccaaccacctggttcattgatttcatgtgctggctggggctggccactgaccgcaaacgggcaaccaagccgatgatcgaggcccggaaggccaggactggagacagcagtgcttgaacttggaacagccatcccacatgtctgccgttgcaacctcggttcatggctttggttacaatagctctcttgtacattggatcgtgggagggggcagagggtggggaaggaacgagtcaatgtggtttgggaatgttttgtttatctcaaaataatgttgaaatacaattatcaatgaaaaaactttcgtttttttttttggttggtttggtttttgagacagagtctcactctgtcacccaggctggagtgcagtggcgcagtctcggctcactgcagcctccacctacctggttcaagcaattctcctgcctcagcctcctgagtagctgagattacaggagcctgccaccacacccagctaattttttggtatttttagtagagacagggtttcatcatgttggccagactggcctcgaattcctgacctcaggcaatccacccgcctcggcctcccaaagagctgggattacaggcgtgagccaccgcaccctgccgaaaaaaactttttttttttggagacggaggctcgctctgtcccccaggctggagtgcagtggcgagatctcagctcactgcaagctccgcctcccgggttcacgccattctcctgcctcagcctcccgagtagctgggagccagcgcgcccagcctaaaaaacttttcaagtcaatattactacgatttaacattagagtgtggacatgtgatttaatcgctatagctaaaatacgtcaaatatacgttgtcatgtgcttgaacatgatgctaaccctgacaggatgaaggaaagtaatattctttcagtgtagttcaggagagcatttgttttcttttctaccaattaacccatcattgcttttaaacaaccatctgaaggagcagagaggcagggtagaagacagaagggggatctatgtggtaactaaagaatgtttctgttttgttaattattgtgtgtgtgtggttttattgtttgcttaagagaatcaaaaactgaaaaaaatgagaatacaggaaatggctcttgtttatttttttgctgtgtttacagcttgttaatgctctactgtctttgtttcaagagagatttgttcactgcccagctcgttttgtgtcctgagccctatgcccagcccaccttataaatcatgcctgtttagatgtttgattttgttctgtttgctattgttatcttaaaggtgtataactctgacatgccagacatcaaattaagctcaaattaagctctcgtttaaatgtttaaacacctaatttatattctaattgatcccagccactgatgcatgtactttagctacttctgctaaataagcatattaattttccacatcaggccatcagatcttgagaaccaacagttatctagaattccgtgtctactaatgtttcacctgcatgcagccttcattaattttgtagcaaaatataaagtgatcattatgtagtttctggattaaaaaaatttgtgtgtgaagttgctttgtaaagtgcatgtggaattaatgggacagtgtgccctttgtgttagatgttagagcaaaagaaagggcttatagtgttagtattggagcactttgaagatagatattttcagaaaagatgtaggatttaaaagttaaattttaaattttagaaaaagatatgatggcaattggaaatagtcacaatgaagttcttcatccagtaggtgtttaacagtgttattttgccactggtaatgtgtaaactgtgagtgatttacaataaatgattatgaattca

SEQ ID NO: 446052 - DNA, 2878 bp, Homo sapiens
agcgagcgggctgtaggaggggactggccgtccgtgaaatcccccctaaaggcaaagcccgcgccaccctcactccatcggcaacgcctgctgcctgcgtgtgggccccactgccacatgcgccgcacgagcgaatcccttctgcacagaagaaatccgtgccgggctcgaaagctctgagggcggcggcggcccggagaggccaggcgcgcgcgggcagcggcagaacatcgtctggaggaatgtcgtcctgatgagcttgctccacttgggggccgtgtactccctggtgctcatccccaaagccaagccactcactctgctctgggcctacttctgcttcctcctggccgctctgggtgtgacagctggtgcccatcgcttgtggagccacaggtcctaccgggccaagctgcctctgaggatatttctggctgtcgccaactccatggctttccagaatgacatcttcgagtggtccagggaccaccgagcccaccacaagtactcagagacggatgctgacccccacaatgcccgccggggcttcttcttctcccatattgggtggctgtttgttcgcaagcatcgagatgttattgagaaggggagaaagcttgacgtcactgacctgcttgctgatcctgtggtccggatccagagaaagtactataagatctccgtggtgctcatgtgctttgtggtccccacgctggtgccctggtacatctggggagagagtctgtggaattcctacttcttggcctctattctccgctataccatctcactcaacatcagctggctggtcaacagcgccgcccacatgtatggaaaccggccctatgacaagcacatcagccctcggcagaacccactcgtcgctctgggtgccattggtgaaggcttccataattaccatcacacctttccctttgactactctgcgagtgaatttggcttaaattttaacccaaccacctggttcattgatttcatgtgctggctggggctggccactgaccgcaaacgggcaaccaagccgatgatcgaggcccggaaggccaggactggagacagcagtgcttgaacttggaacagccatcccacatgtctgccgttgcaacctcggttcatggctttggttacaatagctctcttgtacattggatcgtgggagggggcagagggtggggaaggaacgagtcaatgtggtttgggaatgttttgtttatctcaaaataatgttgaaatacaattatcaatgaaaaaactttcgtttttttttttggttggtttggtttttgagacagagtctcactctgtcacccaggctggagtgcagtggcgcagtctcggctcactgcagcctccacctacctggttcaagcaattctcctgcctcagcctcctgagtagctgagattacaggagcctgccaccacacccagctaattttttggtatttttagtagagacagggtttcatcatgttggccagactggcctcgaattcctgacctcaggcaatccacccgcctcggcctcccaaagagctgggattacaggcgtgagccaccgcaccctgccgaaaaaaactttttttttttggagacggaggctcgctctgtcccccaggctggagtgcagtggcgagatctcagctcactgcaagctccgcctcccgggttcacgccattctcctgcctcagcctcccgagtagctgggagccagcgcgcccagcctaaaaaacttttcaagtcaatattactacgatttaacattagagtgtggacatgtgatttaatcgctatagctaaaatacgtcaaatatacgttgtcatgtgcttgaacatgatgctaaccctgacaggatgaaggaaagtaatattctttcagtgtagttcaggagagcatttgttttcttttctaccaattaacccatcattgcttttaaacaaccatctgaaggagcagagaggcagggtagaagacagaagggggatctatgtggtaactaaagaatgtttctgttttgttaattattgtgtgtgtgtggttttattgtttgcttaagagaatcaaaaactgaaaaaaatgagaatacaggaaatggctcttgtttatttttttgctgtgtttacagcttgttaatgctctactgtctttgtttcaagagagatttgttcactgcccagctcgttttgtgtcctgagccctatgcccagcccaccttataaatcatgcctgtttagatgtttgattttgttctgtttgctattgttatcttaaaggtgtataactctgacatgccagacatcaaattaagctcaaattaagctctcgtttaaatgtttaaacacctaatttatattctaattgatcccagccactgatgcatgtactttagctacttctgctaaataagcatattaattttccacatcaggccatcagatcttgagaaccaacagttatctagaattccgtgtctactaatgtttcacctgcatgcagccttcattaattttgtagcaaaatataaagtgatcattatgtagtttctggattaaaaaaatttgtgtgtgaagttgctttgtaaagtgcatgtggaattaatgggacagtgtgccctttgtgttagatgttagagcaaaagaaagggcttatagtgttagtattggagcactttgaagatagatattttcagaaaagatgtaggatttaaaagttaaattttaaattttagaaaaagatatgatggcaattggaaatagtcacaatgaagttcttcatccagtaggtgtttaacagtgttattttgccactggtaatgtgtaaactgtgagtgatttacaataaatgattatgaattca

SEQ ID NO: 446053 - DNA, 2474 bp, Homo sapiens
  misc_feature (45)..(45): n is a, c, g, or t
  misc_feature (52)..(52): n is a, c, g, or t
actcacgcgtacgaccacgcgtccgctggcatgtcgccaaatccntggcttnccagaatgacatcttcgagtggtccagggaccaccgagcccaccacaagtactcagagacggatgctgacccccacaatgcccgccggggcttcttcttctcccatattgggtggctgtttgttcgcaagcatcgagatgttattgagaaggggagaaagcttgacgtcactgacctgcttgctgatcctgtggtccggatccagagaaagtactataagatctccgtggtgctcatgtgctttgtggtccccacgctggtgccctggtacatctggggagagagtctgtggaattcctacttcttggcctctattctccgctataccatctcactcaacatcagctggctggtcaacagcgccgcccacatgtatggaaaccggccctatgacaagcacatcagccctcggcagaacccactcgtcgctctgggtgccattggtgaaggcttccataattaccatcacacctttccctttgactactctgcgagtgaatttggcttaaattttaacccaaccacctggttcattgatttcatgtgctggctggggctggccactgaccgcaaacgggcaaccaagccgatgatcgaggcccggaaggccaggactggagacagcagtgcttgaacttggaacagccatcccacatgtctgccgttgcaacctcggttcatggctttggttacaatagctctcttgtacattggatcgtgggagggggcagagggtggggaaggaacgagtcaatgtggtttgggaatgttttgtttatctcaaaataatgttgaaatacaattatcaatgaaaaaactttcgtttttttttttggttggtttggtttttgagacagagtctcactctgtcacccaggctggagtgcagtggcgcagtctcggctcactgcagcctccacctacctggttcaagcaattctcctgcctcagcctcctgagtagctgagattacaggagcctgccaccacacccagctaattttttggtatttttagtagagacagggtttcatcatgttggccagactggcctcgaattcctgacctcaggcaatccacccgcctcggcctcccaaagagctgggattacaggcgtgagccaccgcaccctgccgaaaaaaactttttttttttggagacggaggctcgctctgtcccccaggctggagtgcagtggcgagatctcagctcactgcaagctccgcctcccgggttcacgccattctcctgcctcagcctcccgagtagctgggagccagcgcgcccagcctaaaaaacttttcaagtcaatattactacgatttaacattagagtgtggacatgtgatttaatcgctatagctaaaatacgtcaaatatacgttgtcatgtgcttgaacatgatgctaaccctgacaggatgaaggaaagtaatattctttcagtgtagttcaggagagcatttgttttcttttctaccaattaacccatcattgcttttaaacaaccatctgaaggagcagagaggcagggtagaagacagaagggggatctatgtggtaactaaagaatgtttctgttttgttaattattgtgtgtgtgtggttttattgtttgcttaagagaatcaaaaactgaaaaaaatgagaatacaggaaatggctcttgtttatttttttgctgtgtttacagcttgttaatgctctactgtctttgtttcaagagagatttgttcactgcccagctcgttttgtgtcctgagccctatgcccagcccaccttataaatcatgcctgtttagatgtttgattttgttctgtttgctattgttatcttaaaggtgtataactctgacatgccagacatcaaattaagctcaaattaagctctcgtttaaatgtttaaacacctaatttatattctaattgatcccagccactgatgcatgtactttagctacttctgctaaataagcatattaattttccacatcaggccatcagatcttgagaaccaacagttatctagaattccgtgtctactaatgtttcacctgcatgcagccttcattaattttgtagcaaaatataaagtgatcattatgtagtttctggattaaaaaaatttgtgtgtgaagttgctttgtaaagtgcatgtggaattaatgggacagtgtgccctttgtgttagatgttagagcaaaagaaagggcttatagtgttagtattggagcactttgaagatagatattttcagaaaagatgtaggatttaaaagttaaattttaaattttagaaaaagatatgatggcaattggaaatagtcacaatgaagttcttcatccagtaggtgtttaacagtgttattttgccactggtaatgtgtaaactgtgagtgatttacaataaatgattatgaattca

SEQ ID NO: 446054 - DNA, 1558 bp, Homo sapiens
ctccagcgtcgccggccccgttccatttccacagctcctcctccccggccgcgcgcccctcccgccccgcgcgcgcctcctctttctcgcggccgagttcagcccgggcagccatatgggggatacgccagcaacagacgccggccgccaagatctgcatccctaggccacgctaagaccctggggaagagcgcaggagcccgggagaagggctggaaggaggggactggacgtgcggagaattcccccctaaaaggcagaagcccccgcccccaccctcgagctccgctcgggcagagcgcctgcctgcctgccgctgctgcgggcgcccacctcgcccagccatgccaggcccggccaccgacgcggggaagatccctttctgcgacgccaaggaagaaatccgtgccgggctcgaaagctctgagggcggcggcggcccggagaggccaggcgcgcgcgggcagcggcagaacatcgtctggaggaatgtcgtcctgatgagcttgctccacttgggggccgtgtactccctggtgctcatccccaaagccaagccactcactctgctctgggcctacttctgcttcctcctggccgctctgggtgtgacagctggtgcccatcgcttgtggagccacaggtcctaccgggccaagctgcctctgaggatatttctggctgtcgccaactccatggctttccagaatgacatcttcgagtggtccagggaccaccgagcccaccacaagtactcagagacggatgctgacccccacaatgcccgccggggcttcttcttctcccagcctaaaaaacttttcaagtcaatattactacgatttaacattagagtgtggacatgtgatttaatcgctatagctaaaatacgtcaaatatacgttgtcatgtgcttgaacatgatgctaaccctgacaggatgaaggaaagtaatattctttcagtgtagttcaggagagcatttgttttcttttctaccaattaacccatcattgcttttaaacaaccatctgaaggagcagagaggcagggtagaagacagaagggggatctatgtggtaactaaagaatgtttctgttttgttaattattgtgtgtgtgtggttttattgtttgcttaagagaatcaaaaactgaaaaaaatgagaatacaggaaatggctcttgtttatttttttgctgtgtttacagcttgttaatgctctactgtctttgtttcaagagagatttgttcactgcccagctcgttttgtgtcctgagccctatgcccagcccaccttataaatcatgcctgtttagatgttgaatcgggcagaggcgaaggatctacggtgttatctgacatgccgaattcaataaggcaataaggtcgtaatgttaagcgcatttattttattggtccgctagtgtggtagaatgtgggttattactatgggaggtttggaccggttatccgtgtattaggcggcaaatagaaagatgatcggatatatggctgtgttttttggttgttgtattgttatgataggtaggggt

SEQ ID NO: 446055 - DNA, 318 bp, Homo sapiens
ttgtgtgtgaagttgctttgtaaagtgcatgtggaattaatgggacagtgtgccctttgtgttagatgttagagcaaaagaaagggcttatagtgttagtattggagcactttgaagatagatattttcagaaaagatgtaggatttaaaagttaaattttaaattttagaaaaagatatgatggcaattggaaatagtcacaatgaagttcttcatccagtaggtgtttaacagtgttattttgccactggtaatgtgtaaactgtgagtgatttacaataaatgattatgaattcattggtgttcttgtccagata

SEQ ID NO: 446056 - DNA, 3125 bp, Homo sapiens
ctccagcgtcgccggccccgttccatttccacagctcctcctccccggccgcgcgcccctcccgccccgcgcgcgcctcctctttctcgcggccgagttcagcccgggcagccatatgggggatacgccagcaacagacgccggccgccaagatctgcatccctaggccacgctaagaccctggggaagagcgcaggagcccgggagaagggctggaaggaggggactggacgtgcggagaattcccccctaaaaggcagaagcccccgcccccaccctcgagctccgctcgggcagagcgcctgcctgcctgccgctgctgcgggcgcccacctcgcccagccatgccaggcccggccaccgacgcggggaagatccctttctgcgacgccaaggaagaaatccgtgccgggctcgaaagctctgagggcggcggcggcccggagaggccaggcgcgcgcgggcagcggcagaacatcgtctggaggaatgtcgtcctgatgagcttgctccacttgggggccgtgtactccctggtgctcatccccaaagccaagccactcactctgctctgggcctacttctgcttcctcctggccgctctgggtgtgacagctggtgcccatcgcttgtggagccacaggtcctaccgggccaagctgcctctgaggatatttctggctgtcgccaactccatggctttccagaatgacatcttcgagtggtccagggaccaccgagcccaccacaagtactcagagacggatgctgacccccacaatgcccgccggggcttcttcttctcccatattgggtggctgtttgttcgcaagcatcgagatgttattgagaaggggagaaagcttgacgtcactgacctgcttgctgatcctgtggtccggatccagagaaagtactataagatctccgtggtgctcatgtgctttgtggtccccacgctggtgccctggtacatctggggagagagtctgtggaattcctacttcttggcctctattctccgctataccatctcactcaacatcagctggctggtcaacagcgccgcccacatgtatggaaaccggccctatgacaagcacatcagccctcggcagaacccactcgtcgctctgggtgccattggtgaaggcttccataattaccatcacacctttccctttgactactctgcgagtgaatttggcttaaattttaacccaaccacctggttcattgatttcatgtgctggctggggctggccactgaccgcaaacgggcaaccaagccgatgatcgaggcccggaaggccaggactggagacagcagtgcttgaacttggaacagccatcccacatgtctgccgttgcaacctcggttcatggctttggttacaatagctctcttgtacattggatcgtgggagggggcagagggtggggaaggaacgagtcaatgtggtttgggaatgttttgtttatctcaaaataatgttgaaatacaattatcaatgaaaaaactttcgtttttttttttggttggtttggtttttgagacagagtctcactctgtcacccaggctggagtgcagtggcgcagtctcggctcactgcagcctccacctacctggttcaagcaattctcctgcctcagcctcctgagtagctgagattacaggagcctgccaccacacccagctaattttttggtatttttagtagagacagggtttcatcatgttggccagactggcctcgaattcctgacctcaggcaatccacccgcctcggcctcccaaagagctgggattacaggcgtgagccaccgcaccctgccgaaaaaaactttttttttttggagacggaggctcgctctgtcccccaggctggagtgcagtggcgagatctcagctcactgcaagctccgcctcccgggttcacgccattctcctgcctcagcctcccgagtagctgggagccagcgcgcccagcctaaaaaacttttcaagtcaatattactacgatttaacattagagtgtggacatgtgatttaatcgctatagctaaaatacgtcaaatatacgttgtcatgtgcttgaacatgatgctaaccctgacaggatgaaggaaagtaatattctttcagtgtagttcaggagagcatttgttttcttttctaccaattaacccatcattgcttttaaacaaccatctgaaggagcagagaggcagggtagaagacagaagggggatctatgtggtaactaaagaatgtttctgttttgttaattattgtgtgtgtgtggttttattgtttgcttaagagaatcaaaaactgaaaaaaatgagaatacaggaaatggctcttgtttatttttttgctgtgtttacagcttgttaatgctctactgtctttgtttcaagagagatttgttcactgcccagctcgttttgtgtcctgagccctatgcccagcccaccttataaatcatgcctgtttagatgtttgattttgttctgtttgctattgttatcttaaaggtgtataactctgacatgccagacatcaaattaagctcaaattaagctctcgtttaaatgtttaaacacctaatttatattctaattgatcccagccactgatgcatgtactttagctacttctgctaaataagcatattaattttccacatcaggccatcagatcttgagaaccaacagttatctagaattccgtgtctactaatgtttcacctgcatgcagccttcattaattttgtagcaaaatataaagtgatcattatgtagtttctggattaaaaaaatttgtgtgtgaagttgctttgtaaagtgcatgtggaattaatgggacagtgtgccctttgtgttagatgttagagcaaaagaaagggcttatagtgttagtattggagcactttgaagatagatattttcagaaaagatgtaggatttaaaagttaaattttaaattttagaaaaagatatgatggcaattggaaatagtcacaatgaagttcttcatccagtaggtgtttaacagtgttattttgccactggtaatgtgtaaactgtgagtgatttacaataaatgattatgaattca

SEQ ID NO: 446057 - DNA, 3177 bp, Homo sapiens
ctccagcgtcgccggccccgttccatttccacagctcctcctccccggccgcgcgcccctcccgccccgcgcgcgcctcctctttctcgcggccgagttcagcccgggcagccatatgggggatacgccagcaacagacgccggccgccaagatctgcatccctaggccacgctaagaccctggggaagagcgcaggagcccgggagaagggctggaaggaggggactggacgtgcggagaattcccccctaaaaggcagaagcccccgcccccaccctcgagctccgctcgggcagagcgcctgcctgcctgccgctgctgcgggcgcccacctcgcccagccatgccaggcccggccaccgacgcggggaagatccctttctgcgacgccaaggaagaaatccgtgccgggctcgaaagctctgagggcggcggcggcccggagaggccaggcgcgcgcgggcagcggcagaacatcgtctggaggaatgtcgtcctgatgagcttgctccacttgggggccgtgtactccctggtgctcatccccaaagccaagccactcactctgctctgggcctacttctgcttcctcctggccgctctgggtgtgacagctggtgcccatcgcttgtggagccacaggtcctaccgggccaagctgcctctgaggatatttctggctgtcgccaactccatggctttccagaatgacatcttcgagtggtccagggaccaccgagcccaccacaagtactcagagacggatgctgacccccacaatgcccgccggggcttcttcttctcccatattgggtggctgtttgttcgcaagcatcgagatgttattgagaaggggagaaagcttgacgtcactgacctgcttgctgatcctgtggtccggatccagagaaagtactataagatctccgtggtgctcatgtgctttgtggtccccacgctggtgccctggtacatctggggagagagtctgtggaattcctacttcttggcctctattctccgctataccatctcactcaacatcagctggctggtcaacagcgccgcccacatgtatggaaaccggccctatgacaagcacatcagccctcggcagaacccactcgtcgctctgggtgccattggtgaaggcttccataattaccatcacacctttccctttgactactctgcgagtgaatttggcttaaattttaacccaaccacctggttcattgatttcatgtgctggctggggctggccactgaccgcaaacgggcaaccaagccgatgatcgaggcccggaaggccaggactggagacagcagtgcttgaacttggaacagccatcccacatgtctgccgttgcaacctcggttcatggctttggttacaatagctctcttgtacattggatcgtgggagggggcagagggtggggaaggaacgagtcaatgtggtttgggaatgttttgtttatctcaaaataatgttgaaatacaattatcaatgaaaaaactttcgtttttttttttggttggtttggtttttgagacagagtctcactctgtcacccaggctggagtgcagtggcgcagtctcggctcactgcagcctccacctacctggttcaagcaattctcctgcctcagcctcctgagtagctgagattacaggagcctgccaccacacccagctaattttttggtatttttagtagagacagggtttcatcatgttggccagactggcctcgaattcctgacctcaggcaatccacccgcctcggcctcccaaagagctgggattacaggcgtgagccaccgcaccctgccgaaaaaaactttttttttttggagacggaggctcgctctgtcccccaggctggagtgcagtggcgagatctcagctcactgcaagctccgcctcccgggttcacgccattctcctgcctcagcctcccgagtagctgggagccagcgcgcccagcctaaaaaacttttcaagtcaatattactacgatttaacattagagtgtggacatgtgatttaatcgctatagctaaaatacgtcaaatatacgttgtcatgtgcttgaacatgatgctaaccctgacaggatgaaggaaagtaatattctttcagtgtagttcaggagagcatttgttttcttttctaccaattaacccatcattgcttttaaacaaccatctgaaggagcagagaggcagggtagaagacagaagggggatctatgtggtaactaaagaatgtttctgttttgttaattattgtgtgtgtgtggttttattgtttgcttaagagaatcaaaaactgaaaaaaatgagaatacaggaaatggctcttgtttatttttttgctgtgtttacagcttgttaatgctctactgtctttgtttcaagagagatttgttcactgcccagctcgttttgtgtcctgagccctatgcccagcccaccttataaatcatgcctgtttagatgtttgattttgttctgtttgctattgttatcttaaaggtgtataactctgacatgccagacatcaaattaagctcaaattaagctctcgtttaaatgtttaaacacctaatttatattctaattgatcccagccactgatgcatgtactttagctacttctgctaaataagcatattaattttccacatcaggccatcagatcttgagaaccaacagttatctagaattccgtgtctactaatgtttcacctgcatgcagccttcattaattttgtagcaaaatataaagtgatcattatgtagtttctggattaaaaaaatttgtgtgtgaagttgctttgtaaagtgcatgtggaattaatgggacagtgtgccctttgtgttagatgttagagcaaaagaaagggcttatagtgttagtattggagcactttgaagatagatattttcagaaaagatgtaggatttaaaagttaaattttaaattttagaaaaagatatgatggcaattggaaatagtcacaatgaagttcttcatccagtaggtgtttaacagtgttattttgccactggtaatgtgtaaactgtgagtgatttacaataaatgattatgaattcaaaaaaaaaaagggggggctaaaaatccccagggggcaagttacgtccgtttt

SEQ ID NO: 446058 - DNA, 3016 bp, Homo sapiens
ctccagcgtcgccggccccgttccatttccacagctcctcctccccggccgcgcgcccctcccgccccgcgcgcgcctcctctttctcgcggccgagttcagcccgggcagccatatgggggatacgccagcaacagacgccggccgccaagatctgcatccctaggccacgctaagaccctggggaagagcgcaggagcccgggagaagggctggaaggaggggactggacgtgcggagaattcccccctaaaaggcagaagcccccgcccccaccctcgagctccgctcgggcagagcgcctgcctgcctgccgctgctgcgggcgcccacctcgcccagccatgccaggcccggccaccgacgcggggaagatccctttctgcgacgccaaggaagaaatccgtgccgggctcgaaagctctgagggcggcggcggcccggagaggccaggcgcgcgcgggcagcggcagaacatcgtctggaggaatgtcgtcctgatgagcttgctccacttgggggccgtgtactccctggtgctcatccccaaagccaagccactcactctgctctgggcctacttctgcttcctcctggccgctctgggtgtgacagctggtgcccatcgcttgtggagccacagtactcagagacggatgctgacccccacaatgcccgccggggcttcttcttctcccatattgggtggctgtttgttcgcaagcatcgagatgttattgagaaggggagaaagcttgacgtcactgacctgcttgctgatcctgtggtccggatccagagaaagtactataagatctccgtggtgctcatgtgctttgtggtccccacgctggtgccctggtacatctggggagagagtctgtggaattcctacttcttggcctctattctccgctataccatctcactcaacatcagctggctggtcaacagcgccgcccacatgtatggaaaccggccctatgacaagcacatcagccctcggcagaacccactcgtcgctctgggtgccattggtgaaggcttccataattaccatcacacctttccctttgactactctgcgagtgaatttggcttaaattttaacccaaccacctggttcattgatttcatgtgctggctggggctggccactgaccgcaaacgggcaaccaagccgatgatcgaggcccggaaggccaggactggagacagcagtgcttgaacttggaacagccatcccacatgtctgccgttgcaacctcggttcatggctttggttacaatagctctcttgtacattggatcgtgggagggggcagagggtggggaaggaacgagtcaatgtggtttgggaatgttttgtttatctcaaaataatgttgaaatacaattatcaatgaaaaaactttcgtttttttttttggttggtttggtttttgagacagagtctcactctgtcacccaggctggagtgcagtggcgcagtctcggctcactgcagcctccacctacctggttcaagcaattctcctgcctcagcctcctgagtagctgagattacaggagcctgccaccacacccagctaattttttggtatttttagtagagacagggtttcatcatgttggccagactggcctcgaattcctgacctcaggcaatccacccgcctcggcctcccaaagagctgggattacaggcgtgagccaccgcaccctgccgaaaaaaactttttttttttggagacggaggctcgctctgtcccccaggctggagtgcagtggcgagatctcagctcactgcaagctccgcctcccgggttcacgccattctcctgcctcagcctcccgagtagctgggagccagcgcgcccagcctaaaaaacttttcaagtcaatattactacgatttaacattagagtgtggacatgtgatttaatcgctatagctaaaatacgtcaaatatacgttgtcatgtgcttgaacatgatgctaaccctgacaggatgaaggaaagtaatattctttcagtgtagttcaggagagcatttgttttcttttctaccaattaacccatcattgcttttaaacaaccatctgaaggagcagagaggcagggtagaagacagaagggggatctatgtggtaactaaagaatgtttctgttttgttaattattgtgtgtgtgtggttttattgtttgcttaagagaatcaaaaactgaaaaaaatgagaatacaggaaatggctcttgtttatttttttgctgtgtttacagcttgttaatgctctactgtctttgtttcaagagagatttgttcactgcccagctcgttttgtgtcctgagccctatgcccagcccaccttataaatcatgcctgtttagatgtttgattttgttctgtttgctattgttatcttaaaggtgtataactctgacatgccagacatcaaattaagctcaaattaagctctcgtttaaatgtttaaacacctaatttatattctaattgatcccagccactgatgcatgtactttagctacttctgctaaataagcatattaattttccacatcaggccatcagatcttgagaaccaacagttatctagaattccgtgtctactaatgtttcacctgcatgcagccttcattaattttgtagcaaaatataaagtgatcattatgtagtttctggattaaaaaaatttgtgtgtgaagttgctttgtaaagtgcatgtggaattaatgggacagtgtgccctttgtgttagatgttagagcaaaagaaagggcttatagtgttagtattggagcactttgaagatagatattttcagaaaagatgtaggatttaaaagttaaattttaaattttagaaaaagatatgatggcaattggaaatagtcacaatgaagttcttcatccagtaggtgtttaacagtgttattttgccactggtaatgtgtaaactgtgagtgatttacaataaatgattatgaattca

SEQ ID NO: 446059 - DNA, 3472 bp, Homo sapiens
catgtgtgcgttattcattctgttccttgtctttggtcgtgtctggcgttgcccgttcttctgtgcgtcaccggcatgcttcattcgcatgtgctggtccttgtcccgattcctcctgtttttccagtgtactgggtgatgcgatttagtgtaccttctctgggctgcctgtgccgttcttggttcctcgccgggcttctttcgctcttccttgggccccgttgccagatcctctgggtcggcgctttgtcccttgccgcttgattatgcgtgatatggtatactcggacgtcgaagatgcccaagcagtaggagttcccagatctctctccgcagatgtaccaggcaccagcgtgggtaccacgaagcacatgagcaccacggagatcttatagtactttctctgaatccgggaccacaggatcatccaagcaaggtcagttgacgttcaagcatttctcccagtttctcaataactatcctcgatgcttgctgaacggacagccactcatatgggagaagaagaagccccggcgggcattgtgggggtcagtcatccgtctcttgagtactttgtgtgggctcgatggtccctggaccactcgaagatgtcattctggaaagccatggatttggctgacagccagaaatatcctcagaggcagcttggcccggtaggacctgtggctccacaagcgatgggcaccatctgtcacacctcagagcggccaggaggaagcagaagtaggcccagagcagagtgagtggcttggctttggggatgagcaccagggagccaggcgcgcgcgggcagcggcagaacatcgtctggaggaatgtcgtcctgatgagcttgctccacttgggggccgtgtactccctggtgctcatccccaaagccaagccactcactctgctctgggcctacttctgcttcctcctggccgctctgggtgtgacagctggtgcccatcgcttgtggagccacaggtcctaccgggccaagctgcctctgaggatatttctggctgtcgccaactccatggctttccagaatgacatcttcgagtggtccagggaccaccgagcccaccacaagtactcagagacggatgctgacccccacaatgcccgccggggcttcttcttctcccatattgggtggctgtttgttcgcaagcatcgagatgttattgagaaggggagaaagcttgacgtcactgacctgcttgctgatcctgtggtccggatccagagaaagtactataagatctccgtggtgctcatgtgctttgtggtccccacgctggtgccctggtacatctggggagagagtctgtggaattcctacttcttggcctctattctccgctataccatctcactcaacatcagctggctggtcaacagcgccgcccacatgtatggaaaccggccctatgacaagcacatcagccctcggcagaacccactcgtcgctctgggtgccattggtgaaggcttccataattaccatcacacctttccctttgactactctgcgagtgaatttggcttaaattttaacccaaccacctggttcattgatttcatgtgctggctggggctggccactgaccgcaaacgggcaaccaagccgatgatcgaggcccggaaggccaggactggagacagcagtgcttgaacttggaacagccatcccacatgtctgccgttgcaacctcggttcatggctttggttacaatagctctcttgtacattggatcgtgggagggggcagagggtggggaaggaacgagtcaatgtggtttgggaatgttttgtttatctcaaaataatgttgaaatacaattatcaatgaaaaaactttcgtttttttttttggttggtttggtttttgagacagagtctcactctgtcacccaggctggagtgcagtggcgcagtctcggctcactgcagcctccacctacctggttcaagcaattctcctgcctcagcctcctgagtagctgagattacaggagcctgccaccacacccagctaattttttggtatttttagtagagacagggtttcatcatgttggccagactggcctcgaattcctgacctcaggcaatccacccgcctcggcctcccaaagagctgggattacaggcgtgagccaccgcaccctgccgaaaaaaactttttttttttggagacggaggctcgctctgtcccccaggctggagtgcagtggcgagatctcagctcactgcaagctccgcctcccgggttcacgccattctcctgcctcagcctcccgagtagctgggagccagcgcgcccagcctaaaaaacttttcaagtcaatattactacgatttaacattagagtgtggacatgtgatttaatcgctatagctaaaatacgtcaaatatacgttgtcatgtgcttgaacatgatgctaaccctgacaggatgaaggaaagtaatattctttcagtgtagttcaggagagcatttgttttcttttctaccaattaacccatcattgcttttaaacaaccatctgaaggagcagagaggcagggtagaagacagaagggggatctatgtggtaactaaagaatgtttctgttttgttaattattgtgtgtgtgtggttttattgtttgcttaagagaatcaaaaactgaaaaaaatgagaatacaggaaatggctcttgtttatttttttgctgtgtttacagcttgttaatgctctactgtctttgtttcaagagagatttgttcactgcccagctcgttttgtgtcctgagccctatgcccagcccaccttataaatcatgcctgtttagatgtttgattttgttctgtttgctattgttatcttaaaggtgtataactctgacatgccagacatcaaattaagctcaaattaagctctcgtttaaatgtttaaacacctaatttatattctaattgatcccagccactgatgcatgtactttagctacttctgctaaataagcatattaattttccacatcaggccatcagatcttgagaaccaacagttatctagaattccgtgtctactaatgtttcacctgcatgcagccttcattaattttgtagcaaaatataaagtgatcattatgtagtttctggattaaaaaaatttgtgtgtgaagttgctttgtaaagtgcatgtggaattaatgggacagtgtgccctttgtgttagatgttagagcaaaagaaagggcttatagtgttagtattggagcactttgaagatagatattttcagaaaagatgtaggatttaaaagttaaattttaaattttagaaaaagatatgatggcaattggaaatagtcacaatgaagttcttcatccagtaggtgtttaacagtgttattttgccactggtaatgtgtaaactgtgagtgatttacaataaatgattatgaattca

SEQ ID NO: 446060 - DNA, 3071 bp, Homo sapiens
ctccagcgtcgccggccccgttccatttccacagctcctcctccccggccgcgcgcccctcccgccccgcgcgcgcctcctctttctcgcggccgagttcagcccgggcagccatatgggggatacgccagcaacagacgccggccgccaagatctgcatccctaggccacgctaagaccctggggaagagcgcaggagcccgggagaagggctggaaggaggggactggacgtgcggagaattcccccctaaaaggcagaagcccccgcccccaccctcgagctccgctcgggcagagcgcctgcctgcctgccgctgctgcgggcgcccacctcgcccagccatgccaggcccggccaccgacgcggggaagatccctttctgcgacgccaaggaagaaatccgtgccgggctcgaaagctctgagggcggcggcggcccggagaggccaggcgcgcgcgggcagcggcagaacatcgtctggaggaatgtcgtcctgatgagcttgctccacttgggggccgtgtactccctggtgctcatccccaaagccaagccactcactctgctctgggcctacttctgcttcctcctggccgctctgggtgtgacagctggtgcccatcgcttgtggagccacaggtcctaccgggccaagctgcctctgaggatatttctggctgtcgccaactccatggctttccagaatgacatcttcgagtggtccagggaccaccgagcccaccacaagtactcagagacggatgctgacccccacaatgcccgccggggcttcttcttctcccatattgggtggctgtttgttcgcaagcatcgagatgttattgagaaggggagaaagcttgacgtcactgacctgcttgctgatcctgtggtccggatccagagaaagtactataagatctccgtggtgctcatgtgctttgtggtccccacgctggtgccctggtacatctggggagagagtctgtggaattcctacttcttggcctctattctccgctataccatctcactcaacatcagctggctggtcaacagcgccgcccacatgtatggaaaccggccctatgacaagcacatcagccctcggcagaacccactcgtcgctctgggtgccattggtgaaggcttccataattaccatcacacctttccctttgactactctgcgagtgaatttggcttaaattttaacccaaccacctggttcattgatttcatgtgctggctggggctggccactgaccgcaaacgggcaaccaagccgatgatcgaggcccggaaggccaggactggagacagcagtgcttgaacttggaacagccatcccacatgtctgccgttgcaacctcggttcatggctttggttacaatagctctcttgtacattggatcgtgggagggggcagagggtggggaaggaacgagtcaatgtggtttgggaatgttttgtttatctcaaaataatgttgaaatacaattatcaatgaaaaaactttcgtttttttttttggttggtttggtttttgagacagagtctcactctgtcacccaggctggagtgcagtggcgcagtctcggctcactgcagcctccacctacctggttcaagcaattctcctgcctcagcctcctgagtagctgagattacaggagcctgccaccacacccagctaattttttggtatttttagtagagacagggtttcatcatgttggccagactggcctcgaattcctgacctcaggcaatccacccgcctcggcctcccaaagagctgggattacaggcgtgagccaccgcaccctgccgaaaaaaactttttttttttggagacggaggctcgctctgtcccccaggctggagtgcagtggcgagatctcagctcactgcaagctccgcctcccgggttcacgccattctcctgcctcagcctcccgagtagctgggagccagcgcgcccagcctaaaaaacttttcaagtcaatattactacgatttaacattagagtgtggacatgtgatttaatcgctatagctaaaatacgtcaaatatacgttgtcatgtgcttgaacatgatgctaaccctgacaggatgaaggaaagtaatattctttcagtgtagttcaggagagcatttgttttcttttctaccaattaacccatcattgcttttaaacaaccatctgaaggagcagagaggcagggtagaagacagaagggggatctatgtggtaactaaagaatgtttctgttttgttaattattgtgtgtgtgtggttttattgtttgcttaagagaatcaaaaactgaaatgttaatgctctactgtctttgtttcaagagagatttgttcactgcccagctcgttttgtgtcctgagccctatgcccagcccaccttataaatcatgcctgtttagatgtttgattttgttctgtttgctattgttatcttaaaggtgtataactctgacatgccagacatcaaattaagctcaaattaagctctcgtttaaatgtttaaacacctaatttatattctaattgatcccagccactgatgcatgtactttagctacttctgctaaataagcatattaattttccacatcaggccatcagatcttgagaaccaacagttatctagaattccgtgtctactaatgtttcacctgcatgcagccttcattaattttgtagcaaaatataaagtgatcattatgtagtttctggattaaaaaaatttgtgtgtgaagttgctttgtaaagtgcatgtggaattaatgggacagtgtgccctttgtgttagatgttagagcaaaagaaagggcttatagtgttagtattggagcactttgaagatagatattttcagaaaagatgtaggatttaaaagttaaattttaaattttagaaaaagatatgatggcaattggaaatagtcacaatgaagttcttcatccagtaggtgtttaacagtgttattttgccactggtaatgtgtaaactgtgagtgatttacaataaatgattatgaattca

SEQ ID NO: 446061 - DNA, 970 bp, Homo sapiens
ctccagcgtcgccggccccgttccatttccacagctcctcctccccggccgcgcgcccctcccgccccgcgcgcgcctcctctttctcgcggccgagttcagcccgggcagccatatgggggatacgccagcaacagacgccggccgccaagatctgcatccctaggccacgctaagaccctggggaagagcgcaggagcccgggagaagggctggaaggaggggactggacgtgcggagaattcccccctaaaaggcagaagcccccgcccccaccctcgagctccgctcgggcagagcgcctgcctgcctgccgctgctgcgggcgcccacctcgcccagccatgccaggcccggccaccgacgcggggaagatccctttctgcgacgccaaggaagaaatccgtgccgggctcgaaagctctgagggcggcggcggcccggagaggccaggcgcgcgcgggcagcggcagaacatcgtctggaggaatgtcgtcctgatgagcttgctccacttgggggccgtgtactccctggtgctcatccccaaagccaagccactcactctgctctgggcctacttctgcttcctcctggccgctctgggtgtgacagctggtgcccatcgcttgtggagccacaggtcctaccgggccaagctgcctctgaggatatttctggctgtcgccaactccatggctttccaggcagcagcagaagtggtcctgacccagatgccctgacagcttttcctggtgtgattttggaagttaacccttgaacagaatgggtttgaactgcgcagcttcacttaaatgcatggattttcttctgcctccaccacctctgagacagcaagatcagcccctcctcctctcagcctactcaatgcaaagaagacaaggatgaagacctttatgatgatccacttccacttaatgaatagtaaatatattttctcttcttatga

SEQ ID NO: 446062 - DNA, 506 bp, Homo sapiens
cgtgactctagcaggatccttaagtttacagcggtcaggggccagctgtgggcgcagagagactgtggctgtggcccagtggtgacgctcaatgctccgtgcacccagggccatcctaggttttgtgaataagcaacaggcccacgacctgctcatcaacaagcccgacgggaccttcttgttgcgctttagtgactcagaaatcgggggcatcaccatcgcctggaagtttgactccccggaacgcaacctgtggaacctgaaaccattcaccacgcgggatttctccatcaggtccctggctgaccggctgggggacctgagctatctcatctatgtgtttcctgaccgccccaaggatgaggtcttctccaagtactacactcctgtgctggctaaagctgttgatggatatgtgaaaccacagatcaagcaagtggtccctgagtaagtgtccaggtggctgtggctctccttctgcctctttcctcctcccccagaccctg

SEQ ID NO: 446063 - DNA, 1990 bp, Homo sapiens
cgtgactctagcaggatccttaagtttacagcggtcaggggccagctgtgggcgcagagagactgtggctgtggcccagtggtgacgctcaatgctccgtgcacccagggccatcctaggttttgtgaataagcaacaggcccacgacctgctcatcaacaagcccgacgggaccttcttgttgcgctttagtgactcagaaatcgggggcatcaccatcgcctggaagtttgactccccggaacgcaacctgtggaacctgaaaccattcaccacgcgggatttctccatcaggtccctggctgaccggctgggggacctgagctatctcatctatgtgtttcctgaccgccccaaggatgaggtcttctccaagtactacactcctgtgctggctaaagctgttgatggatatgtgaaaccacagatcaagcaagtggtccctgagtttgtgaatgcatctgcagatgctgggggcagcagcgccacgtacatggaccaggccccctccccagctgtgtgcccccaggctccctataacatgtacccacagaaccctgaccatgtactcgatcaggatggagaattcgacctggatgagaccatggatgtggccaggcacgtggaggaactcttacgccgaccaatggacagtcttgactcccgcctctcgccccctgccggtcttttcacctctgccagaggctccctctcatgaatgtttgaatcccacgcttctctttggaaacaatatgcaatgtgaagcggtcgtgttgtgagtttagtaaggctgtgtacactgacacctttgcaggcatgcatgtgcttgtgtgtgtgtgtgtgtgtgtccttgtgcatgagctacgcctgcctcccctgtgcagtcctgggatgtggctgcagcagcggtggcctcttttcagatcatggcatccaagagtgcgccgagtctgtctctgtcatggtagagaccgagcctctgtcactgcaggcactcaatgcagccagacctattcctcctgggcccctcatctgctcagcagctatttgaatgagatgattcagaaggggaggggagacaggtaacgtctgtaagctgaagtttcactccggagtgagaagctttgccctcctaagagagagagacagagagacagagagagagaaagagagagtgtgtgggtctatgtaaatgcatctgtcctcatgtgttgatgtaaccgattcatctctcagaagggaggctggggttcattttcgagtagtattttatactttagtgaacgtggactccagactctctgtgaaccctatgagagcgcgtctgggcccggccatgtccttagcacaggggggccgccggtttgagtgagggtttctgagctgctctgaattagtccttgcttggctgcttggccttgggcttcattcaagtctatgatgctgttgcccacgtttcccgggatatatattctctcccctccgttgggccccagccttctttgcttgcctctctgtttgtaaccttgtcgacaaagaggtagaaaagattgggtctaggatatggtgggtggacaggggccccgggacttggagggttggtcctcttgcctcctggaaaaaacaaaaacaaaaaactgcagtgaaagacaagctgcaaatcagccatgtgctgcgtgcctgtggaatctggagtgaggggtaaaagctgatctggtttgactccgctggaggtggggcctggagcaggccttgcgctgttgcgtaactggctgtgttctggtgaggccttgctcccaaccccacacgctcctccctctgaggctgtaggactcgcagtcaggggcagctgaccatggaagattgagagcccaaggtttaaacttctctgaagggaggtggggatgagaagaggggtttttttgtactttgtacaaagaccacacatttgtgtaaacagtgttttggaataaaatatttttttcataaa

SEQ ID NO: 446064 - DNA, 317 bp, Homo sapiens
gtgagtccccgtgggagccctaccccagcacccccaggccctaggactcacctggggtcagccccaccccttgggcccctgctgagtggtccttcctcaccccagggccagcccagaggtgaggtgaggccagaagggctggggtgctgggcgcctgccttccaccatggccttggcactctgggttccaggttcctggactggggtctgtgaggactgtgagcttggtctttggatcctggtctgggatcctcctttggcagatggcttgggtccttgctctctgttttctgtttcctggtctgcatctctgtccc

SEQ ID NO: 446065 - DNA, 273 bp, Homo sapiens
aggatcaagcgtgctgaccggcggggtgcagagtccgtgacagaggagaagttcacagtcctgtttgagtctcagttcagtgttggcagcaatgagcttgtgttccaggtgaaggtgagacccccagccctcctgcccccactgctccaggtcacccaagaggtggaggggcctgcctcaggactcctggcagcaatgccatcggacagcctgctttgactctgtgggtccctgtttgataggttataatctgggactaacccagacaattta

SEQ ID NO: 446066 - DNA, 452 bp, Homo sapiens
tctgctggagtgtggtggcaagcaggggtgaagaactgggagaagactgggtgggggcaggagggccctgactttcctgggccacctgtgacctggggcaccagccctgactcgggggttcctgggccctcaggagaacttgccgggctggaactacaccttctggcagtggtttgacggggtgatggaggtgttgaagaagcaccacaagccccactggaatgatgggtaaggaacgggggctgcagggtcaggggccagctgtgggcgcagagagactgtggctgtggcccagtggtgacgctcaatgctccgtgcacccagggccatcctaggttttgtgaataagcaacaggcccacgacctgctcatcaacaagcccgacgggaccttcttgttgcgctttagtgactcagaaatcgggggcatcaccatcgcctggaagtttgact

SEQ ID NO: 446067 - DNA, 453 bp, Homo sapiens
gcgctgttgcgtaactggctgtgttctggtgaggccttgctcccaaccccacacgctcctccctctgaggctgtaggactcgcagtcaggggcagctgaccatggaagattgagagcccaaggtttaaacttctctgaagggaggtggggatgagaagaggggtttttttgtactttgtacaaagaccacacatttgtgtaaacagtgttttggaataaaatatttttttcataaatttgctgctatggctcctggttggggcgttggtggcctccctgggtgatgggaacccctggagctggttgttctgttccttcccgcgtgcatgcctgatgctgtcatttttagtcttaaattttaactctgcccgctttgctgtggttttcagggtgctggccacccctggaatactgtcaatgcttctcagaagggtaaggagccagtttaggggg

SEQ ID NO: 446068 - DNA, 517 bp, Homo sapiens
aattcggcacgagggcatccaagagtgcgccgagtctctctctgtttgtaaccttgtcgacaaagaggtagaaaagattgggtctaggatatggtgggtggacaggggccccgggacttggagggttggtcctcttgcctcctggaaaaaacaaaaacaaaaaactgcagtgaaagacaagctgcaaatcagccatgtgctgcgtgcctgtggaatctggagtgaggggtaaaagctgatctggtttgactccgctggaggtggggcctggagcaggccttgcgctgttgcgtaactggctgtgttctggtgaggccttgctcccaaccccacacgctcctccctctgaggctgtaggactcgcagtcaggggcagctgaccatggaagattgagagcccaaggtttaaacttctctgaagggaggtggggatgagaagaggggtttttttgtactttgtacaaagaccacacatttgtgtaaacagtgttttggaataaaatatttttttcataaa

SEQ ID NO: 446069 - DNA, 2903 bp, Homo sapiens
tgatccagtggaagcggcggcagcagctggccgggaacggcgggccccccgagggcagcctggacgtgctacagtcctggtgtgagaagttggccgagatcatctggcagaaccggcagcagatccgcagggctgagcacctctgccagcagctgcccatccccggcccagtggaggagatgctggccgaggtcaacgccaccatcacggacattatctcagccctggtgaccagcacattcatcattgagaagcagcctcctcaggtcctgaagacccagaccaagtttgcagccaccgtacgcctgctggtgggcgggaagctgaacgtgcacatgaatcccccccaggtgaaggccaccatcatcagtgagcagcaggccaagtctctgcttaaaaatgagaacacccgcaacgagtgcagtggtgagatcctgaacaactgctgcgtgatggagtaccaccaagccacgggcaccctcagtgcccacttcaggaacatgtcactgaagaggatcaagcgtgctgaccggcggggtgcagagtccgtgacagaggagaagttcacagtcctgtttgagtctcagttcagtgttggcagcaatgagcttgtgttccaggtgaagactctgtccctacctgtggttgtcatcgtccacggcagccaggaccacaatgccacggctactgtgctgtgggacaatgcctttgctgagccgggcagggtgccatttgccgtgcctgacaaagtgctgtggccgcagctgtgtgaggcgctcaacatgaaattcaaggccgaagtgcagagcaaccggggcctgaccaaggagaacctcgtgttcctggcgcagaaactgttcaacaacagcagcagccacctggaggactacagtggcctgtccgtgtcctggtcccagttcaacagggagaacttgccgggctggaactacaccttctggcagtggtttgacggggtgatggaggtgttgaagaagcaccacaagccccactggaatgatggggccatcctaggttttgtgaataagcaacaggcccacgacctgctcatcaacaagcccgacgggaccttcttgttgcgctttagtgactcagaaatcgggggcatcaccatcgcctggaagtttgactccccggaacgcaacctgtggaacctgaaaccattcaccacgcgggatttctccatcaggtccctggctgaccggctgggggacctgagctatctcatctatgtgtttcctgaccgccccaaggatgaggtcttctccaagtactacactcctgtgctggctaaagctgttgatggatatgtgaaaccacagatcaagcaagtggtccctgagtttgtgaatgcatctgcagatgctgggggcagcagcgccacgtacatggaccaggccccctccccagctgtgtgcccccaggctccctataacatgtacccacagaaccctgaccatgtactcgatcaggatggagaattcgacctggatgagaccatggatgtggccaggcacgtggaggaactcttacgccgaccaatggacagtcttgactcccgcctctcgccccctgccggtcttttcacctctgccagaggctccctctcatgaatgtttgaatcccacgcttctctttggaaacaatatgcaatgtgaagcggtcgtgttgtgagtttagtaaggctgtgtacactgacacctttgcaggcatgcatgtgcttgtgtgtgtgtgtgtgtgtgtccttgtgcatgagctacgcctgcctcccctgtgcagtcctgggatgtggctgcagcagcggtggcctcttttcagatcatggcatccaagagtgcgccgagtctgtctctgtcatggtagagaccgagcctctgtcactgcaggcactcaatgcagccagacctattcctcctgggcccctcatctgctcagcagctatttgaatgagatgattcagaaggggaggggagacaggtaacgtctgtaagctgaagtttcactccggagtgagaagctttgccctcctaagagagagagacagagagacagagagagagaaagagagagtgtgtgggtctatgtaaatgcatctgtcctcatgtgttgatgtaaccgattcatctctcagaagggaggctggggttcattttcgagtagtattttatactttagtgaacgtggactccagactctctgtgaaccctatgagagcgcgtctgggcccggccatgtccttagcacaggggggccgccggtttgagtgagggtttctgagctgctctgaattagtccttgcttggctgcttggccttgggcttcattcaagtctatgatgctgttgcccacgtttcccgggatatatattctctcccctccgttgggccccagccttctttgcttgcctctctgtttgtaaccttgtcgacaaagaggtagaaaagattgggtctaggatatggtgggtggacaggggccccgggacttggagggttggtcctcttgcctcctggaaaaaacaaaaacaaaaaactgcagtgaaagacaagctgcaaatcagccatgtgctgcgtgcctgtggaatctggagtgaggggtaaaagctgatctggtttgactccgctggaggtggggcctggagcaggccttgcgctgttgcgtaactggctgtgttctggtgaggccttgctcccaaccccacacgctcctccctctgaggctgtaggactcgcagtcaggggcagctgaccatggaagattgagagcccaaggtttaaacttctctgaagggaggtggggatgagaagaggggtttttttgtactttgtacaaagaccacacatttgtgtaaacagtgttttggaataaaatatttttttcataaa

SEQ ID NO: 446070 - DNA, 2980 bp, Homo sapiens
tgatccagtggaagcggcggcagcagctggccgggaacggcgggccccccgagggcagcctggacgtgctacagtcctggtgtgagaagttggccgagatcatctggcagaaccggcagcagatccgcagggctgagcacctctgccagcagctgcccatccccggcccagtggaggagatgctggccgaggtcaacgccaccatcacggacattatctcagccctggtgaccagcacattcatcattgagaagcagcctcctcaggtcctgaagacccagaccaagtttgcagccaccgtacgcctgctggtgggcgggaagctgaacgtgcacatgaatcccccccaggtgaaggccaccatcatcagtgagcagcaggccaagtctctgcttaaaaatgagaacacccgcaacgagtgcagtggtgagatcctgaacaactgctgcgtgatggagtaccaccaagccacgggcaccctcagtgcccacttcaggaacatgtcactgaagaggatcaagcgtgctgaccggcggggtgcagagtccgtgacagaggagaagttcacagtcctgtttgagtctcagttcagtgttggcagcaatgagcttgtgttccaggtgaagactctgtccctacctgtggttgtcatcgtccacggcagccaggaccacaatgccacggctactgtgctgtgggacaatgcctttgctgagccgggcagggtgccatttgccgtgcctgacaaagtgctgtggccgcagctgtgtgaggcgctcaacatgaaattcaaggccgaagtgcagagcaaccggggcctgaccaaggagaacctcgtgttcctggcgcagaaactgttcaacaacagcagcagccacctggaggactacagtggcctgtccgtgtcctggtcccagttcaacagggagaacttgccgggctggaactacaccttctggcagtggtttgacggggtgatggaggtgttgaagaagcaccacaagccccactggaatgatggggccatcctaggttttgtgaataagcaacaggcccacgacctgctcatcaacaagcccgacgggaccttcttgttgcgctttagtgactcagaaatcgggggcatcaccatcgcctggaagtttgactccccggaacgcaacctgtggaacctgaaaccattcaccacgcgggatttctccatcaggtccctggctgaccggctgggggacctgagctatctcatctatgtgtttcctgaccgccccaaggatgaggtcttctccaagtactacactcctgtgctggctaaagctgttgatggatatgtgaaaccacagatcaagcaagtggtccctgagtttgtgaatgcatctgcagatgctgggggcagcagcgccacgtacatggaccaggccccctccccagctgtgtgcccccaggctccctataacatgtacccacagaaccctgaccatgtactcgatcaggatggagaattcgacctggatgagaccatggatgtggccaggcacgtggaggaactcttacgccgaccaatggacagtcttgactcccgcctctcgccccctgccggtcttttcacctctgccagaggctccctctcatgaatgtttgaatcccacgcttctctttggaaacaatatgcaatgtgaagcggtcgtgttgtgagtttagtaaggctgtgtacactgacacctttgcaggcatgcatgtgcttgtgtgtgtgtgtgtgtgtgtccttgtgcatgagctacgcctgcctcccctgtgcagtcctgggatgtggctgcagcagcggtggcctcttttcagatcatggcatccaagagtgcgccgagtctgtctctgtcatggtagagaccgagcctctgtcactgcaggcactcaatgcagccagacctattcctcctgggcccctcatctgctcagcagctatttgaatgagatgattcagaaggggaggggagacaggtaacgtctgtaagctgaagtttcactccggagtgagaagctttgccctcctaagagagagagacagagagacagagagagagaaagagagagtgtgtgggtctatgtaaatgcatctgtcctcatgtgttgatgtaaccgattcatctctcagaagggaggctggggttcattttcgagtagtattttatactttagtgaacgtggactccagactctctgtgaaccctatgagagcgcgtctgggcccggccatgtccttagcacaggggggccgccggtttgagtgagggtttctgagctgctctgaattagtccttgcttggctgcttggccttgggcttcattcaagtctatgatgctgttgcccacgtttcccgggatatatattctctcccctccgttgggccccagccttctttgcttgcctctctgtttgtaaccttgtcgacaaagaggtagaaaagattgggtctaggatatggtgggtggacaggggccccgggacttggagggttggtcctcttgcctcctggaaaaaacaaaaacaaaaaactgcagtgaaagacaagctgcaaatcagccatgtgctgcgtgcctgtggaatctggagtgaggggtaaaagctgatctggtttgactccgctggaggtggggcctggagcaggccttgcgctgttgcgtaactggctgtgttctggtgaggccttgctcccaaccccacacgctcctccctctgaggctgtaggactcgcagtcaggggcagctgaccatggaagattgagagcccaaggtttaaacttctctgaagggaggtggggatgagaagaggggtttttttgtactttgtacaaagaccacacatttgtgtaaacagtgttttggaataaaatatttttttcataaaaaaaaaaaatcaaaacacccagcgaacgcaaagtagagaagacgtgtagacgtaaagaacacataatatagtgcggg

SEQ ID NO: 446071 - DNA, 819 bp, Homo sapiens
gaattcggcacgagcggcacgagttggatttggggcccaggttccccctgactggcaggtctcgcatgaatttgccttgaatttcaaccccagtaacccctactgtgcaggcatccagggcattgtggatgcctaccgccaagccctgccccaagttcgcctctatggccctaccaactttgcacccatcatcaaccatgtggccaggtttgcagcccaggctgcacatcaggggactgcctcgcaatacttcatgctgttgctgctgactgatggtgctgtgacggatgtggaagccacacgtgaggctgtggtgcgtgcctcgaacctgcccatgtcagtgatcattgtgggtgtgggtggtgctgactttgaggccatggagcagctggacgctgatggtggacccctgcatacacgttctgggcaggctgctgcccgcgacattgtgcagtttgtaccctaccgccggttccagaatgcccctcgggaggcattggcacagaccgtgctcgcagaagtgcccacacaactggtctcatacttcagggcccagggttgggccccgctcaagccacttccaccctcagccaaggatcctgcacaggccccccaggcctaggttcccttggaggctgtggcaagtcctcaatcctgtgtcccagaggtccctctgggccacaacccaacccttctcactctcctcagtgctagcactttgtattttttgatacttttatacttgtttctgcttttgctgctcttgatcccacctttgctcctgacaaccctcattcaataaagaccagtgaagaccaa

SEQ ID NO: 446072 - DNA, 730 bp, Homo sapiens
tcagtaattaatccatagtacggatccttattgtatcaaatggatcattattaaataggttataatctgatgctcaaactctcctggatttgtccaggagaatccctctcatctgggtgctaattcaagctgtgatttagggcaagtcccctcctctctttgaaccttagtttcctcatgtgtaggagacagttaagtaccctggtttacaagggtgaatgaatgaaatgcacccaggttccgagatctcctgggctgggatggggtgatttcaggactggtgtagtcctgagaggtccaggattttacggtatttcttgctctcctctgcaggcatccagggcattgtggatgcctaccgccaagccctgccccaagttcgcctctatggccctaccaactttgcacccatcatcaaccatgtggccaggtttgcagcccaggctgcacatcaggggactgcctcgggtgagagtcgtgggtggcagtggcagtggtggcaatcaagggcttccttgagggttatggaacaaaggacttttttttttttttttttttttgagatggactcttgctctgtcacccaggctggagtgcagtgacgcgatctcagctcactgcaacctgcacctcctgggttcaagtgattctcctgcctcagccttcctagtagcttggattacaggcgtgtgccaccatgcccagctaatttttatatttttagtagaga

SEQ ID NO: 446073 - DNA, 3935 bp, Homo sapiens
ctcgacgagccggactttctgtgacaacgtgcgacacggacggctggctggcctgcgctcgcggcatccaggcgacagctcgatatcgcggacatgagaggcccgtggctgcgttgggctccgggaagccgttcgggctggggctgtcggccgcggggcggaggcactcgcgcggggggggtaattcggggtctgggttctggtgccgcgcagctttccccgtctaaaagttggttttaattggttgcccacaggattgacttggcctctacttcttgttaaggaaattcatctcttgttttatcaggtgtgtgtggtttcagcgcagcatggctgtggtcatccgtttgcaaggtctcccaattgtggcggggaccatggacattcgccacttcttctctggattgaccattcctgatgggggcgtgcatattgtagggggtgaactgggtgaggctttcatcgtttttgccactgatgaagatgcaaggcttggtatgatgcgcacaggtggtacaattaaagggtcaaaagtaacactattgttgagtagtaagacggaaatgcagaatatgattgaactgagtcgtaggcgttttgaaactgccaacttagatataccaccagcaaatgccagtagatcaggaccaccacctagctcaggaatgagtagcagggtaaacttgcccacaacagtatccaactttaataatccatcacccagtgtagttactgccaccacttctgttcatgaaagcaacaaaaacatacagacattttccacagccagcgtaggaacagctcctccaaatatgggggcttcctttgggagcccaacgtttagctcaactgttccaagcacagcctctccaatgaacacagtcccgccgccaccaattcctccaattccagcgatgccatctctgccaccaatgccatccattcccccaattccagttcctcctccagtacctacattgcctcctgtgcctcctgtgcccccgattcccccagttccttctgtgccacccatgaccccactgccacccatgtcgggcatgccgcccttgaatccgccacctgtggcacctctacctgctggaatgaatggctctggagcacctatgaatttgaacaataatctgaatcctatgtttcttggtccgttgaatcctgttaaccctatccagatgaactctcagagcagtgtgaagccactccccatcaaccctgatgatctgtatgtcagtgtgcatggaatgcccttttctgcaatggaaaatgatgtcagagatttttttcatgggctccgtgttgatgcagtgcatttgttgaaagatcatgtaggtcgaaataatgggaatggattggttaagtttctctcccctcaagatacatttgaagctttgaaacgaaacagaatgctgatgattcaacgctatgtggaagttagccctgccacagaaagacagtgggtagctgctggaggccatatcacttttaagcaaaatatgggaccttctggacaaactcatccccctcctcagacacttcccaggtcaaaatcgcccagtgggcagaaaagatcaaggtcaagatcaccacatgaggctggtttttgtgtttacttgaaagggctaccatttgaagcagaaaacaaacatgtcattgatttttttaaaaagctggatattgtggaagatagtatttatatagcttatggacccaatgggaaagcaactggcgaaggctttgtagagttcagaaatgaggctgactataaggctgctctgtgtcgtcataaacagtacatgggcaatcgctttattcaagttcatccaattactaagaaaggtatgctagaaaagatagatatgattcgaaaaagactgcagaacttcagctatgaccagagggaaatgatactaaatccagagggggatgtcaactctgccaaagtctgtgcccacataacaaatattccattcagcattacaaagatggatgttcttcagttcctagaaggaatcccagtggatgaaaatgctgtacatgttcttgttgataacaatgggcaaggtctaggacaggcattggttcagtttaaaaatgaagatgatgcacatggcccactgcgtgaccttggttcagctgtccatttcctgtgaccatctcattgacaaggacatcggctccaagtctgacccactctgcgtccttttacaggatgtgggagggggcagctgggctgagcttggccggactgaacgggtgcggaactgctcaagccctgagttctccaagactctacagcttgagtaccgctttgagacagtccagaagctacgctttggaatctatgacatagacaacaagacgccagagctgagggatgatgacttcctagggggtgctgagtgttccctaggacagattgtgtccagccaggtactgactctccccttgatgctgaagcctggaaaacctgctgggcgggggaccatcacggtctcagctcaggaattaaaggacaatcgtgtagtaaccatggaggtagaggccagaaacctagataagaaggacttcctgggaaaatcagatccatttctggagttcttccgccagggtgatgggaaatggcacctggtgtacagatctgaggtcatcaagaacaacctgaaccctacatggaagcgtttctcagtccccgttcagcatttctgtggtgggaaccccagcacacccatccaggtgcaatgctccgattatgacagtgacgggtcacatgatctcatcggtaccttccacaccagcttggcccagctgcaggcagtcccggctgagtttgaatgcatccaccctgagaagcagcagaaaaagaaaagctacaagaactctggaactatccgtgtcaagatttgtcgggtagaaacagagtactcctttctggactatgtgatgggaggctgtcagatcaacttcactgtgggcgtggacttcactggctccaatggagacccctcctcacctgactccctacactacctgagtccaacaggggtcaatgagtacctgatggcactgtggagtgtgggcagcgtggttcaggactatgactcagacaagctgttccctgcatttggatttggggcccaggttccccctgactggcaggtctcgcatgaatttgccttgaatttcaaccccagtaacccctactgtgcaggcatccagggcattgtggatgcctaccgccaagccctgccccaagttcgcctctatggccctaccaactttgcacccatcatcaaccatgtggccaggtttgcagcccaggctgcacatcaggggactgcctcgcaatacttcatgctgttgctgctgactgatggtgctgtgacggatgtggaagccacacgtgaggctgtggtgcgtgcctcgaacctgcccatgtcagtgatcattgtgggtgtgggtggtgctgactttgaggccatggagcagctggacgctgatggtggacccctgcatacacgttctgggcaggctgctgcccgcgacattgtgcagtttgtaccctaccgccggttccagaatgcccctcgggaggcattggcacagaccgtgctcgcagaagtgcccacacaactggtctcatacttcagggcccagggttgggccccgctcaagccacttccaccctcagccaaggatcctgcacaggccccccaggcctaggttcccttggaggctgtggcaagtcctcaatcctgtgtcccagaggtccctctgggccacaacccaacccttctcactctcctcagtgctagcactttgtattttttgatacttttatacttgtttctgcttttgctgctcttgatcccacctttgctcctgacaaccctcattcaataaagaccagtgaagaccaa

SEQ ID NO: 446074 - DNA, 3903 bp, Homo sapiens
ctcgacgagccggactttctgtgacaacgtgcgacacggacggctggctggcctgcgctcgcggcatccaggcgacagctcgatatcgcggacatgagaggcccgtggctgcgttgggctccgggaagccgttcgggctggggctgtcggccgcggggcggaggcactcgcgcggggggggtaattcggggtctgggttctggtgccgcgcagctttccccggattgacttggcctctacttcttgttaaggaaattcatctcttgttttatcaggtgtgtgtggtttcagcgcagcatggctgtggtcatccgtttgcaaggtctcccaattgtggcggggaccatggacattcgccacttcttctctggattgaccattcctgatgggggcgtgcatattgtagggggtgaactgggtgaggctttcatcgtttttgccactgatgaagatgcaaggcttggtatgatgcgcacaggtggtacaattaaagggtcaaaagtaacactattgttgagtagtaagacggaaatgcagaatatgattgaactgagtcgtaggcgttttgaaactgccaacttagatataccaccagcaaatgccagtagatcaggaccaccacctagctcaggaatgagtagcagggtaaacttgcccacaacagtatccaactttaataatccatcacccagtgtagttactgccaccacttctgttcatgaaagcaacaaaaacatacagacattttccacagccagcgtaggaacagctcctccaaatatgggggcttcctttgggagcccaacgtttagctcaactgttccaagcacagcctctccaatgaacacagtcccgccgccaccaattcctccaattccagcgatgccatctctgccaccaatgccatccattcccccaattccagttcctcctccagtacctacattgcctcctgtgcctcctgtgcccccgattcccccagttccttctgtgccacccatgaccccactgccacccatgtcgggcatgccgcccttgaatccgccacctgtggcacctctacctgctggaatgaatggctctggagcacctatgaatttgaacaataatctgaatcctatgtttcttggtccgttgaatcctgttaaccctatccagatgaactctcagagcagtgtgaagccactccccatcaaccctgatgatctgtatgtcagtgtgcatggaatgcccttttctgcaatggaaaatgatgtcagagatttttttcatgggctccgtgttgatgcagtgcatttgttgaaagatcatgtaggtcgaaataatgggaatggattggttaagtttctctcccctcaagatacatttgaagctttgaaacgaaacagaatgctgatgattcaacgctatgtggaagttagccctgccacagaaagacagtgggtagctgctggaggccatatcacttttaagcaaaatatgggaccttctggacaaactcatccccctcctcagacacttcccaggtcaaaatcgcccagtgggcagaaaagatcaaggtcaagatcaccacatgaggctggtttttgtgtttacttgaaagggctaccatttgaagcagaaaacaaacatgtcattgatttttttaaaaagctggatattgtggaagatagtatttatatagcttatggacccaatgggaaagcaactggcgaaggctttgtagagttcagaaatgaggctgactataaggctgctctgtgtcgtcataaacagtacatgggcaatcgctttattcaagttcatccaattactaagaaaggtatgctagaaaagatagatatgattcgaaaaagactgcagaacttcagctatgaccagagggaaatgatactaaatccagagggggatgtcaactctgccaaagtctgtgcccacataacaaatattccattcagcattacaaagatggatgttcttcagttcctagaaggaatcccagtggatgaaaatgctgtacatgttcttgttgataacaatgggcaaggtctaggacaggcattggttcagtttaaaaatgaagatgatgcacatggcccactgcgtgaccttggttcagctgtccatttcctgtgaccatctcattgacaaggacatcggctccaagtctgacccactctgcgtccttttacaggatgtgggagggggcagctgggctgagcttggccggactgaacgggtgcggaactgctcaagccctgagttctccaagactctacagcttgagtaccgctttgagacagtccagaagctacgctttggaatctatgacatagacaacaagacgccagagctgagggatgatgacttcctagggggtgctgagtgttccctaggacagattgtgtccagccaggtactgactctccccttgatgctgaagcctggaaaacctgctgggcgggggaccatcacggtctcagctcaggaattaaaggacaatcgtgtagtaaccatggaggtagaggccagaaacctagataagaaggacttcctgggaaaatcagatccatttctggagttcttccgccagggtgatgggaaatggcacctggtgtacagatctgaggtcatcaagaacaacctgaaccctacatggaagcgtttctcagtccccgttcagcatttctgtggtgggaaccccagcacacccatccaggtgcaatgctccgattatgacagtgacgggtcacatgatctcatcggtaccttccacaccagcttggcccagctgcaggcagtcccggctgagtttgaatgcatccaccctgagaagcagcagaaaaagaaaagctacaagaactctggaactatccgtgtcaagatttgtcgggtagaaacagagtactcctttctggactatgtgatgggaggctgtcagatcaacttcactgtgggcgtggacttcactggctccaatggagacccctcctcacctgactccctacactacctgagtccaacaggggtcaatgagtacctgatggcactgtggagtgtgggcagcgtggttcaggactatgactcagacaagctgttccctgcatttggatttggggcccaggttccccctgactggcaggtctcgcatgaatttgccttgaatttcaaccccagtaacccctactgtgcaggcatccagggcattgtggatgcctaccgccaagccctgccccaagttcgcctctatggccctaccaactttgcacccatcatcaaccatgtggccaggtttgcagcccaggctgcacatcaggggactgcctcgcaatacttcatgctgttgctgctgactgatggtgctgtgacggatgtggaagccacacgtgaggctgtggtgcgtgcctcgaacctgcccatgtcagtgatcattgtgggtgtgggtggtgctgactttgaggccatggagcagctggacgctgatggtggacccctgcatacacgttctgggcaggctgctgcccgcgacattgtgcagtttgtaccctaccgccggttccagaatgcccctcgggaggcattggcacagaccgtgctcgcagaagtgcccacacaactggtctcatacttcagggcccagggttgggccccgctcaagccacttccaccctcagccaaggatcctgcacaggccccccaggcctaggttcccttggaggctgtggcaagtcctcaatcctgtgtcccagaggtccctctgggccacaacccaacccttctcactctcctcagtgctagcactttgtattttttgatacttttatacttgtttctgcttttgctgctcttgatcccacctttgctcctgacaaccctcattcaataaagaccagtgaagaccaa

SEQ ID NO: 446075 - DNA, 2033 bp, Homo sapiens
ctcgacgagccggactttctgtgacaacgtgcgacacggacggctggctggcctgcgctcgcggcatccaggcgacagctcgatatcgcggacatgagaggcccgtggctgcgttgggctccgggaagccgttcgggctggggctgtcggccgcggggcggaggcactcgcgcggggggggtaattcggggtctgggttctggtgccgcgcagctttccccgatggcccactgcgtgaccttggttcagctgtccatttcctgtgaccatctcattgacaaggacatcggctccaagtctgacccactctgcgtccttttacaggatgtgggagggggcagctgggctgagcttggccggactgaacgggtgcggaactgctcaagccctgagttctccaagactctacagcttgagtaccgctttgagacagtccagaagctacgctttggaatctatgacatagacaacaagacgccagagctgagggatgatgacttcctagggggtgctgagtgttccctaggacagattgtgtccagccaggtactgactctccccttgatgctgaagcctggaaaacctgctgggcgggggaccatcacggtctcagctcaggaattaaaggacaatcgtgtagtaaccatggaggtagaggccagaaacctagataagaaggacttcctgggaaaatcagatccatttctggagttcttccgccagggtgatgggaaatggcacctggtgtacagatctgaggtcatcaagaacaacctgaaccctacatggaagcgtttctcagtccccgttcagcatttctgtggtgggaaccccagcacacccatccaggtgcaatgctccgattatgacagtgacgggtcacatgatctcatcggtaccttccacaccagcttggcccagctgcaggcagtcccggctgagtttgaatgcatccaccctgagaagcagcagaaaaagaaaagctacaagaactctggaactatccgtgtcaagatttgtcgggtagaaacagagtactcctttctggactatgtgatgggaggctgtcagatcaacttcactgtgggcgtggacttcactggctccaatggagacccctcctcacctgactccctacactacctgagtccaacaggggtcaatgagtacctgatggcactgtggagtgtgggcagcgtggttcaggactatgactcagacaagctgttccctgcatttggatttggggcccaggttccccctgactggcaggtctcgcatgaatttgccttgaatttcaaccccagtaacccctactgtgcaggcatccagggcattgtggatgcctaccgccaagccctgccccaagttcgcctctatggccctaccaactttgcacccatcatcaaccatgtggccaggtttgcagcccaggctgcacatcaggggactgcctcgcaatacttcatgctgttgctgctgactgatggtgctgtgacggatgtggaagccacacgtgaggctgtggtgcgtgcctcgaacctgcccatgtcagtgatcattgtgggtgtgggtggtgctgactttgaggccatggagcagctggacgctgatggtggacccctgcatacacgttctgggcaggctgctgcccgcgacattgtgcagtttgtaccctaccgccggttccagaatgcccctcgggaggcattggcacagaccgtgctcgcagaagtgcccacacaactggtctcatacttcagggcccagggttgggccccgctcaagccacttccaccctcagccaaggatcctgcacaggccccccaggcctaggttcccttggaggctgtggcaagtcctcaatcctgtgtcccagaggtccctctgggccacaacccaacccttctcactctcctcagtgctagcactttgtattttttgatacttttatacttgtttctgcttttgctgctcttgatcccacctttgctcctgacaaccctcattcaataaagaccagtgaagaccaa

SEQ ID NO: 446076 - DNA, 2261 bp, Homo sapiens
ctcgacgagccggactttctgtgacaacgtgcgacacggacggctggctggcctgcgctcgcggcatccaggcgacagctcgatatcgcggacatgagaggcccgtggctgcgttgggctccgggaagccgttcgggctggggctgtcggccgcggggcggaggcactcgcgcggggggggtaattcggggtctgggttctggtgccgcgcagctttccccgtctaaaagttggttttaattggttgcccacaggattgacttggcctctacttcttgttaaggaaattcatctcttgttttatcaggtgtgtgtggtttcagcgcagcatggctgtggtcatccgtttgcaaggtctcccaattgtggcggggaccatggacattcgccacttcttctctggattgaccattcctgatgggggcgtgcatattgtagggggtgaactggatggcccactgcgtgaccttggttcagctgtccatttcctgtgaccatctcattgacaaggacatcggctccaagtctgacccactctgcgtccttttacaggatgtgggagggggcagctgggctgagcttggccggactgaacgggtgcggaactgctcaagccctgagttctccaagactctacagcttgagtaccgctttgagacagtccagaagctacgctttggaatctatgacatagacaacaagacgccagagctgagggatgatgacttcctagggggtgctgagtgttccctaggacagattgtgtccagccaggtactgactctccccttgatgctgaagcctggaaaacctgctgggcgggggaccatcacggtctcagctcaggaattaaaggacaatcgtgtagtaaccatggaggtagaggccagaaacctagataagaaggacttcctgggaaaatcagatccatttctggagttcttccgccagggtgatgggaaatggcacctggtgtacagatctgaggtcatcaagaacaacctgaaccctacatggaagcgtttctcagtccccgttcagcatttctgtggtgggaaccccagcacacccatccaggtgcaatgctccgattatgacagtgacgggtcacatgatctcatcggtaccttccacaccagcttggcccagctgcaggcagtcccggctgagtttgaatgcatccaccctgagaagcagcagaaaaagaaaagctacaagaactctggaactatccgtgtcaagatttgtcgggtagaaacagagtactcctttctggactatgtgatgggaggctgtcagatcaacttcactgtgggcgtggacttcactggctccaatggagacccctcctcacctgactccctacactacctgagtccaacaggggtcaatgagtacctgatggcactgtggagtgtgggcagcgtggttcaggactatgactcagacaagctgttccctgcatttggatttggggcccaggttccccctgactggcaggtctcgcatgaatttgccttgaatttcaaccccagtaacccctactgtgcaggcatccagggcattgtggatgcctaccgccaagccctgccccaagttcgcctctatggccctaccaactttgcacccatcatcaaccatgtggccaggtttgcagcccaggctgcacatcaggggactgcctcgcaatacttcatgctgttgctgctgactgatggtgctgtgacggatgtggaagccacacgtgaggctgtggtgcgtgcctcgaacctgcccatgtcagtgatcattgtgggtgtgggtggtgctgactttgaggccatggagcagctggacgctgatggtggacccctgcatacacgttctgggcaggctgctgcccgcgacattgtgcagtttgtaccctaccgccggttccagaatgcccctcgggaggcattggcacagaccgtgctcgcagaagtgcccacacaactggtctcatacttcagggcccagggttgggccccgctcaagccacttccaccctcagccaaggatcctgcacaggccccccaggcctaggttcccttggaggctgtggcaagtcctcaatcctgtgtcccagaggtccctctgggccacaacccaacccttctcactctcctcagtgctagcactttgtattttttgatacttttatacttgtttctgcttttgctgctcttgatcccacctttgctcctgacaaccctcattcaataaagaccagtgaagaccaa

SEQ ID NO: 446077 - DNA, 3863 bp, Homo sapiens
ctcgacgagccggactttctgtgacaacgtgcgacacggacggctggctggcctgcgctcgcggcatccaggcgacagctcgatatcgcggacatgagaggcccgtggctgcgttgggctccgggaagccgttcgggctggggctgtcggccgcggggcggaggcactcgcgcggggggggtaattcggggtctgggttctggtgccgcgcagctttccccgtctaaaagttggttttaattggttgcccacaggattgacttggcctctacttcttgttaaggaaattcatctcttgttttatcaggtgtgtgtggtttcagcgcagcatggctgtggtcatccgtttgcaaggtctcccaattgtggcggggaccatggacattcgccacttcttctctggattgaccattcctgatgggggcgtgcatattgtagggggtgaactgggtgaggctttcatcgtttttgccactgatgaagatgcaaggcttggtatgatgcgcacaggtggtacaattaaagggtcaaaagtaacactattgttgagtagtaagacggaaatgcagaatatgattgaactgagtcgtaggcgttttgaaactgccaacttagatataccaccagcaaatgccagtagatcaggaccaccacctagctcaggaatgagtagcagggtaaacttgcccacaacagtatccaactttaataatccatcacccagtgtagttactgccaccacttctgttcatgaaagcaacaaaaacatacagacattttccacagccagcgtaggaacagctcctccaaatatgggggcttcctttgggagcccaacgtttagctcaactgttccaagcacagcctctccaatgaacacagtcccgccgccaccaattcctccaattccagcgatgccatctctgccaccaatgccatccattcccccaattccagttcctcctccagtacctacattgcctcctgtgcctcctgtgcccccgattcccccagttccttctgtgccacccatgaccccactgccacccatgtcgggcatgccgcccttgaatccgccacctgtggcacctctacctgctggaatgaatggctctggagcacctatgaatttgaacaataatctgaatcctatgtttcttggtccgttgaatcctgttaaccctatccagatgaactctcagagcagtgtgaagccactccccatcaaccctgatgatctgtatgtcagtgtgcatggaatgcccttttctgcaatggaaaatgatgtcagagatttttttcatgggctccgtgttgatgcagtgcatttgttgaaagatcatgtaggtcgaaataatgggaatggattggttaagtttctctcccctcaagatacatttgaagctttgaaacgaaacagaatgctgatgattcaacgctatgtggaagttagccctgccacagaaagacagtgggtagctgctggaggccatatcacttttaagcaaaatatgggaccttctggacaaactcatccccctcctcagacacttcccaggtcaaaatcgcccagtgggcagaaaagatcaaggtcaagatcaccacatgaggctggtttttgtgtttacttgaaagggctaccatttgaagcagaaaacaaacatgtcattgatttttttaaaaagctggatattgtggaagatagtatttatatagcttatggacccaatgggaaagcaactggcgaaggctttgtagagttcagaaatgaggctgactataaggctgctctgtgtcgtcataaacagtacatgggcaatcgctttattcaagttcatccaattactaagaaaggtatgctagaaaagatagatatgattcgaaaaagactgcagaacttcagctatgaccagagggaaatgatactaaatccagagggggatgtcaactctgccaaagtctgtgcccacataacaaatattccattcagcattacaaagatggatgttcttcagttcctagaaggaatcccagtggatgaaaatgctgtacatgttcttgttgataacaatgggcaaggtctaggacaggcattggttcagtttaaaaatgaagatgatgcacatggcccactgcgtgaccttggttcagctgtccatttcctgtgaccatctcattgacaaggacatcggctccaagtctgacccactctgcgtccttttacaggatgtgggagggggcagctgggctgagcttggccggactgaacgggtgcggaactgctcaagccctgagttctccaagactctacagcttgagtaccgctttgagacagtccagaagctacgctttggaatctatgacatagacaacaagacgccagagctgagggatgatgacttcctagggggtgctgagtgttccctaggacagattgtgtccagccaggtactgactctccccttgatgctgaagcctggaaaacctgctgggcgggggaccatcacggacttcctgggaaaatcagatccatttctggagttcttccgccagggtgatgggaaatggcacctggtgtacagatctgaggtcatcaagaacaacctgaaccctacatggaagcgtttctcagtccccgttcagcatttctgtggtgggaaccccagcacacccatccaggtgcaatgctccgattatgacagtgacgggtcacatgatctcatcggtaccttccacaccagcttggcccagctgcaggcagtcccggctgagtttgaatgcatccaccctgagaagcagcagaaaaagaaaagctacaagaactctggaactatccgtgtcaagatttgtcgggtagaaacagagtactcctttctggactatgtgatgggaggctgtcagatcaacttcactgtgggcgtggacttcactggctccaatggagacccctcctcacctgactccctacactacctgagtccaacaggggtcaatgagtacctgatggcactgtggagtgtgggcagcgtggttcaggactatgactcagacaagctgttccctgcatttggatttggggcccaggttccccctgactggcaggtctcgcatgaatttgccttgaatttcaaccccagtaacccctactgtgcaggcatccagggcattgtggatgcctaccgccaagccctgccccaagttcgcctctatggccctaccaactttgcacccatcatcaaccatgtggccaggtttgcagcccaggctgcacatcaggggactgcctcgcaatacttcatgctgttgctgctgactgatggtgctgtgacggatgtggaagccacacgtgaggctgtggtgcgtgcctcgaacctgcccatgtcagtgatcattgtgggtgtgggtggtgctgactttgaggccatggagcagctggacgctgatggtggacccctgcatacacgttctgggcaggctgctgcccgcgacattgtgcagtttgtaccctaccgccggttccagaatgcccctcgggaggcattggcacagaccgtgctcgcagaagtgcccacacaactggtctcatacttcagggcccagggttgggccccgctcaagccacttccaccctcagccaaggatcctgcacaggccccccaggcctaggttcccttggaggctgtggcaagtcctcaatcctgtgtcccagaggtccctctgggccacaacccaacccttctcactctcctcagtgctagcactttgtattttttgatacttttatacttgtttctgcttttgctgctcttgatcccacctttgctcctgacaaccctcattcaataaagaccagtgaagaccaa

SEQ ID NO: 446078 - DNA, 4029 bp, Homo sapiens
ctcgacgagccggactttctgtgacaacgtgcgacacggacggctggctggcctgcgctcgcggcatccaggcgacagctcgatatcgcggacatgagaggcccgtggctgcgttgggctccgggaagccgttcgggctggggctgtcggccgcggggcggaggcactcgcgcggggggggtaattcggggtctgggttctggtgccgcgcagctttccccgtctaaaagttggttttaattggttgcccacaggattgacttggcctctacttcttgttaaggaaattcatctcttgttttatcaggtgtgtgtggtttcagcgcagcatggctgtggtcatccgtttgcaaggtctcccaattgtggcggggaccatggacattcgccacttcttctctggattgaccattcctgatgggggcgtgcatattgtagggggtgaactgggtgaggctttcatcgtttttgccactgatgaagatgcaaggcttggtatgatgcgcacaggtggtacaattaaagggtcaaaagtaacactattgttgagtagtaagacggaaatgcagaatatgattgaactgagtcgtaggcgttttgaaactgccaacttagatataccaccagcaaatgccagtagatcaggaccaccacctagctcaggaatgagtagcagggtaaacttgcccacaacagtatccaactttaataatccatcacccagtgtagttactgccaccacttctgttcatgaaagcaacaaaaacatacagacattttccacagccagcgtaggaacagctcctccaaatatgggggcttcctttgggagcccaacgtttagctcaactgttccaagcacagcctctccaatgaacacagtcccgccgccaccaattcctccaattccagcgatgccatctctgccaccaatgccatccattcccccaattccagttcctcctccagtacctacattgcctcctgtgcctcctgtgcccccgattcccccagttccttctgtgccacccatgaccccactgccacccatgtcgggcatgccgcccttgaatccgccacctgtggcacctctacctgctggaatgaatggctctggagcacctatgaatttgaacaataatctgaatcctatgtttcttggtccgttgaatcctgttaaccctatccagatgaactctcagagcagtgtgaagccactccccatcaaccctgatgatctgtatgtcagtgtgcatggaatgcccttttctgcaatggaaaatgatgtcagagatttttttcatgggctccgtgttgatgcagtgcatttgttgaaagatcatgtaggtcgaaataatgggaatggattggttaagtttctctcccctcaagatacatttgaagctttgaaacgaaacagaatgctgatgattcaacgctatgtggaagttagccctgccacagaaagacagtgggtagctgctggaggccatatcacttttaagcaaaatatgggaccttctggacaaactcatccccctcctcagacacttcccaggtcaaaatcgcccagtgggcagaaaagatcaaggtcaagatcaccacatgaggctggtttttgtgtttacttgaaagggctaccatttgaagcagaaaacaaacatgtcattgatttttttaaaaagctggatattgtggaagatagtatttatatagcttatggacccaatgggaaagcaactggcgaaggctttgtagagttcagaaatgaggctgactataaggctgctctgtgtcgtcataaacagtacatgggcaatcgctttattcaagttcatccaattactaagaaaggtatgctagaaaagatagatatgattcgaaaaagactgcagaacttcagctatgaccagagggaaatgatactaaatccagagggggatgtcaactctgccaaagtctgtgcccacataacaaatattccattcagcattacaaagatggatgttcttcagttcctagaaggaatcccagtggatgaaaatgctgtacatgttcttgttgataacaatgggcaaggtctaggacaggcattggttcagtttaaaaatgaagatgatgcacatggcccactgcgtgaccttggttcagctgtccatttcctgtgaccatctcattgacaaggacatcggctccaagtctgacccactctgcgtccttttacaggatgtgggagggggcagctgggctgagcttggccggactgaacgggtgcggaactgctcaagccctgagttctccaagactctacagcttgagtaccgctttgagacagtccagaagctacgctttggaatctatgacatagacaacaagacgccagagctgagggatgatgacttcctagggggtgctgagtgttccctaggacagattgtgtccagccaggtactgactctccccttgatgctgaagcctggaaaacctgctgggcgggggaccatcacggtctcagctcaggaattaaaggacaatcgtgtagtaaccatggaggtagaggccagaaacctagataagaaggacttcctgggaaaatcagatccatttctggagttcttccgccagggtgatgggaaatggcacctggtgtacagatctgaggtcatcaagaacaacctgaaccctacatggaagcgtttctcagtccccgttcagcatttctgtggtgggaaccccagcacacccatccaggtgcaatgctccgattatgacagtgacgggtcacatgatctcatcggtaccttccacaccagcttggcccagctgcaggcagtcccggctgagtttgaatgcatccaccctgagaagcagcagaaaaagaaaagctacaagaactctggaactatccgtgtcaagatttgtcgggtgagacaaaagcccatgtaaccaaggctctgattcctgagctccatgacaccaactgctatcaccccaggcatgaccctggtttcatttgcaggtagaaacagagtactcctttctggactatgtgatgggaggctgtcagatcaacttcactgtgggcgtggacttcactggctccaatggagacccctcctcacctgactccctacactacctgagtccaacaggggtcaatgagtacctgatggcactgtggagtgtgggcagcgtggttcaggactatgactcagacaagctgttccctgcatttggatttggggcccaggttccccctgactggcaggtctcgcatgaatttgccttgaatttcaaccccagtaacccctactgtgcaggcatccagggcattgtggatgcctaccgccaagccctgccccaagttcgcctctatggccctaccaactttgcacccatcatcaaccatgtggccaggtttgcagcccaggctgcacatcaggggactgcctcgcaatacttcatgctgttgctgctgactgatggtgctgtgacggatgtggaagccacacgtgaggctgtggtgcgtgcctcgaacctgcccatgtcagtgatcattgtgggtgtgggtggtgctgactttgaggccatggagcagctggacgctgatggtggacccctgcatacacgttctgggcaggctgctgcccgcgacattgtgcagtttgtaccctaccgccggttccagaatgcccctcgggaggcattggcacagaccgtgctcgcagaagtgcccacacaactggtctcatacttcagggcccagggttgggccccgctcaagccacttccaccctcagccaaggatcctgcacaggccccccaggcctaggttcccttggaggctgtggcaagtcctcaatcctgtgtcccagaggtccctctgggccacaacccaacccttctcactctcctcagtgctagcactttgtattttttgatacttttatacttgtttctgcttttgctgctcttgatcccacctttgctcctgacaaccctcattcaataaagaccagtgaagaccaa

SEQ ID NO: 446079 - DNA, 3913 bp, Homo sapiens
ctcgacgagccggactttctgtgacaacgtgcgacacggacggctggctggcctgcgctcgcggcatccaggcgacagctcgatatcgcggacatgagaggcccgtggctgcgttgggctccgggaagccgttcgggctggggctgtcggccgcggggcggaggcactcgcgcggggggggtaattcggggtctgggttctggtgccgcgcagctttccccgtctaaaagttggttttaattggttgcccacaggattgacttggcctctacttcttgttaaggaaattcatctcttgttttatcaggtgtgtgtggtttcagcgcagcatggctgtggtcatccgtttgcaaggtctcccaattgtggcggggaccatggacattcgccacttcttctctggattgaccattcctgatgggggcgtgcatattgtagggggtgaactgggtgaggctttcatcgtttttgccactgatgaagatgcaaggcttggtatgatgcgcacaggtggtacaattaaagggtcaaaagtaacactattgttgagtagtaagacggaaatgcagaatatgattgaactgagtcgtaggcgttttgaaactgccaacttagatataccaccagcaaatgccagtagatcaggaccaccacctagctcaggaatgagtagcagggtaaacttgcccacaacagtatccaactttaataatccatcacccagtgtagttactgccaccacttctgttcatgaaagcaacaaaaacatacagacattttccacagccagcgtaggaacagctcctccaaatatgggggcttcctttgggagcccaacgtttagctcaactgttccaagcacagcctctccaatgaacacagtcccgccgccaccaattcctccaattccagcgatgccatctctgccaccaatgccatccattcccccaattccagttcctcctccagtacctacattgcctcctgtgcctcctgtgcccccgattcccccagttccttctgtgccacccatgaccccactgccacccatgtcgggcatgccgcccttgaatccgccacctgtggcacctctacctgctggaatgaatggctctggagcacctatgaatttgaacaataatctgaatcctatgtttcttggtccgttgaatcctgttaaccctatccagatgaactctcagagcagtgtgaagccactccccatcaaccctgatgatctgtatgtcagtgtgcatggaatgcccttttctgcaatggaaaatgatgtcagagatttttttcatgggctccgtgttgatgcagtgcatttgttgaaagatcatgtaggtcgaaataatgggaatggattggttaagtttctctcccctcaagatacatttgaagctttgaaacgaaacagaatgctgatgattcaacgctatgtggaagttagccctgccacagaaagacagtgggtagctgctggaggccatatcacttttaagcaaaatatgggaccttctggacaaactcatccccctcctcagacacttcccaggtcaaaatcgcccagtgggcagaaaagatcaaggtcaagatcaccacatgaggctggtttttgtgtttacttgaaagggctaccatttgaagcagaaaacaaacatgtcattgatttttttaaaaagctggatattgtggaagatagtatttatatagcttatggacccaatgggaaagcaactggcgaaggctttgtagagttcagaaatgaggctgactataaggctgctctgtgtcgtcataaacagtacatgggcaatcgctttattcaagttcatccaattactaagaaaggtatgctagaaaagatagatatgattcgaaaaagactgcagaacttcagctatgaccagagggaaatgatactaaatccagagggggatgtcaactctgccaaagtctgtgcccacataacaaatattccattcagcattacaaagatggatgttcttcagttcctagaaggaatcccagtggatgaaaatgctgtacatgttcttgttgataacaatgggcaaggtctaggacaggcattggttcagtttaaaaatgaagatgatgcacatggcccactgcgtgaccttggttcagctgtccatttcctgtgaccatctcattgacaaggacatcggctccaagtctgacccactctgcgtccttttacaggatgtgggagggggcagctgggctgagcttggccggactgaacgggtgcggaactgctcaagccctgagttctccaagactctacagcttgagtaccgctttgagacagtccagaagctacgctttggaatctatgacatagacaacaagacgccagagctgagggatgatgacttcctagggggtgctgagtgttccctaggacagattgtgtccagccaggtactgactctccccttgatgctgaagcctggaaaacctgctgggcgggggaccatcacggtctcagctcaggaattaaaggacaatcgtgtagtaaccatggaggtagaggccagaaacctagataagaaggacttcctgggaaaatcagatccatttctggagttcttccgccagggtgatgggaaatggcacctggtgtacagatctgaggtcatcaagaacaacctgaaccctacatggaagcgtttctcagtccccgttcagcatttctgtggtgggaaccccagcacacccatccaggtgcaatgctccgattatgacagtgacgggtcacatgatctcatcggtaccttccacaccagcttggcccagctgcaggcagtcccggctgagtttgaatgcatccaccctgagaagcagcagaaaaagaaaagctacaagaactctggaactatccgtgtcaagatttgtcgggtagaaacagagtactcctttctggactatgtgatgggaggctgtcagatcaacttcactgtgggcgtggacttcactggctccaatggagacccctcctcacctgactccctacactacctgagtccaacaggggtcaatgagtacctgatggcactgtggagtgtgggcagcgtggttcaggactatgactcagacaagctgttccctgcatttggatttggggcccaggttccccctgactggcaggtctcgcatgaatttgccttgaatttcaaccccagtaacccctactgtgcagctaccgccaagccctgccccaagttcgcctctatggccctaccaactttgcacccatcatcaaccatgtggccaggtttgcagcccaggctgcacatcaggggactgcctcgcaatacttcatgctgttgctgctgactgatggtgctgtgacggatgtggaagccacacgtgaggctgtggtgcgtgcctcgaacctgcccatgtcagtgatcattgtgggtgtgggtggtgctgactttgaggccatggagcagctggacgctgatggtggacccctgcatacacgttctgggcaggctgctgcccgcgacattgtgcagtttgtaccctaccgccggttccagaatgcccctcgggaggcattggcacagaccgtgctcgcagaagtgcccacacaactggtctcatacttcagggcccagggttgggccccgctcaagccacttccaccctcagccaaggatcctgcacaggccccccaggcctaggttcccttggaggctgtggcaagtcctcaatcctgtgtcccagaggtccctctgggccacaacccaacccttctcactctcctcagtgctagcactttgtattttttgatacttttatacttgtttctgcttttgctgctcttgatcccacctttgctcctgacaaccctcattcaataaagaccagtgaagaccaa

SEQ ID NO: 446080 - DNA, 4290 bp, Homo sapiens
ctcgacgagccggactttctgtgacaacgtgcgacacggacggctggctggcctgcgctcgcggcatccaggcgacagctcgatatcgcggacatgagaggcccgtggctgcgttgggctccgggaagccgttcgggctggggctgtcggccgcggggcggaggcactcgcgcggggggggtaattcggggtctgggttctggtgccgcgcagctttccccgtctaaaagttggttttaattggttgcccacaggattgacttggcctctacttcttgttaaggaaattcatctcttgttttatcaggtgtgtgtggtttcagcgcagcatggctgtggtcatccgtttgcaaggtctcccaattgtggcggggaccatggacattcgccacttcttctctggattgaccattcctgatgggggcgtgcatattgtagggggtgaactgggtgaggctttcatcgtttttgccactgatgaagatgcaaggcttggtatgatgcgcacaggtggtacaattaaagggtcaaaagtaacactattgttgagtagtaagacggaaatgcagaatatgattgaactgagtcgtaggcgttttgaaactgccaacttagatataccaccagcaaatgccagtagatcaggaccaccacctagctcaggaatgagtagcagggtaaacttgcccacaacagtatccaactttaataatccatcacccagtgtagttactgccaccacttctgttcatgaaagcaacaaaaacatacagacattttccacagccagcgtaggaacagctcctccaaatatgggggcttcctttgggagcccaacgtttagctcaactgttccaagcacagcctctccaatgaacacagtcccgccgccaccaattcctccaattccagcgatgccatctctgccaccaatgccatccattcccccaattccagttcctcctccagtacctacattgcctcctgtgcctcctgtgcccccgattcccccagttccttctgtgccacccatgaccccactgccacccatgtcgggcatgccgcccttgaatccgccacctgtggcacctctacctgctggaatgaatggctctggagcacctatgaatttgaacaataatctgaatcctatgtttcttggtccgttgaatcctgttaaccctatccagatgaactctcagagcagtgtgaagccactccccatcaaccctgatgatctgtatgtcagtgtgcatggaatgcccttttctgcaatggaaaatgatgtcagagatttttttcatgggctccgtgttgatgcagtgcatttgttgaaagatcatgtaggtcgaaataatgggaatggattggttaagtttctctcccctcaagatacatttgaagctttgaaacgaaacagaatgctgatgattcaacgctatgtggaagttagccctgccacagaaagacagtgggtagctgctggaggccatatcacttttaagcaaaatatgggaccttctggacaaactcatccccctcctcagacacttcccaggtcaaaatcgcccagtgggcagaaaagatcaaggtcaagatcaccacatgaggctggtttttgtgtttacttgaaagggctaccatttgaagcagaaaacaaacatgtcattgatttttttaaaaagctggatattgtggaagatagtatttatatagcttatggacccaatgggaaagcaactggcgaaggctttgtagagttcagaaatgaggctgactataaggctgctctgtgtcgtcataaacagtacatgggcaatcgctttattcaagttcatccaattactaagaaaggtatgctagaaaagatagatatgattcgaaaaagactgcagaacttcagctatgaccagagggaaatgatactaaatccagagggggatgtcaactctgccaaagtctgtgcccacataacaaatattccattcagcattacaaagatggatgttcttcagttcctagaaggaatcccagtggatgaaaatgctgtacatgttcttgttgataacaatgggcaaggtctaggacaggcattggttcagtttaaaaatgaagatgatgcacatggcccactgcgtgaccttggttcagctgtccatttcctgtgaccatctcattgacaaggacatcggctccaagtctgacccactctgcgtccttttacaggatgtgggagggggcagctgggctgagcttggccggactgaacgggtgcggaactgctcaagccctgagttctccaagactctacagcttgagtaccgctttgagacagtccagaagctacgctttggaatctatgacatagacaacaagacgccagagctgagggatgatgacttcctagggggtgctgagtgttccctaggacagattgtgtccagccaggtactgactctccccttgatgctgaagcctggaaaacctgctgggcgggggaccatcacggtctcagctcaggaattaaaggacaatcgtgtagtaaccatggaggtagaggccagaaacctagataagaaggacttcctgggaaaatcagatccatttctggagttcttccgccagggtgatgggaaatggcacctggtgtacagatctgaggtcatcaagaacaacctgaaccctacatggaagcgtttctcagtccccgttcagcatttctgtggtgggaaccccagcacacccatccaggtgcaatgctccgattatgacagtgacgggtcacatgatctcatcggtaccttccacaccagcttggcccagctgcaggcagtcccggctgagtttgaatgcatccaccctgagaagcagcagaaaaagaaaagctacaagaactctggaactatccgtgtcaagatttgtcgggtagaaacagagtactcctttctggactatgtgatgggaggctgtcagatcaacttcactgtgggcgtggacttcactggctccaatggagacccctcctcacctgactccctacactacctgagtccaacaggggtcaatgagtacctgatggcactgtggagtgtgggcagcgtggttcaggactatgactccgtgagtacctgcttctctgggctatacccgctccctgcagatgcttcagcctctgagcttacagtcccctcactgccttttgcccaatacactgtcctcccacagagacaagctgttccctgcatttggatttggggcccaggttccccctgactggcagtgagctccctctctttctgccactcctgttttcagtttcagggtcctgattttgggggatgtggtaaatttacttgctacttggcactcagctttaagaggagatgcagggttggattcctgcaggcacgtagacagcaagtgctcaggactccatagctcctataggaatcttggcacacgccagtgtcctttttcattcttagcagaggtcatggggaaagaacctcattttcattcttgtctccaggtctcgcatgaatttgccttgaatttcaaccccagtaacccctactgtgcaggcatccagggcattgtggatgcctaccgccaagccctgccccaagttcgcctctatggccctaccaactttgcacccatcatcaaccatgtggccaggtttgcagcccaggctgcacatcaggggactgcctcgcaatacttcatgctgttgctgctgactgatggtgctgtgacggatgtggaagccacacgtgaggctgtggtgcgtgcctcgaacctgcccatgtcagtgatcattgtgggtgtgggtggtgctgactttgaggccatggagcagctggacgctgatggtggacccctgcatacacgttctgggcaggctgctgcccgcgacattgtgcagtttgtaccctaccgccggttccagaatgcccctcgggaggcattggcacagaccgtgctcgcagaagtgcccacacaactggtctcatacttcagggcccagggttgggccccgctcaagccacttccaccctcagccaaggatcctgcacaggccccccaggcctaggttcccttggaggctgtggcaagtcctcaatcctgtgtcccagaggtccctctgggccacaacccaacccttctcactctcctcagtgctagcactttgtattttttgatacttttatacttgtttctgcttttgctgctcttgatcccacctttgctcctgacaaccctcattcaataaagaccagtgaagaccaa

SEQ ID NO: 446081 - DNA, 3958 bp, Homo sapiens
ctcgacgagccggactttctgtgacaacgtgcgacacggacggctggctggcctgcgctcgcggcatccaggcgacagctcgatatcgcggacatgagaggcccgtggctgcgttgggctccgggaagccgttcgggctggggctgtcggccgcggggcggaggcactcgcgcggggggggtaattcggggtctgggttctggtgccgcgcagctttccccgtctaaaagttggttttaattggttgcccacaggattgacttggcctctacttcttgttaaggaaattcatctcttgttttatcaggtgtgtgtggtttcagcgcagcatggctgtggtcatccgtttgcaaggtctcccaattgtggcggggaccatggacattcgccacttcttctctggattgaccattcctgatgggggcgtgcatattgtagggggtgaactgggtgaggctttcatcgtttttgccactgatgaagatgcaaggcttggtatgatgcgcacaggtggtacaattaaagggtcaaaagtaacactattgttgagtagtaagacggaaatgcagaatatgattgaactgagtcgtaggcgttttgaaactgccaacttagatataccaccagcaaatgccagtagatcaggaccaccacctagctcaggaatgagtagcagggtaaacttgcccacaacagtatccaactttaataatccatcacccagtgtagttactgccaccacttctgttcatgaaagcaacaaaaacatacagacattttccacagccagcgtaggaacagctcctccaaatatgggggcttcctttgggagcccaacgtttagctcaactgttccaagcacagcctctccaatgaacacagtcccgccgccaccaattcctccaattccagcgatgccatctctgccaccaatgccatccattcccccaattccagttcctcctccagtacctacattgcctcctgtgcctcctgtgcccccgattcccccagttccttctgtgccacccatgaccccactgccacccatgtcgggcatgccgcccttgaatccgccacctgtggcacctctacctgctggaatgaatggctctggagcacctatgaatttgaacaataatctgaatcctatgtttcttggtccgttgaatcctgttaaccctatccagatgaactctcagagcagtgtgaagccactccccatcaaccctgatgatctgtatgtcagtgtgcatggaatgcccttttctgcaatggaaaatgatgtcagagatttttttcatgggctccgtgttgatgcagtgcatttgttgaaagatcatgtaggtcgaaataatgggaatggattggttaagtttctctcccctcaagatacatttgaagctttgaaacgaaacagaatgctgatgattcaacgctatgtggaagttagccctgccacagaaagacagtgggtagctgctggaggccatatcacttttaagcaaaatatgggaccttctggacaaactcatccccctcctcagacacttcccaggtcaaaatcgcccagtgggcagaaaagatcaaggtcaagatcaccacatgaggctggtttttgtgtttacttgaaagggctaccatttgaagcagaaaacaaacatgtcattgatttttttaaaaagctggatattgtggaagatagtatttatatagcttatggacccaatgggaaagcaactggcgaaggctttgtagagttcagaaatgaggctgactataaggctgctctgtgtcgtcataaacagtacatgggcaatcgctttattcaagttcatccaattactaagaaaggtatgctagaaaagatagatatgattcgaaaaagactgcagaacttcagctatgaccagagggaaatgatactaaatccagagggggatgtcaactctgccaaagtctgtgcccacataacaaatattccattcagcattacaaagatggatgttcttcagttcctagaaggaatcccagtggatgaaaatgctgtacatgttcttgttgataacaatgggcaaggtctaggacaggcattggttcagtttaaaaatgaagatgatgcacatggcccactgcgtgaccttggttcagctgtccatttcctgtgaccatctcattgacaaggacatcggctccaagtctgacccactctgcgtccttttacaggatgtgggagggggcagctgggctgagcttggccggactgaacgggtgcggaactgctcaagccctgagttctccaagactctacagcttgagtaccgctttgagacagtccagaagctacgctttggaatctatgacatagacaacaagacgccagagctgagggatgatgacttcctagggggtgctgagtgttccctaggacagattgtgtccagccaggtactgactctccccttgatgctgaagcctggaaaacctgctgggcgggggaccatcacggtctcagctcaggaattaaaggacaatcgtgtagtaaccatggaggtagaggccagaaacctagataagaaggacttcctgggaaaatcagatccatttctggagttcttccgccagggtgatgggaaatggcacctggtgtacagatctgaggtcatcaagaacaacctgaaccctacatggaagcgtttctcagtccccgttcagcatttctgtggtgggaaccccagcacacccatccaggtgcaatgctccgattatgacagtgacgggtcacatgatctcatcggtaccttccacaccagcttggcccagctgcaggcagtcccggctgagtttgaatgcatccaccctgagaagcagcagaaaaagaaaagctacaagaactctggaactatccgtgtcaagatttgtcgggtagaaacagagtactcctttctggactatgtgatgggaggctgtcagatcaacttcactgtgggcgtggacttcactggctccaatggagacccctcctcacctgactccctacactacctgagtccaacaggggtcaatgagtacctgatggcactgtggagtgtgggcagcgtggttcaggactatgactcagacaagctgttccctgcatttggatttggggcccaggttccccctgactggcaggtctcgcatgaatttgccttgaatttcaaccccagtaacccctactgtgcaggcatccagggcattgtggatgcctaccgccaagccctgccccaagttcgcctctatggccctaccaactttgcacccatcatcaaccatgtggccaggtttgcagcccaggctgcacatcaggggactgcctcggacatgaatgggcttgtccccagcaatacttcatgctgttgctgctgactgatggtgctgtgacggatgtggaagccacacgtgaggctgtggtgcgtgcctcgaacctgcccatgtcagtgatcattgtgggtgtgggtggtgctgactttgaggccatggagcagctggacgctgatggtggacccctgcatacacgttctgggcaggctgctgcccgcgacattgtgcagtttgtaccctaccgccggttccagaatgcccctcgggaggcattggcacagaccgtgctcgcagaagtgcccacacaactggtctcatacttcagggcccagggttgggccccgctcaagccacttccaccctcagccaaggatcctgcacaggccccccaggcctaggttcccttggaggctgtggcaagtcctcaatcctgtgtcccagaggtccctctgggccacaacccaacccttctcactctcctcagtgctagcactttgtattttttgatacttttatacttgtttctgcttttgctgctcttgatcccacctttgctcctgacaaccctcattcaataaagaccagtgaagaccaa

SEQ ID NO: 446082 - DNA, 3850 bp, Homo sapiens
ctcgacgagccggactttctgtgacaacgtgcgacacggacggctggctggcctgcgctcgcggcatccaggcgacagctcgatatcgcggacatgagaggcccgtggctgcgttgggctccgggaagccgttcgggctggggctgtcggccgcggggcggaggcactcgcgcggggggggtaattcggggtctgggttctggtgccgcgcagctttccccgtctaaaagttggttttaattggttgcccacaggattgacttggcctctacttcttgttaaggaaattcatctcttgttttatcaggtgtgtgtggtttcagcgcagcatggctgtggtcatccgtttgcaaggtctcccaattgtggcggggaccatggacattcgccacttcttctctggattgaccattcctgatgggggcgtgcatattgtagggggtgaactgggtgaggctttcatcgtttttgccactgatgaagatgcaaggcttggtatgatgcgcacaggtggtacaattaaagggtcaaaagtaacactattgttgagtagtaagacggaaatgcagaatatgattgaactgagtcgtaggcgttttgaaactgccaacttagatataccaccagcaaatgccagtagatcaggaccaccacctagctcaggaatgagtagcagggtaaacttgcccacaacagtatccaactttaataatccatcacccagtgtagttactgccaccacttctgttcatgaaagcaacaaaaacatacagacattttccacagccagcgtaggaacagctcctccaaatatgggggcttcctttgggagcccaacgtttagctcaactgttccaagcacagcctctccaatgaacacagtcccgccgccaccaattcctccaattccagcgatgccatctctgccaccaatgccatccattcccccaattccagttcctcctccagtacctacattgcctcctgtgcctcctgtgcccccgattcccccagttccttctgtgccacccatgaccccactgccacccatgtcgggcatgccgcccttgaatccgccacctgtggcacctctacctgctggaatgaatggctctggagcacctatgaatttgaacaataatctgaatcctatgtttcttggtccgttgaatcctgttaaccctatccagatgaactctcagagcagtgtgaagccactccccatcaaccctgatgatctgtatgtcagtgtgcatggaatgcccttttctgcaatggaaaatgatgtcagagatttttttcatgggctccgtgttgatgcagtgcatttgttgaaagatcatgtaggtcgaaataatgggaatggattggttaagtttctctcccctcaagatacatttgaagctttgaaacgaaacagaatgctgatgattcaacgctatgtggaagttagccctgccacagaaagacagtgggtagctgctggaggccatatcacttttaagcaaaatatgggaccttctggacaaactcatccccctcctcagacacttcccaggtcaaaatcgcccagtgggcagaaaagatcaaggtcaagatcaccacatgaggctggtttttgtgtttacttgaaagggctaccatttgaagcagaaaacaaacatgtcattgatttttttaaaaagctggatattgtggaagatagtatttatatagcttatggacccaatgggaaagcaactggcgaaggctttgtagagttcagaaatgaggctgactataaggctgctctgtgtcgtcataaacagtacatgggcaatcgctttattcaagttcatccaattactaagaaaggtatgctagaaaagatagatatgattcgaaaaagactgcagaacttcagctatgaccagagggaaatgatactaaatccagagggggatgtcaactctgccaaagtctgtgcccacataacaaatattccattcagcattacaaagatggatgttcttcagttcctagaaggaatcccagtggatgaaaatgctgtacatgttcttgttgataacaatgggcaaggtctaggacaggcattggttcagtttaaaaatgaagatgatgcacatggcccactgcgtgaccttggttcagctgtccatttcctgtgaccatctcattgacaaggacatcggctccaagtctgacccactctgcgtccttttacaggatgtgggagggggcagctgggctgagcttggccggactgaacgggtgcggaactgctcaagccctgagttctccaagactctacagcttgagtaccgctttgagacagtccagaagctacgctttggaatctatgacatagacaacaagacgccagagctgagggatgatgacttcctagggggtgctgagtgttccctaggacagattgtgtccagccaggtactgactctccccttgatgctgaagcctggaaaacctgctgggcgggggaccatcacggtctcagctcaggaattaaaggacaatcgtgtagtaaccatggaggtagaggccagaaacctagataagaaggacttcctgggaaaatcagatccatttctggagttcttccgccagggtgatgggaaatggcacctggtgtacagatctgaggtcatcaagaacaacctgaaccctacatggaagcgtttctcagtccccgttcagcatttctgtggtgggaaccccagcacacccatccaggtgcaatgctccgattatgacagtgacgggtcacatgatctcatcggtaccttccacaccagcttggcccagctgcaggcagtcccggctgagtttgaatgcatccaccctgagaagcagcagaaaaagaaaagctacaagaactctggaactatccgtgtcaagatttgtcgggtagaaacagagtactcctttctggactatgtgatgggaggctgtcagatcaacttcactgtgggcgtggacttcactggctccaatggagacccctcctcacctgactccctacactacctgagtccaacaggggtcaatgagtacctgatggcactgtggagtgtgggcagcgtggttcaggactatgactcagacaagctgttccctgcatttggatttggggcccaggttccccctgactggcaggtctcgcatgaatttgccttgaatttcaaccccagtaacccctactgtgcaggggtttaggaggaggatctgcttcaggacatgaatgggcttgtccccagcaatacttcatgctgttgctgctgactgatggtgctgtgacggatgtggaagccacacgtgaggctgtggtgcgtgcctcgaacctgcccatgtcagtgatcattgtgggtgtgggtggtgctgactttgaggccatggagcagctggacgctgatggtggacccctgcatacacgttctgggcaggctgctgcccgcgacattgtgcagtttgtaccctaccgccggttccagaatgcccctcgggaggcattggcacagaccgtgctcgcagaagtgcccacacaactggtctcatacttcagggcccagggttgggccccgctcaagccacttccaccctcagccaaggatcctgcacaggccccccaggcctaggttcccttggaggctgtggcaagtcctcaatcctgtgtcccagaggtccctctgggccacaacccaacccttctcactctcctcagtgctagcactttgtattttttgatacttttatacttgtttctgcttttgctgctcttgatcccacctttgctcctgacaaccctcattcaataaagaccagtgaagaccaa

SEQ ID NO: 446083 - DNA, 4888 bp, Homo sapiens
ctcgacgagccggactttctgtgacaacgtgcgacacggacggctggctggcctgcgctcgcggcatccaggcgacagctcgatatcgcggacatgagaggcccgtggctgcgttgggctccgggaagccgttcgggctggggctgtcggccgcggggcggaggcactcgcgcggggggggtaattcggggtctgggttctggtgccgcgcagctttccccgtctaaaagttggttttaattggttgcccacaggattgacttggcctctacttcttgttaaggaaattcatctcttgttttatcaggtgtgtgtggtttcagcgcagcatggctgtggtcatccgtttgcaaggtctcccaattgtggcggggaccatggacattcgccacttcttctctggattgaccattcctgatgggggcgtgcatattgtagggggtgaactgggtgaggctttcatcgtttttgccactgatgaagatgcaaggcttggtatgatgcgcacaggtggtacaattaaagggtcaaaagtaacactattgttgagtagtaagacggaaatgcagaatatgattgaactgagtcgtaggcgttttgaaactgccaacttagatataccaccagcaaatgccagtagatcaggaccaccacctagctcaggaatgagtagcagggtaaacttgcccacaacagtatccaactttaataatccatcacccagtgtagttactgccaccacttctgttcatgaaagcaacaaaaacatacagacattttccacagccagcgtaggaacagctcctccaaatatgggggcttcctttgggagcccaacgtttagctcaactgttccaagcacagcctctccaatgaacacagtcccgccgccaccaattcctccaattccagcgatgccatctctgccaccaatgccatccattcccccaattccagttcctcctccagtacctacattgcctcctgtgcctcctgtgcccccgattcccccagttccttctgtgccacccatgaccccactgccacccatgtcgggcatgccgcccttgaatccgccacctgtggcacctctacctgctggaatgaatggctctggagcacctatgaatttgaacaataatctgaatcctatgtttcttggtccgttgaatcctgttaaccctatccagatgaactctcagagcagtgtgaagccactccccatcaaccctgatgatctgtatgtcagtgtgcatggaatgcccttttctgcaatggaaaatgatgtcagagatttttttcatgggctccgtgttgatgcagtgcatttgttgaaagatcatgtaggtcgaaataatgggaatggattggttaagtttctctcccctcaagatacatttgaagctttgaaacgaaacagaatgctgatgattcaacgctatgtggaagttagccctgccacagaaagacagtgggtagctgctggaggccatatcacttttaagcaaaatatgggaccttctggacaaactcatccccctcctcagacacttcccaggtcaaaatcgcccagtgggcagaaaagatcaaggtcaagatcaccacatgaggctggtttttgtgtttacttgaaagggctaccatttgaagcagaaaacaaacatgtcattgatttttttaaaaagctggatattgtggaagatagtatttatatagcttatggacccaatgggaaagcaactggcgaaggctttgtagagttcagaaatgaggctgactataaggctgctctgtgtcgtcataaacagtacatgggcaatcgctttattcaagttcatccaattactaagaaaggtatgctagaaaagatagatatgattcgaaaaagactgcagaacttcagctatgaccagagggaaatgatactaaatccagagggggatgtcaactctgccaaagtctgtgcccacataacaaatattccattcagcattacaaagatggatgttcttcagttcctagaaggaatcccagtggatgaaaatgctgtacatgttcttgttgataacaatgggcaaggtctaggacaggcattggttcagtttaaaaatgaagatgatgcacatggcccactgcgtgaccttggttcagctgtccatttcctgtgaccatctcattgacaaggacatcggctccaagtctgacccactctgcgtccttttacaggatgtgggagggggcagctgggctgagcttggccggactgaacgggtgcggaactgctcaagccctgagttctccaagactctacagcttgagtaccgctttgagacagtccagaagctacgctttggaatctatgacatagacaacaagacgccagagctgagggatgatgacttcctagggggtgctgagtgttccctaggacagattgtgtccagccaggtactgactctccccttgatgctgaagcctggaaaacctgctgggcgggggaccatcacggtctcagctcaggaattaaaggacaatcgtgtagtaaccatggaggtagaggccagaaacctagataagaaggacttcctgggaaaatcagatccatttctggagttcttccgccagggtgatgggaaatggcacctggtgtacagatctgaggtcatcaagaacaacctgaaccctacatggaagcgtttctcagtccccgttcagcatttctgtggtgggaaccccagcacacccatccaggtgcaatgctccgattatgacagtgacgggtcacatgatctcatcggtaccttccacaccagcttggcccagctgcaggcagtcccggctgagtttgaatgcatccaccctgagaagcagcagaaaaagaaaagctacaagaactctggaactatccgtgtcaagatttgtcgggtagaaacagagtactcctttctggactatgtgatgggaggctgtcagatcaacttcactgtgggcgtggacttcactggctccaatggagacccctcctcacctgactccctacactacctgagtccaacaggggtcaatgagtacctgatggcactgtggagtgtgggcagcgtggttcaggactatgactcagacaagctgttccctgcatttggatttggggcccaggttccccctgactggcaggtctcgcatgaatttgccttgaatttcaaccccagtaacccctactgtgcaggcatccagggcattgtggatgcctaccgccaagccctgccccaagttcgcctctatggccctaccaactttgcacccatcatcaaccatgtggccaggtttgcagcccaggctgcacatcaggggactgcctcgcaatacttcatgctgttgctgctgactgatggtgctgtgacggatgtggaagccacacgtgaggctgtggtgcgtgcctcgaacctgcccatgtcagtgatcattgtgggtgtgggtggtgctgactttgaggccatggagcagctggacgctgatggtggacccctgcatacacgttctgggcaggctgctgcccgcgacattgtgcagtttgtaccctaccgccggttccagaatgcccctcgggaggcattggcacagaccgtgctcgcagaagtgcccacacaactggtctcatacttcagggcccagggttgggccccgctcaagccacttccaccctcagccaaggatcctgcacaggccccccaggcctaggttcccttggaggctgtggcaagtcctcaatcctgtgtcccagaggtccctctgggccacaacccaacccttctcactctcctcagtgctagcactttgtattttttgatacttttatacttgtttctgcttttgctgctcttgatcccacctttgctcctgacaaccctcattcaataaagaccagtgaagaccaaaaaaaaaaaaaaaaaaaaaaaaaaaaaaaaaaaaaaaaaaaaaaaaaaaaaaaaaaaaaaaaaagagagagagggggggcgcgcgcccaaaaatatatcccccgcggggggcgcgccccttgcgcgcgcgcgcccccccgacttttgtgctgcgaacaagaaggggcgccccacaagaagggaggcccgcttattatacccgaccgagcgagcgcggagcgggcgccgcgttaaaaacaagcgcgcgcacaggggaaaaacacgcgcccacagcgcggcagcaacctccgtgggagaagagaaccacccccacacgcggggggggaggcgcgaccaccaacctatgtgggggcgccccactcctcctcctcaccagacagagatttatttacaccccccactagggggagaacaatatctacaacactctcttctacacgggggtactacataaggggtggtgtacaacaccaaggcgcccgataatatccccctccttcgcgcctagcgaaaacatttttcgccccccaaccgacgagtcatctagatatcgcgaggaggacacaaatatttttttaacccacgggggggtcttgttttttatataataaaaatctcgcgcagtgacgacccagtcagaactacagagcaaccaggcccacagacacacgccagcgcgacgaggactgaccactcacaaacagaccgaaccaaccgagcacacaagagtgctacgacgccgattgacgtacctaggaccaagaagcaaagaccgctctacccacctcacagctcgctaagccaagggacacagagtcggagcactgagacgggatgacagcggagaacactacgcagcacgtcaggcacacgaaaacccacaaagccacacaaactacaacacacacgaggcacagaaaaagccaacagcaaaacaacacccacagaaccca

SEQ ID NO: 446084 - DNA, 2108 bp, Homo sapiens
ctcgacgagccggactttctgtgacaacgtgcgacacggacggctggctggcctgcgctcgcggcatccaggcgacagctcgatatcgcggacatgagaggcccgtggctgcgttgggctccgggaagccgttcgggctggggctgtcggccgcggggcggaggcactcgcgcggggggggtaattcggggtctgggttctggtgccgcgcagctttccccggattgacttggcctctacttcttgttaaggaaattcatctcttgttttatcagatggcccactgcgtgaccttggttcagctgtccatttcctgtgaccatctcattgacaaggacatcggctccaagtctgacccactctgcgtccttttacaggatgtgggagggggcagctgggctgagcttggccggactgaacgggtgcggaactgctcaagccctgagttctccaagactctacagcttgagtaccgctttgagacagtccagaagctacgctttggaatctatgacatagacaacaagacgccagagctgagggatgatgacttcctagggggtgctgagtgttccctaggacagattgtgtccagccaggtactgactctccccttgatgctgaagcctggaaaacctgctgggcgggggaccatcacggacttcctgggaaaatcagatccatttctggagttcttccgccagggtgatgggaaatggcacctggtgtacagatctgaggtcatcaagaacaacctgaaccctacatggaagcgtttctcagtccccgttcagcatttctgtggtgggaaccccagcacacccatccaggtgcaatgctccgattatgacagtgacgggtcacatgatctcatcggtaccttccacaccagcttggcccagctgcaggcagtcccggctgagtttgaatgcatccaccctgagaagcagcagaaaaagaaaagctacaagaactctggaactatccgtgtcaagatttgtcgggtgagacaaaagcccatgtaaccaaggctctgattcctgagctccatgacaccaactgctatcaccccaggcatgaccctggtttcatttgcaggtagaaacagagtactcctttctggactatgtgatgggaggctgtcagatcaacttcactgtgggcgtggacttcactggctccaatggagacccctcctcacctgactccctacactacctgagtccaacaggggtcaatgagtacctgatggcactgtggagtgtgggcagcgtggttcaggactatgactcagacaagctgttccctgcatttggatttggggcccaggttccccctgactggcaggtctcgcatgaatttgccttgaatttcaaccccagtaacccctactgtgcaggcatccagggcattgtggatgcctaccgccaagccctgccccaagttcgcctctatggccctaccaactttgcacccatcatcaaccatgtggccaggtttgcagcccaggctgcacatcaggggactgcctcgcaatacttcatgctgttgctgctgactgatggtgctgtgacggatgtggaagccacacgtgaggctgtggtgcgtgcctcgaacctgcccatgtcagtgatcattgtgggtgtgggtggtgctgactttgaggccatggagcagctggacgctgatggtggacccctgcatacacgttctgggcaggctgctgcccgcgacattgtgcagtttgtaccctaccgccggttccagaatgcccctcgggaggcattggcacagaccgtgctcgcagaagtgcccacacaactggtctcatacttcagggcccagggttgggccccgctcaagccacttccaccctcagccaaggatcctgcacaggccccccaggcctaggttcccttggaggctgtggcaagtcctcaatcctgtgtcccagaggtccctctgggccacaacccaacccttctcactctcctcagtgctagcactttgtattttttgatacttttatacttgtttctgcttttgctgctcttgatcccacctttgctcctgacaaccctcattcaataaagaccagtgaagaccaa

SEQ ID NO: 446085 - DNA, 7409 bp, Homo sapiens
ctcgacgagccggactttctgtgacaacgtgcgacacggacggctggctggcctgcgctcgcggcatccaggcgacagctcgatatcgcggacatgagaggcccgtggctgcgttgggctccgggaagccgttcgggctggggctgtcggccgcggggcggaggcactcgcgcggggggggtaattcggggtctgggttctggtgccgcgcagctttccccgtctaaaagttggttttaattggttgcccacaggattgacttggcctctacttcttgttaaggaaattcatctcttgttttatcaggtgtgtgtggtttcagcgcagcatggctgtggtcatccgtttgcaaggtctcccaattgtggcggggaccatggacattcgccacttcttctctggattgaccattcctgatgggggcgtgcatattgtagggggtgaactgggtgaggctttcatcgtttttgccactgatgaagatgcaaggcttggtatgatgcgcacaggtggtacaattaaagggtcaaaagtaacactattgttgagtagtaagacggaaatgcagaatatgattgaactgagtcgtaggcgttttgaaactgccaacttagatataccaccagcaaatgccagtagatcaggaccaccacctagctcaggaatgagtagcagggtaaacttgcccacaacagtatccaactttaataatccatcacccagtgtagttactgccaccacttctgttcatgaaagcaacaaaaacatacagacattttccacagccagcgtaggaacagctcctccaaatatgggggcttcctttgggagcccaacgtttagctcaactgttccaagcacagcctctccaatgaacacagtcccgccgccaccaattcctccaattccagcgatgccatctctgccaccaatgccatccattcccccaattccagttcctcctccagtacctacattgcctcctgtgcctcctgtgcccccgattcccccagttccttctgtgccacccatgaccccactgccacccatgtcgggcatgccgcccttgaatccgccacctgtggcacctctacctgctggaatgaatggctctggagcacctatgaatttgaacaataatctgaatcctatgtttcttggtccgttgaatcctgttaaccctatccagatgaactctcagagcagtgtgaagccactccccatcaaccctgatgatctgtatgtcagtgtgcatggaatgcccttttctgcaatggaaaatgatgtcagagatttttttcatgggctccgtgttgatgcagtgcatttgttgaaagatcatgtaggtcgaaataatgggaatggattggttaagtttctctcccctcaagatacatttgaagctttgaaacgaaacagaatgctgatgattcaacgctatgtggaagttagccctgccacagaaagacagtgggtagctgctggaggccatatcacttttaagcaaaatatgggaccttctggacaaactcatccccctcctcagacacttcccaggtcaaaatcgcccagtgggcagaaaagatcaaggtcaagatcaccacatgaggctggtttttgtgtttacttgaaagggctaccatttgaagcagaaaacaaacatgtcattgatttttttaaaaagctggatattgtggaagatagtatttatatagcttatggacccaatgggaaagcaactggcgaaggctttgtagagttcagaaatgaggctgactataaggctgctctgtgtcgtcataaacagtacatgggcaatcgctttattcaagttcatccaattactaagaaaggtatgctagaaaagatagatatgattcgaaaaagactgcagaacttcagctatgaccagagggaaatgatactaaatccagagggggatgtcaactctgccaaagtctgtgcccacataacaaatattccattcagcattacaaagatggatgttcttcagttcctagaaggaatcccagtggatgaaaatgctgtacatgttcttgttgataacaatgggcaaggtctaggacaggcattggttcagtttaaaaatgaagatgatgcacgtaagtctgaacgcttacaccgtaaaaaacttaatgggagagaagcttttgttcatgtagttaccctagaagatatgagagagattgagaaaaatccccctgcccaaggaaaaaagggattaaagatgcctgtgccaggtaatcctgcagttccaggaatgcccaatgcgggactgcccggtgtgggactgcccagtgcaggacttcccggtgcaggcctgcccagcacaggactgcctggttcagcaataaccagtgcaggactgcctggtgcgggaatgcccagtgcaggaatacctagtgcaggaggtgaagagcatgccttcctgactgtaggatcaaaggaagccaataatgggcctccatttaactttcctggtaattttggtggatcaaatgcctttgggccaccaatccctcctccaggattaggaggcggggcctttggtgatgctaggcctggtatgccttcagttggaaacagtggtttgcctggtctaggactggatgttccgggttttggaggtggaccaaacaatttaagtgggccatcgggatttggagggggccctcagaattttggaaatggccctggtagcttaggcggtcccccggggtttggaagtggccctcctggtcttggaagtgcccctgggcatttgggtgggccaccagcttttgggcctggccccggccccggccccggccctggcccaatccatattggtggtccccctggctttgcatctagttctggaaaaccaggaccgacagtaattaaagtgcaaaacatgccctttactgtgtctattgatgagattttagatttcttttatggctatcaagtaatcccaggctcagtgtgtttaaaatacaatgaaaaaggtatgcccacaggtgaagccatggtggcctttgagtctcgggatgaagccacagctgctgtcattgacttaaatgacaggcctataggttcaagaaaagtaaaacttgtattagggtagccattcacatcattttttatagggtagatcttcatattgctgtgattaatgcatccagattgttttcctagtatttccaggttagaacctgtggattgtttcaattgcatatagcttggtttccataacatagagcattggttgactgtttacagaagactcactcaccaggataaacattgctgtatgttacagtaaagctatctggagagaacacataaatgattttggcataccattagagaaaccatttgtaaaactcaaatgaccacataaagcttatcaaggagtctagattggttttgttttataccatatgggatgaagaaaatagaaatgtcagtagaactcattgagggtgctcttgccagctgctgaaaatagaagttggctactctcagaatttggtttaaagctggacagatttgctttgttatagggtaaagctttgtctaaagtcctcattttcttttaaaattgaataaaatttctgtatacagattcattgtatgtacctttattgcttcttaagggtccttgctgtatagacagtcctgcttcagaagttgctgctttgtttgtctaattgactcatttgtaaatgagcagaactgttttgttggtttttttccctaaatataaaagtccacacttcgtttgtgctataacctcaaactttgatttctaatgtcacacttaaaactgtgtggaataagacttttgccataaaaataaactatggagtcctttatctaccagagcctttttggtttgaccgccacgatttaggttagtcagtttaaaaattgttcatgttgtttggatggtatcgaaaaccagaaaccacttttaataatgtgtttaagatacttgatttgaagtccttttcatatggactaattgtagtatcaatttcctcctgtcccgattatgtgaaattttggcctttaaacaaagaggggcccattcataagaaagtgttatatctaggtttttaaaactgaagttgaaattatctttgttagcagtagtagtatagaataaaagatccgtatgctggttcgtagattgatacgtgttagtcctgttatttggaggctttttggcatagttgttcgatcaggagcctgtttactaaaagtcttcatacagagtacaagtgcagccgccagaggagaaaattgagattcttgaccctttcatactcttttctttggtattcaggacactaaggcaggaggaccacatgagttctggttggtaagtgtccttgtcatgaaaacacttgccttacaaggctctaattatgatttccctagtcagtgctctgaagatgtgtcacattatattataaacaatacggaaggggagataggtgagatgatatgaaaaacaaattttctcactgtcataaaaggctctaattatggttactttccttgtgatgaaaaacttggccttacagggctctagttatggttactttccctagtcaatgctctgaaaatgtgtcacattataaacaatacagaaggagagatagatgagagatcatgaaaaccaaattttatcttttacatggcccctttgtcttcgtttgaaacatccccaacatttcctacaaatcagcgtagttacaaaggggtcagtcttttaaaataagtatttcctattaaactatatatatatacagtgcctttttggtgttgtgagtcagtggaacactgaaatacagcggttgtgtaatttaagagtggcaacagtttcatttgataagatttgaaaaggctttttatcactacaatcttagaggattgacagtacaggatttttgtttaagagaaggattgtttagactcaagaggtgactatgttgtgggtcttttgataattcatgaatacagatttgctttgaccgatcactagatactgcctcctcaatttcaaaagcaatataacgtttgtatatgctgtttaatttaagttaatgttaagtaatcatttctcattccaaagacaatgcaaaaaacttcagcactgcttgagagttgtatttcagccacagatattttctccattggaaagctattttcattttagaaaaatgggttgtttgaagatgaaagtcttttatcttttttcacaatttattttggttatatgttcgtacattcttattaaatatttcatacactttattgcaactactttgttatttctacatcttagataaatgctgaaaaggaaaacgatttcattgttcatctaattaaataaattaaaagagcggtttgtgtagaaattggagagaactatgttttatatgaatcacaacagtgctcgttgtggactgtaattaaatgctttgccctctggaacttgatttttgtgtatctgagatttattaacagtgctaactgctaaggatactgtttatcttgttctgggcattggagtttcagtttttaaaaaattcttgaaaatgtattctgtgaaactactcatacctctcttcctgcgaattttctcctaagaactaggtttggggtagaaatgaattgacattattttctcatttgctttgtatggtatgaaggatttgtaaagctttgctcaaagttgtgtgcatttgtaaacactatcatgatattttcaattttatgtgtaaattttattgtctgtttttggtgactctgacattaatggaagagaatattttccattagatttaattttttttcctctcccttctgattttttttttattggtgttcatttttcttttgatttaaaggattagagaaatctacaaatgtatgtcataaataagcaaatttgtaaacttttctgaactttagtgaaacatttagttcacaagcataatttggaggtgtgttctgtgtttacacagtagtttggatgtacaattattattagtggctttttaaaaaatgaaacagtgttaagtgaaatgtagttcctagctttgtactccaagttgtcaaagcatcaacaatgaaaattcgattaggaaactttatttaaaatttcaggtagtaatattcagtgtagttaaggccagtcttaacccactggatgaaaatctaggactgtatggaagtaagcaaacattacatttttaggtggaaatagtcagccttgcataaaaacaaggatgcgtgaaagccttaaattccagctcccttttactggagtctgtggttgtgtacaggtatgggccaagtgtaaaatctcatcaattttaagaacactcgggaaatgagtaaagaaaatgtaaaattgctgctagtcaaatcttttggaaagaatttctggaagtggtcactttaaaaattattttccacccttgcaaaattgccacatttaaattgttttactggcagttctatagtagtccagactttagaaaccaaacacaacaaaatggcttgttgccaatatggccacaacattgccagcaaatactgccttggcatcactcagcagaggtttttgtttataaagatgaagtcttgaatactgttcaataaacttgtcaaaaaataaaacaggctgatgcttttaatgctttaactgcacaaaagtactttactgagctataatattatcttgtcagggtttttgttttgttttgtttttaaacctgaaaatattttgtgcctttggagaggtagatttggtaatcttggagaggtaaaaattgttgcttatccttgcctgctaatgctgaagtgtcaagagaagaggatacttggaacagcagggaggaaacttgattcaagtccatagtatccaccttttcagaattttatgtgtatgatgtgttggcaaacaaagcccttaaatgttgaaaactttttatcttgaaagagtttagcttgtattagaatttggatacccagtgtgttttagagggggctagacatataattccaggtagtagctgagccattattaaataatcgggatttgactaagcaatggacaaatcactgagtgaaatcagctgcctacagatatccaaaatggcttttaccatctgaaaggggtggactgtgtgataatatgtctccttttcttgttcaggagagatcagttatgtaattcattgttacctgctttccagtgttttacagcaagaaatagtttatcaactatgtgcatcatcactaatctcccaaaagtagagcttttacagggtatggtagaatcaaacttatggctttccttttttattaaaaatggctttatttcagtctt

SEQ ID NO: 446086 - DNA, 4120 bp, Homo sapiens
ctcgacgagccggactttctgtgacaacgtgcgacacggacggctggctggcctgcgctcgcggcatccaggcgacagctcgatatcgcggacatgagaggcccgtggctgcgttgggctccgggaagccgttcgggctggggctgtcggccgcggggcggaggcactcgcgcggggggggtaattcggggtctgggttctggtgccgcgcagctttccccgtctaaaagttggttttaattggttgcccacaggattgacttggcctctacttcttgttaaggaaattcatctcttgttttatcaggtgtgtgtggtttcagcgcagcatggctgtggtcatccgtttgcaaggtctcccaattgtggcggggaccatggacattcgccacttcttctctggattgaccattcctgatgggggcgtgcatattgtagggggtgaactgggtgaggctttcatcgtttttgccactgatgaagatgcaaggcttggtatgatgcgcacaggtggtacaattaaagggtcaaaagtaacactattgttgagtagtaagacggaaatgcagaatatgattgaactgagtcgtaggcgttttgaaactgccaacttagatataccaccagcaaatgccagtagatcaggaccaccacctagctcaggaatgagtagcagggtaaacttgcccacaacagtatccaactttaataatccatcacccagtgtagttactgccaccacttctgttcatgaaagcaacaaaaacatacagacattttccacagccagcgtaggaacagctcctccaaatatgggggcttcctttgggagcccaacgtttagctcaactgttccaagcacagcctctccaatgaacacagtcccgccgccaccaattcctccaattccagcgatgccatctctgccaccaatgccatccattcccccaattccagttcctcctccagtacctacattgcctcctgtgcctcctgtgcccccgattcccccagttccttctgtgccacccatgaccccactgccacccatgtcgggcatgccgcccttgaatccgccacctgtggcacctctacctgctggaatgaatggctctggagcacctatgaatttgaacaataatctgaatcctatgtttcttggtccgttgaatcctgttaaccctatccagatgaactctcagagcagtgtgaagccactccccatcaaccctgatgatctgtatgtcagtgtgcatggaatgcccttttctgcaatggaaaatgatgtcagagatttttttcatgggctccgtgttgatgcagtgcatttgttgaaagatcatgtaggtcgaaataatgggaatggattggttaagtttctctcccctcaagatacatttgaagctttgaaacgaaacagaatgctgatgattcaacgctatgtggaagttagccctgccacagaaagacagtgggtagctgctggaggccatatcacttttaagcaaaatatgggaccttctggacaaactcatccccctcctcagacacttcccaggtcaaaatcgcccagtgggcagaaaagatcaaggtcaagatcaccacatgaggctggtttttgtgtttacttgaaagggctaccatttgaagcagaaaacaaacatgtcattgatttttttaaaaagctggatattgtggaagatagtatttatatagcttatggacccaatgggaaagcaactggcgaaggctttgtagagttcagaaatgaggctgactataaggctgctctgtgtcgtcataaacagtacatgggcaatcgctttattcaagttcatccaattactaagaaaggtatgctagaaaagatagatatgattcgaaaaagactgcagaacttcagctatgaccagagggaaatgatactaaatccagagggggatgtcaactctgccaaagtctgtgcccacataacaaatattccattcagcattacaaagatggatgttcttcagttcctagaaggaatcccagtggatgaaaatgctgtacatgttcttgttgataacaatgggcaaggtctaggacaggcattggttcagtttaaaaatgaagatgatgcacatggcccactgcgtgaccttggttcagctgtccatttcctgtgaccatctcattgacaaggacatcggctccaagtctgacccactctgcgtccttttacaggatgtgggagggggcagctgggctgagcttggccggactgaacgggtgcggaactgctcaagccctgagttctccaagactctacagcttgagtaccgctttgagacagtccagaagctacgctttggaatctatgacatagacaacaagacgccagagctgagggatgatgacttcctagggggtgctgagtgttccctaggacagattgtgtccagccaggtactgactctccccttgatgctgaagcctggaaaacctgctgggcgggggaccatcacggtctcagctcaggaattaaaggacaatcgtgtagtaaccatggaggtagaggccagaaacctagataagaaggacttcctgggaaaatcagatccatttctggagttcttccgccagggtgatgggaaatggcacctggtgtacagatctgaggtcatcaagaacaacctgaaccctacatggaagcgtttctcagtccccgttcagcatttctgtggtgggaaccccagcacacccatccaggtgcaatgctccgattatgacagtgacgggtcacatgatctcatcggtaccttccacaccagcttggcccagctgcaggcagtcccggctgagtttgaatgcatccaccctgagaagcagcagaaaaagaaaagctacaagaactctggaactatccgtgtcaagatttgtcgggtagaaacagagtactcctttctggactatgtgatgggaggctgtcagatcaacttcactgtgggcgtggacttcactggctccaatggagacccctcctcacctgactccctacactacctgagtccaacaggggtcaatgagtacctgatggcactgtggagtgtgggcagcgtggttcaggactatgactcagacaagctgttccctgcatttggatttggggcccaggttccccctgactggcaggtctcgcatgaatttgccttgaatttcaaccccagtaacccctactgtgcaggcatccagggcattgtggatgcctaccgccaagccctgccccaagttcgcctctatggccctaccaactttgcacccatcatcaaccatgtggccaggtttgcagcccaggctgcacatcaggggactgcctcgcaatacttcatgctgttgctgctgactgatggtgctgtgacggatgtggaagccacacgtgaggctgtggtgcgtgcctcgaacctgcccatgtcagtgatcattgtgggtgtgggtggtgctgactttgaggccatggagcagctggacgctgatggtggacccctgcatacacgttctgggcaggctgctgcccgcgacattgtgcagtttgtaccctaccgccggttccagaatgtgagtaggtgcaaatttgatctgggagtttaccctttcacctttccctgatgtgagtagggttgaggcccaagggatgctcaccttttcctctaagcctgggatatggttgggttcttgggcatgaaatacagactttgggcagctgttctgggccaccactgacttttcccttttcttggcaggcccctcgggaggcattggcacagaccgtgctcgcagaagtgcccacacaactggtctcatacttcagggcccagggttgggccccgctcaagccacttccaccctcagccaaggatcctgcacaggccccccaggcctaggttcccttggaggctgtggcaagtcctcaatcctgtgtcccagaggtccctctgggccacaacccaacccttctcactctcctcagtgctagcactttgtattttttgatacttttatacttgtttctgcttttgctgctcttgatcccacctttgctcctgacaaccctcattcaataaagaccagtgaagaccaa

SEQ ID NO: 446087 - DNA, 5839 bp, Homo sapiens
ctcgacgagccggactttctgtgacaacgtgcgacacggacggctggctggcctgcgctcgcggcatccaggcgacagctcgatatcgcggacatgagaggcccgtggctgcgttgggctccgggaagccgttcgggctggggctgtcggccgcggggcggaggcactcgcgcggggggggtaattcggggtctgggttctggtgccgcgcagctttccccgtctaaaagttggttttaattggttgcccacaggattgacttggcctctacttcttgttaaggaaattcatctcttgttttatcaggtgtgtgtggtttcagcgcagcatggctgtggtcatccgtttgcaaggtctcccaattgtggcggggaccatggacattcgccacttcttctctggattgaccattcctgatgggggcgtgcatattgtagggggtgaactgggtgaggctttcatcgtttttgccactgatgaagatgcaaggcttggtatgatgcgcacaggtggtacaattaaagggtcaaaagtaacactattgttgagtagtaagacggaaatgcagaatatgattgaactgagtcgtaggcgttttgaaactgccaacttagatataccaccagcaaatgccagtagatcaggaccaccacctagctcaggaatgagtagcagggtaaacttgcccacaacagtatccaactttaataatccatcacccagtgtagttactgccaccacttctgttcatgaaagcaacaaaaacatacagacattttccacagccagcgtaggaacagctcctccaaatatgggggcttcctttgggagcccaacgtttagctcaactgttccaagcacagcctctccaatgaacacagtcccgccgccaccaattcctccaattccagcgatgccatctctgccaccaatgccatccattcccccaattccagttcctcctccagtacctacattgcctcctgtgcctcctgtgcccccgattcccccagttccttctgtgccacccatgaccccactgccacccatgtcgggcatgccgcccttgaatccgccacctgtggcacctctacctgctggaatgaatggctctggagcacctatgaatttgaacaataatctgaatcctatgtttcttggtccgttgaatcctgttaaccctatccagatgaactctcagagcagtgtgaagccactccccatcaaccctgatgatctgtatgtcagtgtgcatggaatgcccttttctgcaatggaaaatgatgtcagagatttttttcatgggctccgtgttgatgcagtgcatttgttgaaagatcatgtaggtcgaaataatgggaatggattggttaagtttctctcccctcaagatacatttgaagctttgaaacgaaacagaatgctgatgattcaacgctatgtggaagttagccctgccacagaaagacagtgggtagctgctggaggccatatcacttttaagcaaaatatgggaccttctggacaaactcatccccctcctcagacacttcccaggtcaaaatcgcccagtgggcagaaaagatcaaggtcaagatcaccacatgaggctggtttttgtgtttacttgaaagggctaccatttgaagcagaaaacaaacatgtcattgatttttttaaaaagctggatattgtggaagatagtatttatatagcttatggacccaatgggaaagcaactggcgaaggctttgtagagttcagaaatgaggctgactataaggctgctctgtgtcgtcataaacagtacatgggcaatcgctttattcaagttcatccaattactaagaaaggtatgctagaaaagatagatatgattcgaaaaagactgcagaacttcagctatgaccagagggaaatgatactaaatccagagggggatgtcaactctgccaaagtctgtgcccacataacaaatattccattcagcattacaaagatggatgttcttcagttcctagaaggaatcccagtggatgaaaatgctgtacatgttcttgttgataacaatgggcaaggtctaggacaggcattggttcagtttaaaaatgaagatgatgcacgtaagtctgaacgcttacaccgtaaaaaacttaatgggagagaagcttttgttcatgtagttaccctagaagatatgagagagattgagaaaaatccccctgcccaaggaaaaaagggattaaagatgcctgtgccaggtaatcctgcagttccaggaatgcccaatgcgggactgcccggtgtgggactgcccagtgcaggacttcccggtgcaggcctgcccagcacaggactgcctggttcagcaataaccagtgcaggactgcctggtgcgggaatgcccagtgcaggaatacctagtgcaggaggtgaagagcatgccttcctgactgtaggatcaaaggaagccaataatgggcctccatttaactttcctggtaattttggtggatcaaatgcctttgggccaccaatccctcctccaggattaggaggcggggcctttggtgatgctaggcctggtatgccttcagttggaaacagtggtttgcctggtctaggactggatgttccgggttttggaggtggaccaaacaatttaagtgggccatcgggatttggagggggccctcagaattttggaaatggccctggtagcttaggcggtcccccggggtttggaagtggccctcctggtcttggaagtgcccctgggcatttgggtgggccaccagcttttgggcctggccccggccccggccccggccctggcccaatccatattggtggtccccctggctttgcatctagttctggaaaaccaggaccgacagtaattaaagtgcaaaacatgccctttactgtgtctattgatgagattttagatttcttttatggctatcaagtaatcccaggctcagtgtgtttaaaatacaatgaaaaaggtatgcccacaggtgaagccatggtggcctttgagtctcgggatgaagccacagctgctgtcattgacttaaatgacaggcctataggttcaagaaaagtaaaacttgtattagggtagccattcacatcattttttatagggtagatcttcatattgctgtgattaatgcatccagattgttttcctagtatttccaggttagaacctgtggattgtttcaattgcatatagcttggtttccataacatagagcattggttgactgtttacagaagactcactcaccaggataaacattgctgtatgttacagtaaagctatctggagagaacacataaatgattttggcataccattagagaaaccatttgtaaaactcaaatgaccacataaagcttatcaaggagtctagattggttttgttttataccatatgggatgaagaaaatagaaatgtcagtagaactcattgagggtgctcttgccagctgctgaaaatagaagttggctactctcagaatttggtttaaagctggacagatttgctttgttatagggtaaagctttgtctaaagtcctcattttcttttaaaattgaataaaatttctgtatacagattcattgtatgtacctttattgcttcttaagggtccttgctgtatagacagtcctgcttcagaagttgctgctttgtttgtctaattgactcatttgtaaatgagcagaactgttttgttggtttttttccctaaatataaaagtccacacttcgtttgtgctataacctcaaactttgatttctaatgtcacacttaaaactgtgtggaataagacttttgccataaaaataaactatggagtcctttatctaccagagcctttttggtttgaccgccacgatttaggttagtcagtttaaaaattgttcatgttgtttggatggtatcgaaaaccagaaaccacttttaataatgtgtttaagatacttgatttgaagtccttttcatatggactaattgtagtatcaatttcctcctgtcccgattatgtgaaattttggcctttaaacaaagaggggcccattcataagaaagtgttatatctaggtttttaaaactgaagttgaaattatctttgttagcagtagtagtatagaataaaagatccgtatgctggttcgtagattgatacgtgttagtcctgttatttggaggctttttggcatagttgttcgatcaggagcctgtttactaaaagtcttcatacagagtacaagtgcagccgccagaggagaaaattgagattcttgaccctttcatactcttttctttggtattcaggacactaaggcaggaggaccacatgagttctggttggtaagtgtccttgtcatgaaaacacttgccttacaaggctctaattatgatttccctagtcagtgctctgaagatgtgtcacattatattataaacaatacggaaggggagataggtgagatgatatgaaaaacaaattttctcactgtcataaaaggctctaattatggttactttccttgtgatgaaaaacttggccttacagggctctagttatggttactttccctagtcaatgctctgaaaatgtgtcacattataaacaatacagaaggagagatagatgagagatcatgaaaaccaaattttatcttttacatggcccctttgtcttcgtttgaaacatccccaacatttcctacaaatcagcgtagttacaaaggggtcagtcttttaaaataagtatttcctattaaactatatatatatacagtgcctttttggtgttgtgagtcagtggaacactgaaatacagcggttgtgtaatttaagagtggcaacagtttcatttgataagatttgaaaaggctttttatcactacaatcttagaggattgacagtacaggatttttgtttaagagaaggattgtttagactcaagaggtgactatgttgtgggtcttttgataattcatgaatacagatttgctttgaccgatcactagatactgcctcctcaatttcaaaagcaatataacgtttgtatatgctgtttaatttaagttaatgttaagtaatcatttctcattccaaagacaatgcaaaaaacttcagcactgcttgagagttgtatttcagccacagatattttctccattggaaagctattttcattttagaaaaatgggttgtttgaagatgaaagtcttttatcttttttcacaatttattttggttatatgttcgtacattcttattaaatatttcatacactttattgcaactactttgttatttctacatcttagataaatgctgaaaaggaaaacgatttcattgttcatctaattaaataaattaaaagagcggtttgtgtagaaattggagagaactatgttttatatgaatcacaacagtgctcgttgtggactgtaattaaatgctttgccctctggaacttgaaaaaaaaaaacagacaacaaccaaacccaagcaaccacaatacacaccaagccactcccgaacgacagacccacgcaacgagaaccgacacccacgaacactccacccacacacgagacagcaggacaaaacaaaacaagttgtccgggcgccaccccgccacaactatataacacaacccggcgggccgcgccccacgatgaatatcgcagtgagacggtcgacagacaacggcgataaagcgcggttcccacaaaaaaacgcggcgggaacggggctaacaacaggtcggccgcggtgatcaaggagaagcagcaaaaccgcgcgt

SEQ ID NO: 446088 - DNA, 3770 bp, Homo sapiens
ctcgacgagccggactttctgtgacaacgtgcgacacggacggctggctggcctgcgctcgcggcatccaggcgacagctcgatatcgcggacatgagaggcccgtggctgcgttgggctccgggaagccgttcgggctggggctgtcggccgcggggcggaggcactcgcgcggggggggtaattcggggtctgggttctggtgccgcgcagctttccccgtctaaaagttggttttaattggttgcccacaggattgacttggcctctacttcttgttaaggaaattcatctcttgttttatcaggtgtgtgtggtttcagcgcagcatggctgtggtcatccgtttgcaaggtctcccaattgtggcggggaccatggacattcgccacttcttctctggattgaccattcctgatgggggcgtgcatattgtagggggtgaactgggtgaggctttcatcgtttttgccactgatgaagatgcaaggcttggtatgatgcgcacaggtggtacaattaaagggtcaaaagtaacactattgttgagtagtaagacggaaatgcagaatatgattgaactgagtcgtaggcgttttgaaactgccaacttagatataccaccagcaaatgccagtagatcaggaccaccacctagctcaggaatgagtagcagggtaaacttgcccacaacagtatccaactttaataatccatcacccagtgtagttactgccaccacttctgttcatgaaagcaacaaaaacatacagacattttccacagccagcgtaggaacagctcctccaaatatgggggcttcctttgggagcccaacgtttagctcaactgttccaagcacagcctctccaatgaacacagtcccgccgccaccaattcctccaattccagcgatgccatctctgccaccaatgccatccattcccccaattccagttcctcctccagtacctacattgcctcctgtgcctcctgtgcccccgattcccccagttccttctgtgccacccatgaccccactgccacccatgtcgggcatgccgcccttgaatccgccacctgtggcacctctacctgctggaatgaatggctctggagcacctatgaatttgaacaataatctgaatcctatgtttcttggtccgttgaatcctgttaaccctatccagatgaactctcagagcagtgtgaagccactccccatcaaccctgatgatctgtatgtcagtgtgcatggaatgcccttttctgcaatggaaaatgatgtcagagatttttttcatgggctccgtgttgatgcagtgcatttgttgaaagatcatgtaggtcgaaataatgggaatggattggttaagtttctctcccctcaagatacatttgaagctttgaaacgaaacagaatgctgatgattcaacgctatgtggaagttagccctgccacagaaagacagtgggtagctgctggaggccatatcacttttaagcaaaatatgggaccttctggacaaactcatccccctcctcagacacttcccaggtcaaaatcgcccagtgggcagaaaagatcaaggtcaagatcaccacatgaggctggtttttgtgtttacttgaaagggctaccatttgaagcagaaaacaaacatgtcattgatttttttaaaaagctggatattgtggaagatagtatttatatagcttatggacccaatgggaaagcaactggcgaaggctttgtagagttcagaaatgaggctgactataaggctgctctgtgtcgtcataaacagtacatgggcaatcgctttattcaagttcatccaattactaagaaaggtatgctagaaaagatagatatgattcgaaaaagactgcagaacttcagctatgaccagagggaaatgatactaaatccagagggggatgtcaactctgccaaagtctgtgcccacataacaaatattccattcagcattacaaagatggatgttcttcagttcctagaaggaatcccagtggatgaaaatgctgtacatgttcttgttgataacaatgggcaaggtctaggacaggcattggttcagtttaaaaatgaagatgatgcacatggcccactgcgtgaccttggttcagctgtccatttcctgtgaccatctcattgacaaggacatcggctccaagtctgacccactctgcgtccttttacaggatgtgggagggggcagctgggctgagcttggccggactgaacgggtgcggaactgctcaagccctgagttctccaagactctacagcttgagtaccgctttgagacagtccagaagctacgctttggaatctatgacatagacaacaagacgccagagctgagggatgatgacttcctagggggtgctgagtgttccctaggacagattgtgtccagccaggtactgactctccccttgatgctgaagcctggaaaacctgctgggcgggggaccatcacggtctcagctcaggaattaaaggacaatcgtgtagtaaccatggaggtagaggccagaaacctagataagaaggacttcctgggaaaatcagatccatttctggagttcttccgccagggtgatgggaaatggcacctggtgtacagatctgaggtcatcaagaacaacctgaaccctacatggaagcgtttctcagtccccgttcagcatttctgtggtgggaaccccagcacacccatccaggtgcaatgctccgattatgacagtgacgggtcacatgatctcatcggtaccttccacaccagcttggcccagctgcaggcagtcccggctgagtttgaatgcatccaccctgagaagcagcagaaaaagaaaagctacaagaactctggaactatccgtgtcaagatttgtcgggtagaaacagagtactcctttctggactatgtgatgggaggctgtcagatcaacttcactgtgggcgtggacttcactggctccaatggagacccctcctcacctgactccctacactacctgagtccaacaggggtcaatgagtacctgatggcactgtggagtgtgggcagcgtggttcaggactatgactcagacaagctgttccctgcatttggatttggggcccaggttccccctgactggcaggtctcgcatgaatttgccttgaatttcaaccccagtaacccctactgtgcaggcatccagggcattgtggatgcctaccgccaagccctgccccaagttcgcctctatggccctaccaactttgcacccatcatcaaccatgtggccaggtttgcagcccaggctgcacatcaggggactgcctcgcaatacttcatgctgttgctgctgactgatggtgctgtgacggatgtggaagccacacgtgaggctgtggtggcccctcgggaggcattggcacagaccgtgctcgcagaagtgcccacacaactggtctcatacttcagggcccagggttgggccccgctcaagccacttccaccctcagccaaggatcctgcacaggccccccaggcctaggttcccttggaggctgtggcaagtcctcaatcctgtgtcccagaggtccctctgggccacaacccaacccttctcactctcctcagtgctagcactttgtattttttgatacttttatacttgtttctgcttttgctgctcttgatcccacctttgctcctgacaaccctcattcaataaagaccagtgaagaccaa

SEQ ID NO: 446089 - DNA, 3879 bp, Homo sapiens
ctcgacgagccggactttctgtgacaacgtgcgacacggacggctggctggcctgcgctcgcggcatccaggcgacagctcgatatcgcggacatgagaggcccgtggctgcgttgggctccgggaagccgttcgggctggggctgtcggccgcggggcggaggcactcgcgcggggggggtaattcggggtctgggttctggtgccgcgcagctttccccgtctaaaagttggttttaattggttgcccacaggattgacttggcctctacttcttgttaaggaaattcatctcttgttttatcaggtgtgtgtggtttcagcgcagcatggctgtggtcatccgtttgcaaggtctcccaattgtggcggggaccatggacattcgccacttcttctctggattgaccattcctgatgggggcgtgcatattgtagggggtgaactgggtgaggctttcatcgtttttgccactgatgaagatgcaaggcttggtatgatgcgcacaggtggtacaattaaagggtcaaaagtaacactattgttgagtagtaagacggaaatgcagaatatgattgaactgagtcgtaggcgttttgaaactgccaacttagatataccaccagcaaatgccagtagatcaggaccaccacctagctcaggaatgagtagcagggtaaacttgcccacaacagtatccaactttaataatccatcacccagtgtagttactgccaccacttctgttcatgaaagcaacaaaaacatacagacattttccacagccagcgtaggaacagctcctccaaatatgggggcttcctttgggagcccaacgtttagctcaactgttccaagcacagcctctccaatgaacacagtcccgccgccaccaattcctccaattccagcgatgccatctctgccaccaatgccatccattcccccaattccagttcctcctccagtacctacattgcctcctgtgcctcctgtgcccccgattcccccagttccttctgtgccacccatgaccccactgccacccatgtcgggcatgccgcccttgaatccgccacctgtggcacctctacctgctggaatgaatggctctggagcacctatgaatttgaacaataatctgaatcctatgtttcttggtccgttgaatcctgttaaccctatccagatgaactctcagagcagtgtgaagccactccccatcaaccctgatgatctgtatgtcagtgtgcatggaatgcccttttctgcaatggaaaatgatgtcagagatttttttcatgggctccgtgttgatgcagtgcatttgttgaaagatcatgtaggtcgaaataatgggaatggattggttaagtttctctcccctcaagatacatttgaagctttgaaacgaaacagaatgctgatgattcaacgctatgtggaagttagccctgccacagaaagacagtgggtagctgctggaggccatatcacttttaagcaaaatatgggaccttctggacaaactcatccccctcctcagacacttcccaggtcaaaatcgcccagtgggcagaaaagatcaaggtcaagatcaccacatgaggctggtttttgtgtttacttgaaagggctaccatttgaagcagaaaacaaacatgtcattgatttttttaaaaagctggatattgtggaagatagtatttatatagcttatggacccaatgggaaagcaactggcgaaggctttgtagagttcagaaatgaggctgactataaggctgctctgtgtcgtcataaacagtacatgggcaatcgctttattcaagttcatccaattactaagaaaggtatgctagaaaagatagatatgattcgaaaaagactgcagaacttcagctatgaccagagggaaatgatactaaatccagagggggatgtcaactctgccaaagtctgtgcccacataacaaatattccattcagcattacaaagatggatgttcttcagttcctagaaggaatcccagtggatgaaaatgctgtacatgttcttgttgataacaatgggcaaggtctaggacaggcattggttcagtttaaaaatgaagatgatgcacgtaagtctgaacgcttacaccgtaaaaaacttaatgggagagaagcttttgttcatgtagttaccctagaagatatgagagagattgagaaaaatccccctgcccaaggaaaaaagggattaaagatgcctgtgccaggtaatcctgcagttccaggaatgcccaatgcgggactgcccggtgtgggactgcccagtgcaggacttcccggtgcaggcctgcccagcacaggactgcctggttcagcaataaccagtgcaggactgcctggtgcgggaatgcccagtgcaggaatacctagtgcaggaggtgaagagcatgccttcctgactgtaggatcaaaggaagccaataatgggcctccatttaactttcctggtaattttggtggatcaaatgcctttgggccaccaatccctcctccaggattaggaggcggggcctttggtgatgctaggcctggtatgccttcagttggaaacagtggtttgcctggtctaggactggatgttccgggttttggaggtggaccaaacaatttaagtgggccatcgggatttggagggggccctcagaattttggaaatggccctggtagcttaggcggtcccccggggtttggaagtggccctcctggtcttggaagtgcccctgggcatttgggtgggccaccagcttttgggcctggccccggccccggccccggccctggcccaatccatattggtggtccccctggctttgcatctagttctggaaaaccaggaccgacagtaattaaagtgcaaaacatgccctttactgtgtctattgatgagattttagatttcttttatggctatcaagtaatcccaggctcagtgtgtttaaaatacaatgaaaaaggtatgcccacaggtgaagccatggtggcctttgagtctcgggatgaagccacagctgctgtcattgacttaaatgacaggcctataggttcaagaaaagtaaaacttgtattagggtagccattcacatcattttttatagggtagatcttcatattgctgtgattaatgcatccagattgttttcctagtatttccaggttagaacctgtggattgtttcaattgcatatagcttggtttccataacatagagcattggttgactgtttacagaagactcactcaccaggataaacattgctgtatgttacagtaaagctatctggagagaacacataaatgattttggcataccattagagaaaccatttgtaaaactcaaatgaccacataaagcttatcaaggagtctagattggttttgttttataccatatgggatgaagaaaatagaaatgtcagtagaactcattgagggtgctcttgccagctgctgaaaatagaagttggctactctcagaatttggtttaaagctggacagatttgctttgttatagggtaaagctttgtctaaagtcctcattttcttttaaaattgaataaaatttctgtatacagattcattgtatgtacctttattgcttcttaagggtccttgctgtatagacagtcctgcttcagaagttgctgctttgtttgtctaattgactcatttgtaaatgagcagaactgttttgttggtttttttccctaaatataaaagtccacacttcgtttgtgctataacctcaaactttgatttctaatgtcacacttaaaactgtgtggaataagacttttgccataaaaataaactatggagtccttta

SEQ ID NO: 446090 - DNA, 3793 bp, Homo sapiens
ctcgacgagccggactttctgtgacaacgtgcgacacggacggctggctggcctgcgctcgcggcatccaggcgacagctcgatatcgcggacatgagaggcccgtggctgcgttgggctccgggaagccgttcgggctggggctgtcggccgcggggcggaggcactcgcgcggggggggtaattcggggtctgggttctggtgccgcgcagctttccccgtctaaaagttggttttaattggttgcccacaggattgacttggcctctacttcttgttaaggaaattcatctcttgttttatcaggtgtgtgtggtttcagcgcagcatggctgtggtcatccgtttgcaaggtctcccaattgtggcggggaccatggacattcgccacttcttctctggattgaccattcctgatgggggcgtgcatattgtagggggtgaactgggtgaggctttcatcgtttttgccactgatgaagatgcaaggcttggtatgatgcgcacaggtggtacaattaaagggtcaaaagtaacactattgttgagtagtaagacggaaatgcagaatatgattgaactgagtcgtaggcgttttgaaactgccaacttagatataccaccagcaaatgccagtagatcaggaccaccacctagctcaggaatgagtagcagggtaaacttgcccacaacagtatccaactttaataatccatcacccagtgtagttactgccaccacttctgttcatgaaagcaacaaaaacatacagacattttccacagccagcgtaggaacagctcctccaaatatgggggcttcctttgggagcccaacgtttagctcaactgttccaagcacagcctctccaatgaacacagtcccgccgccaccaattcctccaattccagcgatgccatctctgccaccaatgccatccattcccccaattccagttcctcctccagtacctacattgcctcctgtgcctcctgtgcccccgattcccccagttccttctgtgccacccatgaccccactgccacccatgtcgggcatgccgcccttgaatccgccacctgtggcacctctacctgctggaatgaatggctctggagcacctatgaatttgaacaataatctgaatcctatgtttcttggtccgttgaatcctgttaaccctatccagatgaactctcagagcagtgtgaagccactccccatcaaccctgatgatctgtatgtcagtgtgcatggaatgcccttttctgcaatggaaaatgatgtcagagatttttttcatgggctccgtgttgatgcagtgcatttgttgaaagatcatgtaggtcgaaataatgggaatggattggttaagtttctctcccctcaagatacatttgaagctttgaaacgaaacagaatgctgatgattcaacgctatgtggaagttagccctgccacagaaagacagtgggtagctgctggaggccatatcacttttaagcaaaatatgggaccttctggacaaactcatccccctcctcagacacttcccaggtcaaaatcgcccagtgggcagaaaagatcaaggtcaagatcaccacatgaggctggtttttgtgtttacttgaaagggctaccatttgaagcagaaaacaaacatgtcattgatttttttaaaaagctggatattgtggaagatagtatttatatagcttatggacccaatgggaaagcaactggcgaaggctttgtagagttcagaaatgaggctgactataaggctgctctgtgtcgtcataaacagtacatgggcaatcgctttattcaagttcatccaattactaagaaaggtatgctagaaaagatagatatgattcgaaaaagactgcagaacttcagctatgaccagagggaaatgatactaaatccagagggggatgtcaactctgccaaagtctgtgcccacataacaaatattccattcagcattacaaagatggatgttcttcagttcctagaaggaatcccagtggatgaaaatgctgtacatgttcttgttgataacaatgggcaaggtctaggacaggcattggttcagtttaaaaatgaagatgatgcacatggcccactgcgtgaccttggttcagctgtccatttcctgtgaccatctcattgacaaggacatcggctccaagtctgacccactctgcgtccttttacaggatgtgggagggggcagctgggctgagcttggccggactgaacgggtgcggaactgctcaagccctgagttctccaagactctacagcttgagtaccgctttgagacagtccagaagctacgctttggaatctatgacatagacaacaagacgccagagctgagggatgatgacttcctagggggtgctgagtgttccctaggacagattgtgtccagccaggtactgactctccccttgatgctgaagcctggaaaacctgctgggcgggggaccatcacggtctcagctcaggaattaaaggacaatcgtgtagtaaccatggaggtagaggccagaaacctagataagaaggacttcctgggaaaatcagatccatttctggagttcttccgccagggtgatgggaaatggcacctggtgtacagatctgaggtcatcaagaacaacctgaaccctacatggaagcgtttctcagtccccgttcagcatttctgtggtgggaaccccagcacacccatccaggtgcaatgctccgattatgacagtgacgggtcacatgatctcatcggtaccttccacaccagcttggcccagctgcaggcagtcccggctgagtttgaatgcatccaccctgagaagcagcagaaaaagaaaagctacaagaactctggaactatccgtgtcaagatttgtcgggtagaaacagagtactcctttctggactatgtgatgggaggctgtcagatcaacttcactgtgggcgtggacttcactggctccaatggagacccctcctcacctgactccctacactacctgagtccaacaggggtcaatgagtacctgatggcactgtggagtgtgggcagcgtggttcaggactatgactcagacaagctgttccctgcatttggatttggggcccaggttccccctgactggcaggtctcgcatgaatttgccttgaatttcaaccccagtaacccctactgtgcaggcatccagggcattgtggatgcctaccgccaagccctgccccaagttcgcctctatggccctaccaactttgcacccatcatcaaccatgtggccaggtttgcagcccaggctgcacatcaggggactgcctcggacatgaatgggcttgtccccagcaatacttcatgctgttgctgctgactgatggtgctgtgacggatgtggaagccacacgtgaggctgtggtggcccctcgggaggcattggcacagaccgtgctcgcagaagtgcccacacaactggtctcatacttcagggcccagggttgggccccgctcaagccacttccaccctcagccaaggatcctgcacaggccccccaggcctaggttcccttggaggctgtggcaagtcctcaatcctgtgtcccagaggtccctctgggccacaacccaacccttctcactctcctcagtgctagcactttgtattttttgatacttttatacttgtttctgcttttgctgctcttgatcccacctttgctcctgacaaccctcattcaataaagaccagtgaagaccaa

SEQ ID NO: 446091 - DNA, 3563 bp, Homo sapiens
ctcgacgagccggactttctgtgacaacgtgcgacacggacggctggctggcctgcgctcgcggcatccaggcgacagctcgatatcgcggacatgagaggcccgtggctgcgttgggctccgggaagccgttcgggctggggctgtcggccgcggggcggaggcactcgcgcggggggggtaattcggggtctgggttctggtgccgcgcagctttccccgtctaaaagttggttttaattggttgcccacaggattgacttggcctctacttcttgttaaggaaattcatctcttgttttatcaggtgtgtgtggtttcagcgcagcatggctgtggtcatccgtttgcaaggtctcccaattgtggcggggaccatggacattcgccacttcttctctggattgaccattcctgatgggggcgtgcatattgtagggggtgaactgggtgaggctttcatcgtttttgccactgatgaagatgcaaggcttggtatgatgcgcacaggtggtacaattaaagggtcaaaagtaacactattgttgagtagtaagacggaaatgcagaatatgattgaactgagtcgtaggcgttttgaaactgccaacttagatataccaccagcaaatgccagtagatcaggaccaccacctagctcaggaatgagtagcagggtaaacttgcccacaacagtatccaactttaataatccatcacccagtgtagttactgccaccacttctgttcatgaaagcaacaaaaacatacagacattttccacagccagcgtaggaacagctcctccaaatatgggggcttcctttgggagcccaacgtttagctcaactgttccaagcacagcctctccaatgaacacagtcccgccgccaccaattcctccaattccagcgatgccatctctgccaccaatgccatccattcccccaattccagttcctcctccagtacctacattgcctcctgtgcctcctgtgcccccgattcccccagttccttctgtgccacccatgaccccactgccacccatgtcgggcatgccgcccttgaatccgccacctgtggcacctctacctgctggaatgaatggctctggagcacctatgaatttgaacaataatctgaatcctatgtttcttggtccgttgaatcctgttaaccctatccagatgaactctcagagcagtgtgaagccactccccatcaaccctgatgatctgtatgtcagtgtgcatggaatgcccttttctgcaatggaaaatgatgtcagagatttttttcatgggctccgtgttgatgcagtgcatttgttgaaagatcatgtaggtcgaaataatgggaatggattggttaagtttctctcccctcaagatacatttgaagctttgaaacgaaacagaatgctgatgattcaacgctatgtggaagttagccctgccacagaaagacagtgggtagctgctggaggccatatcacttttaagcaaaatatgggaccttctggacaaactcatccccctcctcagacacttcccaggtcaaaatcgcccagtgggcagaaaagatcaaggtcaagatcaccacatgaggctggtttttgtgtttacttgaaagggctaccatttgaagcagaaaacaaacatgtcattgatttttttaaaaagctggatattgtggaagatagtatttatatagcttatggacccaatgggaaagcaactggcgaaggctttgtagagttcagaaatgaggctgactataaggctgctctgtgtcgtcataaacagtacatgggcaatcgctttattcaagttcatccaattactaagaaaggtatgctagaaaagatagatatgattcgaaaaagactgcagaacttcagctatgaccagagggaaatgatactaaatccagagggggatgtcaactctgccaaagtctgtgcccacataacaaatattccattcagcattacaaagatggatgttcttcagttcctagaaggaatcccagtggatgaaaatgctgtacatgttcttgttgataacaatgggcaaggtctaggacaggcattggttcagtttaaaaatgaagatgatgcacatggcccactgcgtgaccttggttcagctgtccatttcctgtgaccatctcattgacaaggacatcggctccaagtctgacccactctgcgtccttttacaggatgtgggagggggcagctgggctgagcttggccggactgaacgggtgcggaactgctcaagccctgagttctccaagactctacagcttgagtaccgctttgagacagtccagaagctacgctttggaatctatgacatagacaacaagacgccagagctgagggatgatgacttcctagggggtgctgagtgttccctaggacagattgtgtccagccaggtactgactctccccttgatgctgaagcctggaaaacctgctgggcgggggaccatcacggtctcagctcaggaattaaaggacaatcgtgtagtaaccatggaggtagaggccagaaacctagataagaaggacttcctgggaaaatcagatccatttctggagttcttccgccagggtgatgggaaatggcacctggtgtacagatctgaggtcatcaagaacaacctgaaccctacatggaagcgtttctcagtccccgttcagcatttctgtggtgggaaccccagcacacccatccaggtgcaatgctccgattatgacagtgacgggtcacatgatctcatcggtaccttccacaccagcttggcccagctgcaggcagtcccggctgagtttgaatgcatccaccctgagaagcagcagaaaaagaaaagctacaagaactctggaactatccgtgtcaagatttgtcgggtagaaacagagtactcctttctggactatgtgatgggaggctgtcagatcaacttcactgtgggcgtggacttcactggctccaatggagacccctcctcacctgactccctacactacctgagtccaacaggggtcaatgagtacctgatggcactgtggagtgtgggcagcgtggttcaggactatgactcagacaagctgttccctgcatttggatttggggcccaggttccccctgactggcaggtctcgcatgaatttgccttgaatttcaaccccagtaacccctactgtgcaggcatccagggcattgtggatgcctaccgccaagccctgccccaagttcgcctctatggccctaccaactttgcacccatcatcaaccatgtggccaggtttgcagcccaggctgcacatcaggggactgcctcgtcgcaatactccatggcggtgctgctgacctgatggggccgtgacggactgtggagaacccaccacgtgaagctgggagcgtggcccgaaactgccaagggccagaacccacaggggggggcgggcggggcacttggggcagggcaactgggcgcgaggggggcccggtacatctgggagggggccgacaaggagtgaccccc

SEQ ID NO: 446092 - DNA, 3339 bp, Homo sapiens
ctcgacgagccggactttctgtgacaacgtgcgacacggacggctggctggcctgcgctcgcggcatccaggcgacagctcgatatcgcggacatgagaggcccgtggctgcgttgggctccgggaagccgttcgggctggggctgtcggccgcggggcggaggcactcgcgcggggggggtaattcggggtctgggttctggtgccgcgcagctttccccgtctaaaagttggttttaattggttgcccacaggattgacttggcctctacttcttgttaaggaaattcatctcttgttttatcaggtgtgtgtggtttcagcgcagcatggctgtggtcatccgtttgcaaggtctcccaattgtggcggggaccatggacattcgccacttcttctctggattgaccattcctgatgggggcgtgcatattgtagggggtgaactgggtgaggctttcatcgtttttgccactgatgaagatgcaaggcttggtatgatgcgcacaggtggtacaattaaagggtcaaaagtaacactattgttgagtagtaagacggaaatgcagaatatgattgaactgagtcgtaggcgttttgaaactgccaacttagatataccaccagcaaatgccagtagatcaggaccaccacctagctcaggaatgagtagcagggtaaacttgcccacaacagtatccaactttaataatccatcacccagtgtagttactgccaccacttctgttcatgaaagcaacaaaaacatacagacattttccacagccagcgtaggaacagctcctccaaatatgggggcttcctttgggagcccaacgtttagctcaactgttccaagcacagcctctccaatgaacacagtcccgccgccaccaattcctccaattccagcgatgccatctctgccaccaatgccatccattcccccaattccagttcctcctccagtacctacattgcctcctgtgcctcctgtgcccccgattcccccagttccttctgtgccacccatgaccccactgccacccatgtcgggcatgccgcccttgaatccgccacctgtggcacctctacctgctggaatgaatggctctggagcacctatgaatttgaacaataatctgaatcctatgtttcttggtccgttgaatcctgttaaccctatccagatgaactctcagagcagtgtgaagccactccccatcaaccctgatgatctgtatgtcagtgtgcatggaatgcccttttctgcaatggaaaatgatgtcagagatttttttcatgggctccgtgttgatgcagtgcatttgttgaaagatcatgtaggtcgaaataatgggaatggattggttaagtttctctcccctcaagatacatttgaagctttgaaacgaaacagaatgctgatgattcaacgctatgtggaagttagccctgccacagaaagacagtgggtagctgctggaggccatatcacttttaagcaaaatatgggaccttctggacaaactcatccccctcctcagacacttcccaggtcaaaatcgcccagtgggcagaaaagatcaaggtcaagatcaccacatgaggctggtttttgtgtttacttgaaagggctaccatttgaagcagaaaacaaacatgtcattgatttttttaaaaagctggatattgtggaagatagtatttatatagcttatggacccaatgggaaagcaactggcgaaggctttgtagagttcagaaatgaggctgactataaggctgctctgtgtcgtcataaacagtacatgggcaatcgctttattcaagttcatccaattactaagaaaggtatgctagaaaagatagatatgattcgaaaaagactgcagaacttcagctatgaccagagggaaatgatactaaatccagagggggatgtcaactctgccaaagtctgtgcccacataacaaatattccattcagcattacaaagatggatgttcttcagttcctagaaggaatcccagtggatgaaaatgctgtacatgttcttgttgataacaatgggcaaggtctaggacaggcattggttcagtttaaaaatgaagatgatgcacatggcccactgcgtgaccttggttcagctgtccatttcctgtgaccatctcattgacaaggacatcggctccaagtctgacccactctgcgtccttttacaggatgtgggagggggcagctgggctgagcttggccggactgaacgggtgcggaactgctcaagccctgagttctccaagactctacagcttgagtaccgctttgagacagtccagaagctacgctttggaatctatgacatagacaacaagacgccagagctgagggatgatgacttcctagggggtgctgagtgttccctaggacagattgtgtccagccaggtactgactctccccttgatgctgaagcctggaaaacctgctgggcgggggaccatcacggtctcagctcaggaattaaaggacaatcgtgtagtaaccatggaggtagaggccagaaacctagataagaaggacttcctgggaaaatcagatccatttctggagttcttccgccagggtgatgggaaatggcacctggtgtacagatctgaggtcatcaagaacaacctgaaccctacatggaagcgtttctcagtccccgttcagcatttctgtggtgggaaccccagcacacccatccaggtgcaatgctccgattatgacagtgacgggtcacatgatctcatcggtaccttccacaccagcttggcccagctgcaggcagtcccggctgagtttgaatgcatccaccctgagaagcagcagaaaaagaaaagctacaagaactctggaactatccgtgtcaagatttgtcgggtagaaacagagtactcctttctggactatgtgatgggaggctgtcagatcaacttcactgtgggcgtggacttcactggctccaatggagacccctcctcacctgactccctacactaccacacaactggtctcatacttcagggcccagggttgggccccgctcaagccacttccaccctcagccaaggatcctgcacaggccccccaggcctaggttcccttggaggctgtggcaagtcctcaatcctgtgtcccagaggtccctctgggccacaacccaacccttctcactctcctcagtgctagcactttgtattttttgatacttttatacttgtttctgcttttgctgctcttgatcccacctttgctcctgacaaccctcattcaataaagaccagtgaagaccaa

SEQ ID NO: 446093 - DNA, 3555 bp, Homo sapiens
ctcgacgagccggactttctgtgacaacgtgcgacacggacggctggctggcctgcgctcgcggcatccaggcgacagctcgatatcgcggacatgagaggcccgtggctgcgttgggctccgggaagccgttcgggctggggctgtcggccgcggggcggaggcactcgcgcggggggggtaattcggggtctgggttctggtgccgcgcagctttccccgtctaaaagttggttttaattggttgcccacaggattgacttggcctctacttcttgttaaggaaattcatctcttgttttatcaggtgtgtgtggtttcagcgcagcatggctgtggtcatccgtttgcaaggtctcccaattgtggcggggaccatggacattcgccacttcttctctggattgaccattcctgatgggggcgtgcatattgtagggggtgaactgggtgaggctttcatcgtttttgccactgatgaagatgcaaggcttggtatgatgcgcacaggtggtacaattaaagggtcaaaagtaacactattgttgagtagtaagacggaaatgcagaatatgattgaactgagtcgtaggcgttttgaaactgccaacttagatataccaccagcaaatgccagtagatcaggaccaccacctagctcaggaatgagtagcagggtaaacttgcccacaacagtatccaactttaataatccatcacccagtgtagttactgccaccacttctgttcatgaaagcaacaaaaacatacagacattttccacagccagcgtaggaacagctcctccaaatatgggggcttcctttgggagcccaacgtttagctcaactgttccaagcacagcctctccaatgaacacagtcccgccgccaccaattcctccaattccagcgatgccatctctgccaccaatgccatccattcccccaattccagttcctcctccagtacctacattgcctcctgtgcctcctgtgcccccgattcccccagttccttctgtgccacccatgaccccactgccacccatgtcgggcatgccgcccttgaatccgccacctgtggcacctctacctgctggaatgaatggctctggagcacctatgaatttgaacaataatctgaatcctatgtttcttggtccgttgaatcctgttaaccctatccagatgaactctcagagcagtgtgaagccactccccatcaaccctgatgatctgtatgtcagtgtgcatggaatgcccttttctgcaatggaaaatgatgtcagagatttttttcatgggctccgtgttgatgcagtgcatttgttgaaagatcatgtaggtcgaaataatgggaatggattggttaagtttctctcccctcaagatacatttgaagctttgaaacgaaacagaatgctgatgattcaacgctatgtggaagttagccctgccacagaaagacagtgggtagctgctggaggccatatcacttttaagcaaaatatgggaccttctggacaaactcatccccctcctcagacacttcccaggtcaaaatcgcccagtgggcagaaaagatcaaggtcaagatcaccacatgaggctggtttttgtgtttacttgaaagggctaccatttgaagcagaaaacaaacatgtcattgatttttttaaaaagctggatattgtggaagatagtatttatatagcttatggacccaatgggaaagcaactggcgaaggctttgtagagttcagaaatgaggctgactataaggctgctctgtgtcgtcataaacagtacatgggcaatcgctttattcaagttcatccaattactaagaaaggtatgctagaaaagatagatatgattcgaaaaagactgcagaacttcagctatgaccagagggaaatgatactaaatccagagggggatgtcaactctgccaaagtctgtgcccacataacaaatattccattcagcattacaaagatggatgttcttcagttcctagaaggaatcccagtggatgaaaatgctgtacatgttcttgttgataacaatgggcaaggtctaggacaggcattggttcagtttaaaaatgaagatgatgcacatggcccactgcgtgaccttggttcagctgtccatttcctgtgaccatctcattgacaaggacatcggctccaagtctgacccactctgcgtccttttacaggatgtgggagggggcagctgggctgagcttggccggactgaacgggtgcggaactgctcaagccctgagttctccaagactctacagcttgagtaccgctttgagacagtccagaagctacgctttggaatctatgacatagacaacaagacgccagagctgagggatgatgacttcctagggggtgctgagtgttccctaggacagattgtgtccagccaggtactgactctccccttgatgctgaagcctggaaaacctgctgggcgggggaccatcacggtctcagctcaggaattaaaggacaatcgtgtagtaaccatggaggtagaggccagaaacctagataagaaggacttcctgggaaaatcagatccatttctggagttcttccgccagggtgatgggaaatggcacctggtgtacagatctgaggtcatcaagaacaacctgaaccctacatggaagcgtttctcagtccccgttcagcatttctgtggtgggaaccccagcacacccatccaggtgcaatgctccgattatgacagtgacgggtcacatgatctcatcggtaccttccacaccagcttggcccagctgcaggcagtcccgtccacctggccgcctccatggacccttggtggctttgtaaattaatttttgatgacattttgagttttaagatttctgaccagcagtctcttacctgtatatttgtaaatatatcatgtttctgtgaaaatgtatttactgaacattaaaacatggggaaggaaaacacccctttttctagcttaaccaaacaaaagcgacaaaccaagaaagacaacacaacacaccgcacacacgaagaaaaagaaaaagaaaacaaaacaacaacaacgcaaaaagacaaaacacacagccccaccccacagcagagggggggcaccagccccaacaccggcgagggcgccgcggccaaaccgacaccaaacgacagaacaaggagaacccacacaaacatcatcagatgacaagggcggcgcagcagatcagaacacgagggcgagagcagacaacagcgatggctgacaagcgggagacacaaccaaagggtgaagaacaaggacgaggacacaccaccaagcgaacagacgggagagacataaaccgaagagaaagcacgaaccgaagggatgagagagacagacaacgagccggacgaggaaaaactcgtgcaggcccgcacagaaggcccgggaaggagagcacagactaaacaagagcgagaagcacggcacagaccgcaggcaggacacaagactcgaagaacaagaagacgacgaa

SEQ ID NO: 446094 - DNA, 2892 bp, Homo sapiens
ctcgacgagccggactttctgtgacaacgtgcgacacggacggctggctggcctgcgctcgcggcatccaggcgacagctcgatatcgcggacatgagaggcccgtggctgcgttgggctccgggaagccgttcgggctggggctgtcggccgcggggcggaggcactcgcgcggggggggtaattcggggtctgggttctggtgccgcgcagctttccccgtctaaaagttggttttaattggttgcccacaggattgacttggcctctacttcttgttaaggaaattcatctcttgttttatcaggtgtgtgtggtttcagcgcagcatggctgtggtcatccgtttgcaaggtctcccaattgtggcggggaccatggacattcgccacttcttctctggattgaccattcctgatgggggcgtgcatattgtagggggtgaactgggtgaggctttcatcgtttttgccactgatgaagatgcaaggcttggtatgatgcgcacaggtggtacaattaaagggtcaaaagtaacactattgttgagtagtaagacggaaatgcagaatatgattgaactgagtcgtaggcgttttgaaactgccaacttagatataccaccagcaaatgccagtagatcaggaccaccacctagctcaggaatgagtagcagggtaaacttgcccacaacagtatccaactttaataatccatcacccagtgtagttactgccaccacttctgttcatgaaagcaacaaaaacatacagacattttccacagccagcgtaggaacagctcctccaaatatgggggcttcctttgggagcccaacgtttagctcaactgttccaagcacagcctctccaatgaacacagtcccgccgccaccaattcctccaattccagcgatgccatctctgccaccaatgccatccattcccccaattccagttcctcctccagtacctacattgcctcctgtgcctcctgtgcccccgattcccccagttccttctgtgccacccatgaccccactgccacccatgtcgggcatgccgcccttgaatccgccacctgtggcacctctacctgctggaatgaatggctctggagcacctatgaatttgaacaataatctgaatcctatgtttcttggtccgttgaatcctgttaaccctatccagatgaactctcagagcagtgtgaagccactccccatcaaccctgatgatctgtatgtcagtgtgcatggaatgcccttttctgcaatggaaaatgatgtcagagatttttttcatgggctccgtgttgatgcagtgcatttgttgaaagatcatgtaggtcgaaataatgggaatggattggttaagtttctctcccctcaagatacatttgaagctttgaaacgaaacagaatgctgatgattcaacgctatgtggaagttagccctgccacagaaagacagtgggtagctgctggaggccatatcacttttaagcaaaatatgggaccttctggacaaactcatccccctcctcagacacttcccaggtcaaaatcgcccagtgggcagaaaagatcaaggtcaagatcaccacatgaggctggtttttgtgtttacttgaaagggctaccatttgaagcagaaaacaaacatgtcattgatttttttaaaaagctggatattgtggaagatagtatttatatagcttatggacccaatgggaaagcaactggcgaaggctttgtagagttcagaaatgaggctgactataaggctgctctgtgtcgtcataaacagtacatgggcaatcgctttattcaagttcatccaattactaagaaaggtatgctagaaaagatagatatgattcgaaaaagactgcagaacttcagctatgaccagagggaaatgatactaaatccagagggggatgtcaactctgccaaagtctgtgcccacataacaaatattccattcagcattacaaagatggatgttcttcagttcctagaaggaatcccagtggatgaaaatgctgtacatgttcttgttgataacaatgggcaaggtctaggacaggcattggttcagtttaaaaatgaagatgatgcacatggcccactgcgtgaccttggttcagctgtccatttcctgtgaccatctcattgacaaggacatcggctccaagtctgacccactctgcgtccttttacaggatgtgggagggggcagctgggctgagcttggccggactgaacgggtgcggaactgctcaagccctgagttctccaagactctacagcttgagtaccgctttgagacagtccagaagctacgctttggaatctatgacatagacaacaagacgccagagctgagggatgatgacttcctagggggtgctgagtgttccctaggacagattgtgtccagccaggtactgactctccccttgatgctgaagcctggaaaacctgctgggcgggggaccatcacggtctcagctcaggaattaaaggacaatcgtgtagtaaccatggaggtagaggccagaaacctagataagaaggacttcctgggaaaatcagatccatttctggagttcttccgccagggtgatgggaaatggcacctggtgtacagatctgaggtcatcaagaacaacctgaaccctacatggaagcgtttctcagtccccgttcagcatttctgtggtgggaaccccagcacacccatccaggtgcaatgctccgattatgacagtgacgggtcacatgatctcatcggtaccttccacaccagcttggcccagctgcaggcagtcccgtgcaccttctcccacttggagttgatgatttgcggggcagctcgcccctgagtt

SEQ ID NO: 446095 - DNA, 872 bp, Homo sapiens
ctcgacgagccggactttctgtgacaacgtgcgacacggacggctggctggcctgcgctcgcggcatccaggcgacagctcgatatcgcggacatgagaggcccgtggctgcgttgggctccgggaagccgttcgggctggggctgtcggccgcggggcggaggcactcgcgcggggggggtaattcggggtctgggttctggtgccgcgcagctttccccggattgacttggcctctacttcttgttaaggaaattcatctcttgttttatcaggtgtgtgtggtttcagcgcagcatggctgtggtcatccgtttgcaaggtctcccaattgtggcggggaccatggacattcgccacttcttctctggattgaccattcctgatgggggcgtgcatattgtagggggtgaactggatggcccactgcgtgaccttggttcagctgtccatttcctgtgaccatctcattgacaaggacatcggctccaagtctgacccactctgcgtccttttacaggatgtgggagggggcagctgggctgagcttggccggactgaacgggtgcggaactgctcaagccctgagttctccaagactctacagcttgagtaccgctttgagacagtccagaagctacgctttggaatctatgacatagacaacaagacgccagagctgagggatgatgacttcctagggggtgctgagtgttccctaggacagattgttgtcccaagccaaggtaattggactcttccccctttgatgcttgaaaggcctggaaaaaactggctggggccggggggggaacaatcaaagggtctccagctccaggaaattaaagggacaaacccgtgtaataacccag

SEQ ID NO: 446096 - DNA, 291 bp, Homo sapiens
agcctgcgtaccgaagtggggacgaggccatagcgaggactcccccgtggtctgagagggggcaggccagagctggctggctcagcggcctgcgagctaacggggactgcagtaaaaacacgcctacatcccgagtacggaggatttcttgtctcccccagtgaagcagaggttataactacatctctgtgcctggaggtggggagataatcgtagtgaggacactccttcaacccgaaatggaaaggaggcctttgtggcctaccagcaaaaggggacccaggtcacacc

SEQ ID NO: 446097 - DNA, 1047 bp, Homo sapiens
ggaacgcggagccgctgagcgggccgagcggccattttgtgaagcggcgaaggaggtggtgggtggctgcgttgggctccgggaagccgttcgggctggggctgtcggccgcggggcggaggcactcgcgcgggggatggcccactgcgtgaccttggttcagctgtccatttcctgtgaccatctcattgacaaggacatcggctccaagtctgacccactctgcgtccttttacaggatgtgggagggggcagctgggctgagcttggccggactgaacgggtgcggaactgctcaagccctgagttctccaagactctacagcttgagtaccgctttgagacagtccagaagctacgctttggaatctatgacatagacaacaagacgccagagctgagggatgatgacttcctagggggtgctgagtgttccctaggacagattgtgtccagccaggtactgactctccccttgatgctgaagcctggaaaacctgctgggcgggggaccatcacggtctcagctcaggaattaaaggacaatcgtgtagtaaccatggaggtagaggccagaaacctagataagaaggacttcctgggaaaatcagatccatttctggagttcttccgccagggtgatgggaaatggcacctggtgtacagatctgaggtcatcaagaacaacctgaaccctacatggaagcgtttctcagtccccgttcagcatttctgtggtgggaaccccagcacacccatccaggtgcaatgctccgattatgacagtggacgcggtcacacatgcagttccaatcgggaacacttccaaaccacaggttgggccccgactggacagcgcaagccccggcacgagtatggcagtggctccacccctgttaaaagcacggcgacaacagacaagcctccaagacatctgggacatatccgaggtgaacgcatcgtggcggtaaaaccacagaacaccaactcgggacaacagccacggcacgtagagacgatcagcgtaacaggagacacgtcaccacg

SEQ ID NO: 446098 - DNA, 3838 bp, Homo sapiens
ctcgacgagccggactttctgtgacaacgtgcgacacggacggctggctggcctgcgctcgcggcatccaggcgacagctcgatatcgcggacatgagaggcccgtggctgcgttgggctccgggaagccgttcgggctggggctgtcggccgcggggcggaggcactcgcgcggggggggtaattcggggtctgggttctggtgccgcgcagctttccccgtctaaaagttggttttaattggttgcccacaggattgacttggcctctacttcttgttaaggaaattcatctcttgttttatcaggtgtgtgtggtttcagcgcagcatggctgtggtcatccgtttgcaaggtctcccaattgtggcggggaccatggacattcgccacttcttctctggattgaccattcctgatgggggcgtgcatattgtagggggtgaactgggtgaggctttcatcgtttttgccactgatgaagatgcaaggcttggtatgatgcgcacaggtggtacaattaaagggtcaaaagtaacactattgttgagtagtaagacggaaatgcagaatatgattgaactgagtcgtaggcgttttgaaactgccaacttagatataccaccagcaaatgccagtagatcaggaccaccacctagctcaggaatgagtagcagggtaaacttgcccacaacagtatccaactttaataatccatcacccagtgtagttactgccaccacttctgttcatgaaagcaacaaaaacatacagacattttccacagccagcgtaggaacagctcctccaaatatgggggcttcctttgggagcccaacgtttagctcaactgttccaagcacagcctctccaatgaacacagtcccgccgccaccaattcctccaattccagcgatgccatctctgtgccacccatgaccccactgccacccatgtcgggcatgccgcccttgaatccgccacctgtggcacctctacctgctggaatgaatggctctggagcacctatgaatttgaacaataatctgaatcctatgtttcttggtccgttgaatcctgttaaccctatccagatgaactctcagagcagtgtgaagccactccccatcaaccctgatgatctgtatgtcagtgtgcatggaatgcccttttctgcaatggaaaatgatgtcagagatttttttcatgggctccgtgttgatgcagtgcatttgttgaaagatcatgtaggtcgaaataatgggaatggattggttaagtttctctcccctcaagatacatttgaagctttgaaacgaaacagaatgctgatgattcaacgctatgtggaagttagccctgccacagaaagacagtgggtagctgctggaggccatatcacttttaagcaaaatatgggaccttctggacaaactcatccccctcctcagacacttcccaggtcaaaatcgcccagtgggcagaaaagatcaaggtcaagatcaccacatgaggctggtttttgtgtttacttgaaagggctaccatttgaagcagaaaacaaacatgtcattgatttttttaaaaagctggatattgtggaagatagtatttatatagcttatggacccaatgggaaagcaactggcgaaggctttgtagagttcagaaatgaggctgactataaggctgctctgtgtcgtcataaacagtacatgggcaatcgctttattcaagttcatccaattactaagaaaggtatgctagaaaagatagatatgattcgaaaaagactgcagaacttcagctatgaccagagggaaatgatactaaatccagagggggatgtcaactctgccaaagtctgtgcccacataacaaatattccattcagcattacaaagatggatgttcttcagttcctagaaggaatcccagtggatgaaaatgctgtacatgttcttgttgataacaatgggcaaggtctaggacaggcattggttcagtttaaaaatgaagatgatgcacatggcccactgcgtgaccttggttcagctgtccatttcctgtgaccatctcattgacaaggacatcggctccaagtctgacccactctgcgtccttttacaggatgtgggagggggcagctgggctgagcttggccggactgaacgggtgcggaactgctcaagccctgagttctccaagactctacagcttgagtaccgctttgagacagtccagaagctacgctttggaatctatgacatagacaacaagacgccagagctgagggatgatgacttcctagggggtgctgagtgttccctaggacagattgtgtccagccaggtactgactctccccttgatgctgaagcctggaaaacctgctgggcgggggaccatcacggtctcagctcaggaattaaaggacaatcgtgtagtaaccatggaggtagaggccagaaacctagataagaaggacttcctgggaaaatcagatccatttctggagttcttccgccagggtgatgggaaatggcacctggtgtacagatctgaggtcatcaagaacaacctgaaccctacatggaagcgtttctcagtccccgttcagcatttctgtggtgggaaccccagcacacccatccaggtgcaatgctccgattatgacagtgacgggtcacatgatctcatcggtaccttccacaccagcttggcccagctgcaggcagtcccggctgagtttgaatgcatccaccctgagaagcagcagaaaaagaaaagctacaagaactctggaactatccgtgtcaagatttgtcgggtagaaacagagtactcctttctggactatgtgatgggaggctgtcagatcaacttcactgtgggcgtggacttcactggctccaatggagacccctcctcacctgactccctacactacctgagtccaacaggggtcaatgagtacctgatggcactgtggagtgtgggcagcgtggttcaggactatgactcagacaagctgttccctgcatttggatttggggcccaggttccccctgactggcaggtctcgcatgaatttgccttgaatttcaaccccagtaacccctactgtgcaggcatccagggcattgtggatgcctaccgccaagccctgccccaagttcgcctctatggccctaccaactttgcacccatcatcaaccatgtggccaggtttgcagcccaggctgcacatcaggggactgcctcgcaatacttcatgctgttgctgctgactgatggtgctgtgacggatgtggaagccacacgtgaggctgtggtgcgtgcctcgaacctgcccatgtcagtgatcattgtgggtgtgggtggtgctgactttgaggccatggagcagctggacgctgatggtggacccctgcatacacgttctgggcaggctgctgcccgcgacattgtgcagtttgtaccctaccgccggttccagaatgcccctcgggaggcattggcacagaccgtgctcgcagaagtgcccacacaactggtctcatacttcagggcccagggttgggccccgctcaagccacttccaccctcagccaaggatcctgcacaggccccccaggcctaggttcccttggaggctgtggcaagtcctcaatcctgtgtcccagaggtccctctgggccacaacccaacccttctcactctcctcagtgctagcactttgtattttttgatacttttatacttgtttctgcttttgctgctcttgatcccacctttgctcctgacaaccctcattcaataaagaccagtgaagaccaa

SEQ ID NO: 446099 - DNA, 2229 bp, Homo sapiens
ctcgacgagccggactttctgtgacaacgtgcgacacggacggctggctggcctgcgctcgcggcatccaggcgacagctcgatatcgcggacatgagaggcccgtggctgcgttgggctccgggaagccgttcgggctggggctgtcggccgcggggcggaggcactcgcgcggggggggtaattcggggtctgggttctggtgccgcgcagctttccccggattgacttggcctctacttcttgttaaggaaattcatctcttgttttatcaggtgtgtgtggtttcagcgcagcatggctgtggtcatccgtttgcaaggtctcccaattgtggcggggaccatggacattcgccacttcttctctggattgaccattcctgatgggggcgtgcatattgtagggggtgaactggatggcccactgcgtgaccttggttcagctgtccatttcctgtgaccatctcattgacaaggacatcggctccaagtctgacccactctgcgtccttttacaggatgtgggagggggcagctgggctgagcttggccggactgaacgggtgcggaactgctcaagccctgagttctccaagactctacagcttgagtaccgctttgagacagtccagaagctacgctttggaatctatgacatagacaacaagacgccagagctgagggatgatgacttcctagggggtgctgagtgttccctaggacagattgtgtccagccaggtactgactctccccttgatgctgaagcctggaaaacctgctgggcgggggaccatcacggtctcagctcaggaattaaaggacaatcgtgtagtaaccatggaggtagaggccagaaacctagataagaaggacttcctgggaaaatcagatccatttctggagttcttccgccagggtgatgggaaatggcacctggtgtacagatctgaggtcatcaagaacaacctgaaccctacatggaagcgtttctcagtccccgttcagcatttctgtggtgggaaccccagcacacccatccaggtgcaatgctccgattatgacagtgacgggtcacatgatctcatcggtaccttccacaccagcttggcccagctgcaggcagtcccggctgagtttgaatgcatccaccctgagaagcagcagaaaaagaaaagctacaagaactctggaactatccgtgtcaagatttgtcgggtagaaacagagtactcctttctggactatgtgatgggaggctgtcagatcaacttcactgtgggcgtggacttcactggctccaatggagacccctcctcacctgactccctacactacctgagtccaacaggggtcaatgagtacctgatggcactgtggagtgtgggcagcgtggttcaggactatgactcagacaagctgttccctgcatttggatttggggcccaggttccccctgactggcaggtctcgcatgaatttgccttgaatttcaaccccagtaacccctactgtgcaggcatccagggcattgtggatgcctaccgccaagccctgccccaagttcgcctctatggccctaccaactttgcacccatcatcaaccatgtggccaggtttgcagcccaggctgcacatcaggggactgcctcgcaatacttcatgctgttgctgctgactgatggtgctgtgacggatgtggaagccacacgtgaggctgtggtgcgtgcctcgaacctgcccatgtcagtgatcattgtgggtgtgggtggtgctgactttgaggccatggagcagctggacgctgatggtggacccctgcatacacgttctgggcaggctgctgcccgcgacattgtgcagtttgtaccctaccgccggttccagaatgcccctcgggaggcattggcacagaccgtgctcgcagaagtgcccacacaactggtctcatacttcagggcccagggttgggccccgctcaagccacttccaccctcagccaaggatcctgcacaggccccccaggcctaggttcccttggaggctgtggcaagtcctcaatcctgtgtcccagaggtccctctgggccacaacccaacccttctcactctcctcagtgctagcactttgtattttttgatacttttatacttgtttctgcttttgctgctcttgatcccacctttgctcctgacaaccctcattcaataaagaccagtgaagaccaa

SEQ ID NO: 446100 - DNA, 2086 bp, Homo sapiens
ctcgacgagccggactttctgtgacaacgtgcgacacggacggctggctggcctgcgctcgcggcatccaggcgacagctcgatatcgcggacatgagaggcccgtggctgcgttgggctccgggaagccgttcgggctggggctgtcggccgcggggcggaggcactcgcgcggggggggtaattcggggtctgggttctggtgccgcgcagctttccccggattgacttggcctctacttcttgttaaggaaattcatctcttgttttatcagatggcccactgcgtgaccttggttcagctgtccatttcctgtgaccatctcattgacaaggacatcggctccaagtctgacccactctgcgtccttttacaggatgtgggagggggcagctgggctgagcttggccggactgaacgggtgcggaactgctcaagccctgagttctccaagactctacagcttgagtaccgctttgagacagtccagaagctacgctttggaatctatgacatagacaacaagacgccagagctgagggatgatgacttcctagggggtgctgagtgttccctaggacagattgtgtccagccaggtactgactctccccttgatgctgaagcctggaaaacctgctgggcgggggaccatcacggtctcagctcaggaattaaaggacaatcgtgtagtaaccatggaggtagaggccagaaacctagataagaaggacttcctgggaaaatcagatccatttctggagttcttccgccagggtgatgggaaatggcacctggtgtacagatctgaggtcatcaagaacaacctgaaccctacatggaagcgtttctcagtccccgttcagcatttctgtggtgggaaccccagcacacccatccaggtgcaatgctccgattatgacagtgacgggtcacatgatctcatcggtaccttccacaccagcttggcccagctgcaggcagtcccggctgagtttgaatgcatccaccctgagaagcagcagaaaaagaaaagctacaagaactctggaactatccgtgtcaagatttgtcgggtagaaacagagtactcctttctggactatgtgatgggaggctgtcagatcaacttcactgtgggcgtggacttcactggctccaatggagacccctcctcacctgactccctacactacctgagtccaacaggggtcaatgagtacctgatggcactgtggagtgtgggcagcgtggttcaggactatgactcagacaagctgttccctgcatttggatttggggcccaggttccccctgactggcaggtctcgcatgaatttgccttgaatttcaaccccagtaacccctactgtgcaggcatccagggcattgtggatgcctaccgccaagccctgccccaagttcgcctctatggccctaccaactttgcacccatcatcaaccatgtggccaggtttgcagcccaggctgcacatcaggggactgcctcgcaatacttcatgctgttgctgctgactgatggtgctgtgacggatgtggaagccacacgtgaggctgtggtgcgtgcctcgaacctgcccatgtcagtgatcattgtgggtgtgggtggtgctgactttgaggccatggagcagctggacgctgatggtggacccctgcatacacgttctgggcaggctgctgcccgcgacattgtgcagtttgtaccctaccgccggttccagaatgcccctcgggaggcattggcacagaccgtgctcgcagaagtgcccacacaactggtctcatacttcagggcccagggttgggccccgctcaagccacttccaccctcagccaaggatcctgcacaggccccccaggcctaggttcccttggaggctgtggcaagtcctcaatcctgtgtcccagaggtccctctgggccacaacccaacccttctcactctcctcagtgctagcactttgtattttttgatacttttatacttgtttctgcttttgctgctcttgatcccacctttgctcctgacaaccctcattcaataaagaccagtgaagaccaa

SEQ ID NO: 446101 - DNA, 1961 bp, Homo sapiens
ctcgacgagccggactttctgtgacaacgtgcgacacggacggctggctggcctgcgctcgcggcatccaggcgacagctcgatatcgcggacatgagaggcccgtggctgcgttgggctccgggaagccgttcgggctggggctgtcggccgcggggcggaggcactcgcgcggggggggtaattcggggtctgggttctggtgccgcgcagctttccccgatggcccactgcgtgaccttggttcagctgtccatttcctgtgaccatctcattgacaaggacatcggctccaagtctgacccactctgcgtccttttacaggatgtgggagggggcagctgggctgagcttggccggactgaacgggtgcggaactgctcaagccctgagttctccaagactctacagcttgagtaccgctttgagacagtccagaagctacgctttggaatctatgacatagacaacaagacgccagagctgagggatgatgacttcctagggggtgctgagtgttccctaggacagattgtgtccagccaggtactgactctccccttgatgctgaagcctggaaaacctgctgggcgggggaccatcacggacttcctgggaaaatcagatccatttctggagttcttccgccagggtgatgggaaatggcacctggtgtacagatctgaggtcatcaagaacaacctgaaccctacatggaagcgtttctcagtccccgttcagcatttctgtggtgggaaccccagcacacccatccaggtgcaatgctccgattatgacagtgacgggtcacatgatctcatcggtaccttccacaccagcttggcccagctgcaggcagtcccggctgagtttgaatgcatccaccctgagaagcagcagaaaaagaaaagctacaagaactctggaactatccgtgtcaagatttgtcgggtagaaacagagtactcctttctggactatgtgatgggaggctgtcagatcaacttcactgtgggcgtggacttcactggctccaatggagacccctcctcacctgactccctacactacctgagtccaacaggggtcaatgagtacctgatggcactgtggagtgtgggcagcgtggttcaggactatgactcagacaagctgttccctgcatttggatttggggcccaggttccccctgactggcaggtctcgcatgaatttgccttgaatttcaaccccagtaacccctactgtgcaggcatccagggcattgtggatgcctaccgccaagccctgccccaagttcgcctctatggccctaccaactttgcacccatcatcaaccatgtggccaggtttgcagcccaggctgcacatcaggggactgcctcgcaatacttcatgctgttgctgctgactgatggtgctgtgacggatgtggaagccacacgtgaggctgtggtgcgtgcctcgaacctgcccatgtcagtgatcattgtgggtgtgggtggtgctgactttgaggccatggagcagctggacgctgatggtggacccctgcatacacgttctgggcaggctgctgcccgcgacattgtgcagtttgtaccctaccgccggttccagaatgcccctcgggaggcattggcacagaccgtgctcgcagaagtgcccacacaactggtctcatacttcagggcccagggttgggccccgctcaagccacttccaccctcagccaaggatcctgcacaggccccccaggcctaggttcccttggaggctgtggcaagtcctcaatcctgtgtcccagaggtccctctgggccacaacccaacccttctcactctcctcagtgctagcactttgtattttttgatacttttatacttgtttctgcttttgctgctcttgatcccacctttgctcctgacaaccctcattcaataaagaccagtgaagaccaa

SEQ ID NO: 446102 - DNA, 4184 bp, Homo sapiens
ctcgacgagccggactttctgtgacaacgtgcgacacggacggctggctggcctgcgctcgcggcatccaggcgacagctcgatatcgcggacatgagaggcccgtggctgcgttgggctccgggaagccgttcgggctggggctgtcggccgcggggcggaggcactcgcgcggggggggtaattcggggtctgggttctggtgccgcgcagctttccccgtctaaaagttggttttaattggttgcccacaggattgacttggcctctacttcttgttaaggaaattcatctcttgttttatcaggtgtgtgtggtttcagcgcagcatggctgtggtcatccgtttgcaaggtctcccaattgtggcggggaccatggacattcgccacttcttctctggattgaccattcctgatgggggcgtgcatattgtagggggtgaactgggtgaggctttcatcgtttttgccactgatgaagatgcaaggcttggtatgatgcgcacaggtggtacaattaaagggtcaaaagtaacactattgttgagtagtaagacggaaatgcagaatatgattgaactgagtcgtaggcgttttgaaactgccaacttagatataccaccagcaaatgccagtagatcaggaccaccacctagctcaggaatgagtagcagggtaaacttgcccacaacagtatccaactttaataatccatcacccagtgtagttactgccaccacttctgttcatgaaagcaacaaaaacatacagacattttccacagccagcgtaggaacagctcctccaaatatgggggcttcctttgggagcccaacgtttagctcaactgttccaagcacagcctctccaatgaacacagtcccgccgccaccaattcctccaattccagcgatgccatctctgccaccaatgccatccattcccccaattccagttcctcctccagtacctacattgcctcctgtgcctcctgtgcccccgattcccccagttccttctgtgccacccatgaccccactgccacccatgtcgggcatgccgcccttgaatccgccacctgtggcacctctacctgctggaatgaatggctctggagcacctatgaatttgaacaataatctgaatcctatgtttcttggtccgttgaatcctgttaaccctatccagatgaactctcagagcagtgtgaagccactccccatcaaccctgatgatctgtatgtcagtgtgcatggaatgcccttttctgcaatggaaaatgatgtcagagatttttttcatgggctccgtgttgatgcagtgcatttgttgaaagatcatgtaggtcgaaataatgggaatggattggttaagtttctctcccctcaagatacatttgaagctttgaaacgaaacagaatgctgatgattcaacgctatgtggaagttagccctgccacagaaagacagtgggtagctgctggaggccatatcacttttaagcaaaatatgggaccttctggacaaactcatccccctcctcagacacttcccaggtcaaaatcgcccagtgggcagaaaagatcaaggtcaagatcaccacatgaggctggtttttgtgtttacttgaaagggctaccatttgaagcagaaaacaaacatgtcattgatttttttaaaaagctggatattgtggaagatagtatttatatagcttatggacccaatgggaaagcaactggcgaaggctttgtagagttcagaaatgaggctgactataaggctgctctgtgtcgtcataaacagtacatgggcaatcgctttattcaagttcatccaattactaagaaaggtatgctagaaaagatagatatgattcgaaaaagactgcagaacttcagctatgaccagagggaaatgatactaaatccagagggggatgtcaactctgccaaagtctgtgcccacataacaaatattccattcagcattacaaagatggatgttcttcagttcctagaaggaatcccagtggatgaaaatgctgtacatgttcttgttgataacaatgggcaaggtctaggacaggcattggttcagtttaaaaatgaagatgatgcacatggcccactgcgtgaccttggttcagctgtccatttcctgtgaccatctcattgacaaggacatcggctccaagtctgacccactctgcgtccttttacaggatgtgggagggggcagctgggctgagcttggccggactgaacgggtgcggaactgctcaagccctgagttctccaagactctacagcttgagtaccgctttgagacagtccagaagctacgctttggaatctatgacatagacaacaagacgccagagctgagggatgatgacttcctagggggtgctgagtgttccctaggacagattgtgtccagccaggtactgactctccccttgatgctgaagcctggaaaacctgctgggcgggggaccatcacggtctcagctcaggaattaaaggacaatcgtgtagtaaccatggaggtagaggccagaaacctagataagaaggacttcctgggaaaatcagatccatttctggagttcttccgccagggtgatgggaaatggcacctggtgtacagatctgaggtcatcaagaacaacctgaaccctacatggaagcgtttctcagtccccgttcagcatttctgtggtgggaaccccagcacacccatccaggtgcaatgctccgattatgacagtgacgggtcacatgatctcatcggtaccttccacaccagcttggcccagctgcaggcagtcccggctgagtttgaatgcatccaccctgagaagcagcagaaaaagaaaagctacaagaactctggaactatccgtgtcaagatttgtcgggtagaaacagagtactcctttctggactatgtgatgggaggctgtcagatcaacttcactgtgggcgtggacttcactggctccaatggagacccctcctcacctgactccctacactacctgagtccaacaggggtcaatgagtacctgatggcactgtggagtgtgggcagcgtggttcaggactatgactcagacaagctgttccctgcatttggatttggggcccaggttccccctgactggcagtgagctccctctctttctgccactcctgttttcagtttcagggtcctgattttgggggatgtggtaaatttacttgctacttggcactcagctttaagaggagatgcagggttggattcctgcaggcacgtagacagcaagtgctcaggactccatagctcctataggaatcttggcacacgccagtgtcctttttcattcttagcagaggtcatggggaaagaacctcattttcattcttgtctccaggtctcgcatgaatttgccttgaatttcaaccccagtaacccctactgtgcaggcatccagggcattgtggatgcctaccgccaagccctgccccaagttcgcctctatggccctaccaactttgcacccatcatcaaccatgtggccaggtttgcagcccaggctgcacatcaggggactgcctcgcaatacttcatgctgttgctgctgactgatggtgctgtgacggatgtggaagccacacgtgaggctgtggtgcgtgcctcgaacctgcccatgtcagtgatcattgtgggtgtgggtggtgctgactttgaggccatggagcagctggacgctgatggtggacccctgcatacacgttctgggcaggctgctgcccgcgacattgtgcagtttgtaccctaccgccggttccagaatgcccctcgggaggcattggcacagaccgtgctcgcagaagtgcccacacaactggtctcatacttcagggcccagggttgggccccgctcaagccacttccaccctcagccaaggatcctgcacaggccccccaggcctaggttcccttggaggctgtggcaagtcctcaatcctgtgtcccagaggtccctctgggccacaacccaacccttctcactctcctcagtgctagcactttgtattttttgatacttttatacttgtttctgcttttgctgctcttgatcccacctttgctcctgacaaccctcattcaataaagaccagtgaagaccaa

SEQ ID NO: 446103 - DNA, 3880 bp, Homo sapiens
ctcgacgagccggactttctgtgacaacgtgcgacacggacggctggctggcctgcgctcgcggcatccaggcgacagctcgatatcgcggacatgagaggcccgtggctgcgttgggctccgggaagccgttcgggctggggctgtcggccgcggggcggaggcactcgcgcggggggggtaattcggggtctgggttctggtgccgcgcagctttccccgtctaaaagttggttttaattggttgcccacaggattgacttggcctctacttcttgttaaggaaattcatctcttgttttatcaggtgtgtgtggtttcagcgcagcatggctgtggtcatccgtttgcaaggtctcccaattgtggcggggaccatggacattcgccacttcttctctggattgaccattcctgatgggggcgtgcatattgtagggggtgaactgggtgaggctttcatcgtttttgccactgatgaagatgcaaggcttggtatgatgcgcacaggtggtacaattaaagggtcaaaagtaacactattgttgagtagtaagacggaaatgcagaatatgattgaactgagtcgtaggcgttttgaaactgccaacttagatataccaccagcaaatgccagtagatcaggaccaccacctagctcaggaatgagtagcagggtaaacttgcccacaacagtatccaactttaataatccatcacccagtgtagttactgccaccacttctgttcatgaaagcaacaaaaacatacagacattttccacagccagcgtaggaacagctcctccaaatatgggggcttcctttgggagcccaacgtttagctcaactgttccaagcacagcctctccaatgaacacagtcccgccgccaccaattcctccaattccagcgatgccatctctgccaccaatgccatccattcccccaattccagttcctcctccagtacctacattgcctcctgtgcctcctgtgcccccgattcccccagttccttctgtgccacccatgaccccactgccacccatgtcgggcatgccgcccttgaatccgccacctgtggcacctctacctgctggaatgaatggctctggagcacctatgaatttgaacaataatctgaatcctatgtttcttggtccgttgaatcctgttaaccctatccagatgaactctcagagcagtgtgaagccactccccatcaaccctgatgatctgtatgtcagtgtgcatggaatgcccttttctgcaatggaaaatgatgtcagagatttttttcatgggctccgtgttgatgcagtgcatttgttgaaagatcatgtaggtcgaaataatgggaatggattggttaagtttctctcccctcaagatacatttgaagctttgaaacgaaacagaatgctgatgattcaacgctatgtggaagttagccctgccacagaaagacagtgggtagctgctggaggccatatcacttttaagcaaaatatgggaccttctggacaaactcatccccctcctcagacacttcccaggtcaaaatcgcccagtgggcagaaaagatcaaggtcaagatcaccacatgaggctggtttttgtgtttacttgaaagggctaccatttgaagcagaaaacaaacatgtcattgatttttttaaaaagctggatattgtggaagatagtatttatatagcttatggacccaatgggaaagcaactggcgaaggctttgtagagttcagaaatgaggctgactataaggctgctctgtgtcgtcataaacagtacatgggcaatcgctttattcaagttcatccaattactaagaaaggtatgctagaaaagatagatatgattcgaaaaagactgcagaacttcagctatgaccagagggaaatgatactaaatccagagggggatgtcaactctgccaaagtctgtgcccacataacaaatattccattcagcattacaaagatggatgttcttcagttcctagaaggaatcccagtggatgaaaatgctgtacatgttcttgttgataacaatgggcaaggtctaggacaggcattggttcagtttaaaaatgaagatgatgcacatggcccactgcgtgaccttggttcagctgtccatttcctgtgaccatctcattgacaaggacatcggctccaagtctgacccactctgcgtccttttacaggatgtgggagggggcagctgggctgagcttggccggactgaacgggtgcggaactgctcaagccctgagttctccaagactctacagcttgagtaccgctttgagacagtccagaagctacgctttggaatctatgacatagacaacaagacgccagagctgagggatgatgacttcctagggggtgctgagtgttccctaggacagattgtgtccagccaggtactgactctccccttgatgctgaagcctggaaaacctgctgggcgggggaccatcacggtctcagctcaggaattaaaggacaatcgtgtagtaaccatggaggtagaggccagaaacctagataagaaggacttcctgggaaaatcagatccatttctggagttcttccgccagggtgatgggaaatggcacctggtgtacagatctgaggtcatcaagaacaacctgaaccctacatggaagcgtttctcagtccccgttcagcatttctgtggtgggaaccccagcacacccatccaggtgcaatgctccgattatgacagtgacgggtcacatgatctcatcggtaccttccacaccagcttggcccagctgcaggcagtcccggctgagtttgaatgcatccaccctgagaagcagcagaaaaagaaaagctacaagaactctggaactatccgtgtcaagatttgtcgggtagaaacagagtactcctttctggactatgtgatgggaggctgtcagatcaacttcactgtgggcgtggacttcactggctccaatggagacccctcctcacctgactccctacactacctgagtccaacaggggtcaatgagtacctgatggcactgtggagtgtgggcagcgtggttcaggactatgactcgtctcgcatgaatttgccttgaatttcaaccccagtaacccctactgtgcaggcatccagggcattgtggatgcctaccgccaagccctgccccaagttcgcctctatggccctaccaactttgcacccatcatcaaccatgtggccaggtttgcagcccaggctgcacatcaggggactgcctcgcaatacttcatgctgttgctgctgactgatggtgctgtgacggatgtggaagccacacgtgaggctgtggtgcgtgcctcgaacctgcccatgtcagtgatcattgtgggtgtgggtggtgctgactttgaggccatggagcagctggacgctgatggtggacccctgcatacacgttctgggcaggctgctgcccgcgacattgtgcagtttgtaccctaccgccggttccagaatgcccctcgggaggcattggcacagaccgtgctcgcagaagtgcccacacaactggtctcatacttcagggcccagggttgggccccgctcaagccacttccaccctcagccaaggatcctgcacaggccccccaggcctaggttcccttggaggctgtggcaagtcctcaatcctgtgtcccagaggtccctctgggccacaacccaacccttctcactctcctcagtgctagcactttgtattttttgatacttttatacttgtttctgcttttgctgctcttgatcccacctttgctcctgacaaccctcattcaataaagaccagtgaagaccaa

SEQ ID NO: 446104 - DNA, 4058 bp, Homo sapiens
ctcgacgagccggactttctgtgacaacgtgcgacacggacggctggctggcctgcgctcgcggcatccaggcgacagctcgatatcgcggacatgagaggcccgtggctgcgttgggctccgggaagccgttcgggctggggctgtcggccgcggggcggaggcactcgcgcggggggggtaattcggggtctgggttctggtgccgcgcagctttccccgtctaaaagttggttttaattggttgcccacaggattgacttggcctctacttcttgttaaggaaattcatctcttgttttatcaggtgtgtgtggtttcagcgcagcatggctgtggtcatccgtttgcaaggtctcccaattgtggcggggaccatggacattcgccacttcttctctggattgaccattcctgatgggggcgtgcatattgtagggggtgaactgggtgaggctttcatcgtttttgccactgatgaagatgcaaggcttggtatgatgcgcacaggtggtacaattaaagggtcaaaagtaacactattgttgagtagtaagacggaaatgcagaatatgattgaactgagtcgtaggcgttttgaaactgccaacttagatataccaccagcaaatgccagtagatcaggaccaccacctagctcaggaatgagtagcagggtaaacttgcccacaacagtatccaactttaataatccatcacccagtgtagttactgccaccacttctgttcatgaaagcaacaaaaacatacagacattttccacagccagcgtaggaacagctcctccaaatatgggggcttcctttgggagcccaacgtttagctcaactgttccaagcacagcctctccaatgaacacagtcccgccgccaccaattcctccaattccagcgatgccatctctgccaccaatgccatccattcccccaattccagttcctcctccagtacctacattgcctcctgtgcctcctgtgcccccgattcccccagttccttctgtgccacccatgaccccactgccacccatgtcgggcatgccgcccttgaatccgccacctgtggcacctctacctgctggaatgaatggctctggagcacctatgaatttgaacaataatctgaatcctatgtttcttggtccgttgaatcctgttaaccctatccagatgaactctcagagcagtgtgaagccactccccatcaaccctgatgatctgtatgtcagtgtgcatggaatgcccttttctgcaatggaaaatgatgtcagagatttttttcatgggctccgtgttgatgcagtgcatttgttgaaagatcatgtaggtcgaaataatgggaatggattggttaagtttctctcccctcaagatacatttgaagctttgaaacgaaacagaatgctgatgattcaacgctatgtggaagttagccctgccacagaaagacagtgggtagctgctggaggccatatcacttttaagcaaaatatgggaccttctggacaaactcatccccctcctcagacacttcccaggtcaaaatcgcccagtgggcagaaaagatcaaggtcaagatcaccacatgaggctggtttttgtgtttacttgaaagggctaccatttgaagcagaaaacaaacatgtcattgatttttttaaaaagctggatattgtggaagatagtatttatatagcttatggacccaatgggaaagcaactggcgaaggctttgtagagttcagaaatgaggctgactataaggctgctctgtgtcgtcataaacagtacatgggcaatcgctttattcaagttcatccaattactaagaaaggtatgctagaaaagatagatatgattcgaaaaagactgcagaacttcagctatgaccagagggaaatgatactaaatccagagggggatgtcaactctgccaaagtctgtgcccacataacaaatattccattcagcattacaaagatggatgttcttcagttcctagaaggaatcccagtggatgaaaatgctgtacatgttcttgttgataacaatgggcaaggtctaggacaggcattggttcagtttaaaaatgaagatgatgcacatggcccactgcgtgaccttggttcagctgtccatttcctgtgaccatctcattgacaaggacatcggctccaagtctgacccactctgcgtccttttacaggatgtgggagggggcagctgggctgagcttggccggactgaacgggtgcggaactgctcaagccctgagttctccaagactctacagcttgagtaccgctttgagacagtccagaagctacgctttggaatctatgacatagacaacaagacgccagagctgagggatgatgacttcctagggggtgctgagtgttccctaggacagattgtgtccagccaggtactgactctccccttgatgctgaagcctggaaaacctgctgggcgggggaccatcacggtctcagctcaggaattaaaggacaatcgtgtagtaaccatggaggtagaggccagaaacctagataagaaggacttcctgggaaaatcagatccatttctggagttcttccgccagggtgatgggaaatggcacctggtgtacagatctgaggtcatcaagaacaacctgaaccctacatggaagcgtttctcagtccccgttcagcatttctgtggtgggaaccccagcacacccatccaggtgcaatgctccgattatgacagtgacgggtcacatgatctcatcggtaccttccacaccagcttggcccagctgcaggcagtcccggctgagtttgaatgcatccaccctgagaagcagcagaaaaagaaaagctacaagaactctggaactatccgtgtcaagatttgtcgggtagaaacagagtactcctttctggactatgtgatgggaggctgtcagatcaacttcactgtgggcgtggacttcactggctccaatggagacccctcctcacctgactccctacactacctgagtccaacaggggtcaatgagtacctgatggcactgtggagtgtgggcagcgtggttcaggactatgactcagacaagctgttccctgcatttggatttggggcccaggttccccctgactggcaggtctcgcatgaatttgccttgaatttcaaccccagtaacccctactgtgcaggcatccagggcattgtggatgcctaccgccaagccctgccccaagttcgcctctatggccctaccaactttgcacccatcatcaaccatgtggccaggtttgcagcccaggctgcacatcaggggactgcctcgcaatacttcatgctgttgctgctgactgatggtgctgtgacggatgtggaagccacacgtgaggctgtggtgcgtgcctcgaacctgcccatgtcagtgatcattgtgggtgtgggtggtgctgactttgaggccatggagcagctggacgctgatggtggacccctgcatacacgttctgggcaggctgctgcccgcgacattgtgcagtttgtaccctaccgccggttccagaatgcccctcgggaggcattggcacagaccgtgctcgcagaagtgcccacacaactggtctcatacttcagggcccagggttgggccccgctcaagccacttccaccctcagccaaggatcctgcacaggccccccaggcctaggttcccttggaggctgtggcaagtcctcaatcctgtgtcccagaggtccctctgggccacaacccaacccttctcactctcctcagtgctagcactttgtattttttgatacttttatacttgtttctgcttttgctgctcttgatcccacctttgctcctgacaaccctcattcaataaagaccagtgaagaccaaaaaaaaaaggggggcgcaaagattccccaagggcccagtacacgtcacccgttttgtaaaagggccccaagggcgaaaaaaagagcgcgggtaaacgcgggaaagatggtctgggccctgggg

SEQ ID NO: 446105 - DNA, 3629 bp, Homo sapiens
ctcgacgagccggactttctgtgacaacgtgcgacacggacggctggctggcctgcgctcgcggcatccaggcgacagctcgatatcgcggacatgagaggcccgtggctgcgttgggctccgggaagccgttcgggctggggctgtcggccgcggggcggaggcactcgcgcggggggggtaattcggggtctgggttctggtgccgcgcagctttccccgtctaaaagttggttttaattggttgcccacaggattgacttggcctctacttcttgttaaggaaattcatctcttgttttatcaggtgtgtgtggtttcagcgcagcatggctgtggtcatccgtttgcaaggtctcccaattgtggcggggaccatggacattcgccacttcttctctggattgaccattcctgatgggggcgtgcatattgtagggggtgaactgggtgaggctttcatcgtttttgccactgatgaagatgcaaggcttggtatgatgcgcacaggtggtacaattaaagggtcaaaagtaacactattgttgagtagtaagacggaaatgcagaatatgattgaactgagtcgtaggcgttttgaaactgccaacttagatataccaccagcaaatgccagtagatcaggaccaccacctagctcaggaatgagtagcagggtaaacttgcccacaacagtatccaactttaataatccatcacccagtgtagttactgccaccacttctgttcatgaaagcaacaaaaacatacagacattttccacagccagcgtaggaacagctcctccaaatatgggggcttcctttgggagcccaacgtttagctcaactgttccaagcacagcctctccaatgaacacagtcccgccgccaccaattcctccaattccagcgatgccatctctgccaccaatgccatccattcccccaattccagttcctcctccagtacctacattgcctcctgtgcctcctgtgcccccgattcccccagttccttctgtgccacccatgaccccactgccacccatgtcgggcatgccgcccttgaatccgccacctgtggcacctctacctgctggaatgaatggctctggagcacctatgaatttgaacaataatctgaatcctatgtttcttggtccgttgaatcctgttaaccctatccagatgaactctcagagcagtgtgaagccactccccatcaaccctgatgatctgtatgtcagtgtgcatggaatgcccttttctgcaatggaaaatgatgtcagagatttttttcatgggctccgtgttgatgcagtgcatttgttgaaagatcatgtaggtcgaaataatgggaatggattggttaagtttctctcccctcaagatacatttgaagctttgaaacgaaacagaatgctgatgattcaacgctatgtggaagttagccctgccacagaaagacagtgggtagctgctggaggccatatcacttttaagcaaaatatgggaccttctggacaaactcatccccctcctcagacacttcccaggtcaaaatcgcccagtgggcagaaaagatcaaggtcaagatcaccacatgaggctggtttttgtgtttacttgaaagggctaccatttgaagcagaaaacaaacatgtcattgatttttttaaaaagctggatattgtggaagatagtatttatatagcttatggacccaatgggaaagcaactggcgaaggctttgtagagttcagaaatgaggctgactataaggctgctctgtgtcgtcataaacagtacatgggcaatcgctttattcaagttcatccaattactaagaaaggtatgctagaaaagatagatatgattcgaaaaagactgcagaacttcagctatgaccagagggaaatgatactaaatccagagggggatgtcaactctgccaaagtctgtgcccacataacaaatattccattcagcattacaaagatggatgttcttcagttcctagaaggaatcccagtggatgaaaatgctgtacatgttcttgttgataacaatgggcaaggtctaggacaggcattggttcagtttaaaaatgaagatgatgcacgtaagtctgaacgcttacaccgtaaaaaacttaatgggagagaagcttttgttcatgtagttaccctagaagatatgagagagattgagaaaaatccccctgcccaaggaaaaaagggattaaagatgcctgtgccaggtaatcctgcagttccaggaatgcccaatgcgggactgcccggtgtgggactgcccagtgcaggacttcccggtgcaggcctgcccagcacaggactgcctggttcagcaataaccagtgcaggactgcctggtgcgggaatgcccagtgcaggaatacctagtgcaggaggtgaagagcatgccttcctgactgtaggatcaaaggaagccaataatgggcctccatttaactttcctggtaattttggtggatcaaatgcctttgggccaccaatccctcctccaggattaggaggcggggcctttggtgatgctaggcctggtatgccttcagttggaaacagtggtttgcctggtctaggactggatgttccgggttttggaggtggaccaaacaatttaagtgggccatcgggatttggagggggccctcagaattttggaaatggccctggtagcttaggcggtcccccggggtttggaagtggccctcctggtcttggaagtgcccctgggcatttgggtgggccaccagcttttgggcctggccccggccccggccccggccctggcccaatccatattggtggtccccctggctttgcatctagttctggaaaaccaggaccgacagtaattaaagtgcaaaacatgccctttactgtgtctattgatgagattttagatttcttttatggctatcaagtaatcccaggctcagtgtgtttaaaatacaatgaaaaaggtatgcccacaggtgaagccatggtggcctttgagtctcgggatgaagccacagctgctgtcattgacttaaatgacaggcctataggttcaagaaaagtaaaacttgtattagggtagccattcacatcattttttatagggtagatcttcatattgctgtgattaatgcatccagattgttttcctagtatttccaggttagaacctgtggattgtttcaattgcatatagcttggtttccataacatagagcattggttgactgtttacagaagactcactcaccaggataaacattgctgtatgttacagtaaagctatctggagagaacacataaatgattttggcataccattagagaaaccatttgtaaaactcaaatgaccacataaagcttatcaaggagtctagattggttttgttttataccatatgggatgaagaaaatagaaatgtcagtagaactcattgagggtgctcttgccagctgctgaaaatagaagttggctactctcagaatttggtttaaagctggacagatttgctttgttatagggtaaagctttgtctaaagtcctcattttcttttaaaattgaataaaatttctgtatacaga

SEQ ID NO: 446106 - DNA, 6727 bp, Homo sapiens
ctcgacgagccggactttctgtgacaacgtgcgacacggacggctggctggcctgcgctcgcggcatccaggcgacagctcgatatcgcggacatgagaggcccgtggctgcgttgggctccgggaagccgttcgggctggggctgtcggccgcggggcggaggcactcgcgcggggggggtaattcggggtctgggttctggtgccgcgcagctttccccgtctaaaagttggttttaattggttgcccacaggattgacttggcctctacttcttgttaaggaaattcatctcttgttttatcaggtgtgtgtggtttcagcgcagcatggctgtggtcatccgtttgcaaggtctcccaattgtggcggggaccatggacattcgccacttcttctctggattgaccattcctgatgggggcgtgcatattgtagggggtgaactgggtgaggctttcatcgtttttgccactgatgaagatgcaaggcttggtatgatgcgcacaggtggtacaattaaagggtcaaaagtaacactattgttgagtagtaagacggaaatgcagaatatgattgaactgagtcgtaggcgttttgaaactgccaacttagatataccaccagcaaatgccagtagatcaggaccaccacctagctcaggaatgagtagcagggtaaacttgcccacaacagtatccaactttaataatccatcacccagtgtagttactgccaccacttctgttcatgaaagcaacaaaaacatacagacattttccacagccagcgtaggaacagctcctccaaatatgggggcttcctttgggagcccaacgtttagctcaactgttccaagcacagcctctccaatgaacacagtcccgccgccaccaattcctccaattccagcgatgccatctctgccaccaatgccatccattcccccaattccagttcctcctccagtacctacattgcctcctgtgcctcctgtgcccccgattcccccagttccttctgtgccacccatgaccccactgccacccatgtcgggcatgccgcccttgaatccgccacctgtggcacctctacctgctggaatgaatggctctggagcacctatgaatttgaacaataatctgaatcctatgtttcttggtccgttgaatcctgttaaccctatccagatgaactctcagagcagtgtgaagccactccccatcaaccctgatgatctgtatgtcagtgtgcatggaatgcccttttctgcaatggaaaatgatgtcagagatttttttcatgggctccgtgttgatgcagtgcatttgttgaaagatcatgtaggtcgaaataatgggaatggattggttaagtttctctcccctcaagatacatttgaagctttgaaacgaaacagaatgctgatgattcaacgctatgtggaagttagccctgccacagaaagacagtgggtagctgctggaggccatatcacttttaagcaaaatatgggaccttctggacaaactcatccccctcctcagacacttcccaggtcaaaatcgcccagtgggcagaaaagatcaaggtcaagatcaccacatgaggctggtttttgtgtttacttgaaagggctaccatttgaagcagaaaacaaacatgtcattgatttttttaaaaagctggatattgtggaagatagtatttatatagcttatggacccaatgggaaagcaactggcgaaggctttgtagagttcagaaatgaggctgactataaggctgctctgtgtcgtcataaacagtacatgggcaatcgctttattcaagttcatccaattactaagaaaggtatgctagaaaagatagatatgattcgaaaaagactgcagaacttcagctatgaccagagggaaatgatactaaatccagagggggatgtcaactctgccaaagtctgtgcccacataacaaatattccattcagcattacaaagatggatgttcttcagttcctagaaggaatcccagtggatgaaaatgctgtacatgttcttgttgataacaatgggcaaggtctaggacaggcattggttcagtttaaaaatgaagatgatgcacgtaagtctgaacgcttacaccgtaaaaaacttaatgggagagaagcttttgttcatgtagttaccctagaagatatgagagagattgagaaaaatccccctgcccaaggaaaaaagggattaaagatgcctgtgccaggtaatcctgcagttccaggaatgcccaatgcgggactgcccggtgtgggactgcccagtgcaggacttcccggtgcaggcctgcccagcacaggactgcctggttcagcaataaccagtgcaggactgcctggtgcgggaatgcccagtgcaggaatacctagtgcaggaggtgaagagcatgccttcctgactgtaggatcaaaggaagccaataatgggcctccatttaactttcctggtaattttggtggatcaaatgcctttgggccaccaatccctcctccaggattaggaggcggggcctttggtgatgctaggcctggtatgccttcagttggaaacagtggtttgcctggtctaggactggatgttccgggttttggaggtggaccaaacaatttaagtgggccatcgggatttggagggggccctcagaattttggaaatggccctggtagcttaggcggtcccccggggtttggaagtggccctcctggtcttggaagtgcccctgggcatttgggtgggccaccagcttttgggcctggccccggccccggccccggccctggcccaatccatattggtggtccccctggctttgcatctagttctggaaaaccaggaccgacagtaattaaagtgcaaaacatgccctttactgtgtctattgatgagattttagatttcttttatggctatcaagtaatcccaggctcagtgtgtttaaaatacaatgaaaaaggtatgcccacaggtgaagccatggtggcctttgagtctcgggatgaagccacagctgctgtcattgacttaaatgacaggcctataggttcaagaaaagtaaaacttgtattagggtagccattcacatcattttttatagggtagatcttcatattgctgtgattaatgcatccagattgttttcctagtatttccaggttagaacctgtggattgtttcaattgcatatagcttggtttccataacatagagcattggttgactgtttacagaagactcactcaccaggataaacattgctgtatgttacagtaaagctatctggagagaacacataaatgattttggcataccattagagaaaccatttgtaaaactcaaatgaccacataaagcttatcaaggagtctagattggttttgttttataccatatgggatgaagaaaatagaaatgtcagtagaactcattgagggtgctcttgccagctgctgaaaatagaagttggctactctcagaatttggtttaaagctggacagatttgctttgttatagggtaaagctttgtctaaagtcctcattttcttttaaaattgaataaaatttctgtatacagattcattgtatgtacctttattgcttcttaagggtccttgctgtatagacagtcctgcttcagaagttgctgctttgtttgtctaattgactcatttgtaaatgagcagaactgttttgttggtttttttccctaaatataaaagtccacacttcgtttgtgctataacctcaaactttgatttctaatgtcacacttaaaactgtgtggaataagacttttgccataaaaataaactatggagtcctttatctaccagagcctttttggtttgaccgccacgatttaggttagtcagtttaaaaattgttcatgttgtttggatggtatcgaaaaccagaaaccacttttaataatgtgtttaagatacttgatttgaagtccttttcatatggactaattgtagtatcaatttcctcctgtcccgattatgtgaaattttggcctttaaacaaagaggggcccattcataagaaagtgttatatctaggtttttaaaactgaagttgaaattatctttgttagcagtagtagtatagaataaaagatccgtatgctggttcgtagattgatacgtgttagtcctgttatttggaggctttttggcatagttgttcgatcaggagcctgtttactaaaagtcttcatacagagtacaagtgcagccgccagaggagaaaattgagattcttgaccctttcatactcttttctttggtattcaggacactaaggcaggaggaccacatgagttctggttggtaagtgtccttgtcatgaaaacacttgccttacaaggctctaattatgatttccctagtcagtgctctgaagatgtgtcacattatattataaacaatacggaaggggagataggtgagatgatatgaaaaacaaattttctcactgtcataaaaggctctaattatggttactttccttgtgatgaaaaacttggccttacagggctctagttatggttactttccctagtcaatgctctgaaaatgtgtcacattataaacaatacagaaggagagatagatgagagatcatgaaaaccaaattttatcttttacatggcccctttgtcttcgtttgaaacatccccaacatttcctacaaatcagcgtagttacaaaggggtcagtcttttaaaataagtatttcctattaaactatatatatatacagtgcctttttggtgttgtgagtcagtggaacactgaaatacagcggttgtgtaatttaagagtggcaacagtttcatttgataagatttgaaaaggctttttatcactacaatcttagaggattgacagtacaggatttttgtttaagagaaggattgtttagactcaagaggtgactatgttgtgggtcttttgataattcatgaatacagatttgctttgaccgatcactagatactgcctcctcaatttcaaaagcaatataacgtttgtatatgctgtttaatttaagttaatgttaagtaatcatttctcattccaaagacaatgcaaaaaacttcagcactgcttgagagttgtatttcagccacagatattttctccattggaaagctattttcattttagaaaaatgggttgtttgaagatgaaagtcttttatcttttttcacaatttattttggttatatgttcgtacattcttattaaatatttcatacactttattgcaactactttgttatttctacatcttagataaatgctgaaaaggaaaacgatttcattgttcatctaattaaataaattaaaagagcggtttgtgtagaaattggagagaactatgttttatatgaatcacaacagtgctcgttgtggactgtaattaaatgctttgccctctggaacttgatttttgtgtatctgagatttattaacagtgctaactgctaaggatactgtttatcttgttctgggcattggagtttcagtttttaaaaaattcttgaaaatgtattctgtgaaactactcatacctctcttcctgcgaattttctcctaagaactaggtttggggtagaaatgaattgacattattttctcatttgctttgtatggtatgaaggatttgtaaagctttgctcaaagttgtgtgcatttgtaaacactatcatgatattttcaattttatgtgtaaattttattgtctgtttttggtgactctgacattaatggaagagaatattttccattagatttaattttttttcctctcccttctgattttttttttattggtgttcatttttcttttgatttaaaggattagagaaatctacaaatgtatgtcataaataagcaaatttgtaaacttttctgaactttagtgaaacatttagttcacaagcataatttggaggtgtgttctgtgtttacacagtagtttggatgtacaattattattagtggctttttaaaaaatgaaacagtgttaagtgaaatgtagttcctagctttgtactccaagttgtcaaagcatcaacaatgaaaattcgattaggaaactttatttaaaatttcaggtagtaatattcagtgtagttaaggccagtcttaacccactggatgaaaatctaggactgtatggaagtaagcaaacattacatttttaggtggaaatagtcagccttgcataaaaacaaggatgcgtgaaagccttaaattccagctcccttttactggagtctgtggttgtgtacaggtatgggccaagtgtaaaatctcatcaattttaagaacactcgggaaatgagtaaagaaaatgtaaaattgctgctagtcaaatcttttggaaagaatttctggaagtggtcactttaaaaattattttccacccttgcaaaattgccacatttaaattgttttactggcagttctatagtagtccagactttagaaaccaaacacaacaaaatggcttgttgccaatatggccacaacattgccagcaaatactgccttggcatcactcagcagaggtttttgtttataaagatgaagtcttgaatactgttcaataaacttgtcaaaaaataaaacaggctgatgcttttaatgctttaactgca

SEQ ID NO: 446107 - DNA, 6069 bp, Homo sapiens
ctcgacgagccggactttctgtgacaacgtgcgacacggacggctggctggcctgcgctcgcggcatccaggcgacagctcgatatcgcggacatgagaggcccgtggctgcgttgggctccgggaagccgttcgggctggggctgtcggccgcggggcggaggcactcgcgcggggggggtaattcggggtctgggttctggtgccgcgcagctttccccgtctaaaagttggttttaattggttgcccacaggattgacttggcctctacttcttgttaaggaaattcatctcttgttttatcaggtgtgtgtggtttcagcgcagcatggctgtggtcatccgtttgcaaggtctcccaattgtggcggggaccatggacattcgccacttcttctctggattgaccattcctgatgggggcgtgcatattgtagggggtgaactgggtgaggctttcatcgtttttgccactgatgaagatgcaaggcttggtatgatgcgcacaggtggtacaattaaagggtcaaaagtaacactattgttgagtagtaagacggaaatgcagaatatgattgaactgagtcgtaggcgttttgaaactgccaacttagatataccaccagcaaatgccagtagatcaggaccaccacctagctcaggaatgagtagcagggtaaacttgcccacaacagtatccaactttaataatccatcacccagtgtagttactgccaccacttctgttcatgaaagcaacaaaaacatacagacattttccacagccagcgtaggaacagctcctccaaatatgggggcttcctttgggagcccaacgtttagctcaactgttccaagcacagcctctccaatgaacacagtcccgccgccaccaattcctccaattccagcgatgccatctctgccaccaatgccatccattcccccaattccagttcctcctccagtacctacattgcctcctgtgcctcctgtgcccccgattcccccagttccttctgtgccacccatgaccccactgccacccatgtcgggcatgccgcccttgaatccgccacctgtggcacctctacctgctggaatgaatggctctggagcacctatgaatttgaacaataatctgaatcctatgtttcttggtccgttgaatcctgttaaccctatccagatgaactctcagagcagtgtgaagccactccccatcaaccctgatgatctgtatgtcagtgtgcatggaatgcccttttctgcaatggaaaatgatgtcagagatttttttcatgggctccgtgttgatgcagtgcatttgttgaaagatcatgtaggtcgaaataatgggaatggattggttaagtttctctcccctcaagatacatttgaagctttgaaacgaaacagaatgctgatgattcaacgctatgtggaagttagccctgccacagaaagacagtgggtagctgctggaggccatatcacttttaagcaaaatatgggaccttctggacaaactcatccccctcctcagacacttcccaggtcaaaatcgcccagtgggcagaaaagatcaaggtcaagatcaccacatgaggctggtttttgtgtttacttgaaagggctaccatttgaagcagaaaacaaacatgtcattgatttttttaaaaagctggatattgtggaagatagtatttatatagcttatggacccaatgggaaagcaactggcgaaggctttgtagagttcagaaatgaggctgactataaggctgctctgtgtcgtcataaacagtacatgggcaatcgctttattcaagttcatccaattactaagaaaggtatgctagaaaagatagatatgattcgaaaaagactgcagaacttcagctatgaccagagggaaatgatactaaatccagagggggatgtcaactctgccaaagtctgtgcccacataacaaatattccattcagcattacaaagatggatgttcttcagttcctagaaggaatcccagtggatgaaaatgctgtacatgttcttgttgataacaatgggcaaggtctaggacaggcattggttcagtttaaaaatgaagatgatgcacgtaagtctgaacgcttacaccgtaaaaaacttaatgggagagaagcttttgttcatgtagttaccctagaagatatgagagagattgagaaaaatccccctgcccaaggaaaaaagggattaaagatgcctgtgccaggtaatcctgcagttccaggaatgcccaatgcgggactgcccggtgtgggactgcccagtgcaggacttcccggtgcaggcctgcccagcacaggactgcctggttcagcaataaccagtgcaggactgcctggtgcgggaatgcccagtgcaggaatacctagtgcaggaggtgaagagcatgccttcctgactgtaggatcaaaggaagccaataatgggcctccatttaactttcctggtaattttggtggatcaaatgcctttgggccaccaatccctcctccaggattaggaggcggggcctttggtgatgctaggcctggtatgccttcagttggaaacagtggtttgcctggtctaggactggatgttccgggttttggaggtggaccaaacaatttaagtgggccatcgggatttggagggggccctcagaattttggaaatggccctggtagcttaggcggtcccccggggtttggaagtggccctcctggtcttggaagtgcccctgggcatttgggtgggccaccagcttttgggcctggccccggccccggccccggccctggcccaatccatattggtggtccccctggctttgcatctagttctggaaaaccaggaccgacagtaattaaagtgcaaaacatgccctttactgtgtctattgatgagattttagatttcttttatggctatcaagtaatcccaggctcagtgtgtttaaaatacaatgaaaaaggtatgcccacaggtgaagccatggtggcctttgagtctcgggatgaagccacagctgctgtcattgacttaaatgacaggcctataggttcaagaaaagtaaaacttgtattagggtagccattcacatcattttttatagggtagatcttcatattgctgtgattaatgcatccagattgttttcctagtatttccaggttagaacctgtggattgtttcaattgcatatagcttggtttccataacatagagcattggttgactgtttacagaagactcactcaccaggataaacattgctgtatgttacagtaaagctatctggagagaacacataaatgattttggcataccattagagaaaccatttgtaaaactcaaatgaccacataaagcttatcaaggagtctagattggttttgttttataccatatgggatgaagaaaatagaaatgtcagtagaactcattgagggtgctcttgccagctgctgaaaatagaagttggctactctcagaatttggtttaaagctggacagatttgctttgttatagggtaaagctttgtctaaagtcctcattttcttttaaaattgaataaaatttctgtatacagattcattgtatgtacctttattgcttcttaagggtccttgctgtatagacagtcctgcttcagaagttgctgctttgtttgtctaattgactcatttgtaaatgagcagaactgttttgttggtttttttccctaaatataaaagtccacacttcgtttgtgctataacctcaaactttgatttctaatgtcacacttaaaactgtgtggaataagacttttgccataaaaataaactatggagtcctttatctaccagagcctttttggtttgaccgccacgatttaggttagtcagtttaaaaattgttcatgttgtttggatggtatcgaaaaccagaaaccacttttaataatgtgtttaagatacttgatttgaagtccttttcatatggactaattgtagtatcaatttcctcctgtcccgattatgtgaaattttggcctttaaacaaagaggggcccattcataagaaagtgttatatctaggtttttaaaactgaagttgaaattatctttgttagcagtagtagtatagaataaaagatccgtatgctggttcgtagattgatacgtgttagtcctgttatttggaggctttttggcatagttgttcgatcaggagcctgtttactaaaagtcttcatacagagtacaagtgcagccgccagaggagaaaattgagattcttgaccctttcatactcttttctttggtattcaggacactaaggcaggaggaccacatgagttctggttggtaagtgtccttgtcatgaaaacacttgccttacaaggctctaattatgatttccctagtcagtgctctgaagatgtgtcacattatattataaacaatacggaaggggagataggtgagatgatatgaaaaacaaattttctcactgtcataaaaggctctaattatggttactttccttgtgatgaaaaacttggccttacagggctctagttatggttactttccctagtcaatgctctgaaaatgtgtcacattataaacaatacagaaggagagatagatgagagatcatgaaaaccaaattttatcttttacatggcccctttgtcttcgtttgaaacatccccaacatttcctacaaatcagcgtagttacaaaggggtcagtcttttaaaataagtatttcctattaaactatatatatatacagtgcctttttggtgttgtgagtcagtggaacactgaaatacagcggttgtgtaatttaagagtggcaacagtttcatttgataagatttgaaaaggctttttatcactacaatcttagaggattgacagtacaggatttttgtttaagagaaggattgtttagactcaagaggtgactatgttgtgggtcttttgataattcatgaatacagatttgctttgaccgatcactagatactgcctcctcaatttcaaaagcaatataacgtttgtatatgctgtttaatttaagttaatgttaagtaatcatttctcattccaaagacaatgcaaaaaacttcagcactgcttgagagttgtatttcagccacagatattttctccattggaaagctattttcattttagaaaaatgggttgtttgaagatgaaagtcttttatcttttttcacaatttattttggttatatgttcgtacattcttattaaatatttcatacactttattgcaactactttgttatttctacatcttagataaatgctgaaaaggaaaacgatttcattgttcatctaattaaataaattaaaagagcggtttgtgtagaaattggagagaactatgttttatatgaatcacaacagtgctcgttgtggactgtaattaaatgctttgccctctggaacttgatttttgtgtatctgagatttattaacagtgctaactgctaaggatactgtttatcttgttctgggcattggagtttcagtttttaaaaaattcttgaaaatgtattctgtgaaactactcatacctctcttcctgcgaattttctcctaagaactaggtttggggtagaaatgaattgacattattttctcatttgctttgtatggtatgaaggatttgtaaagctttgctcaaagttgtgtgcatttgtaaacactatcatgatattttcaattttatgtgtaaattttattgtctgtttttggtgactctgacattaatggaagagaatattttccattagatttaattttttttcctctcccttctgattttttttttattggtgttcatttttcttttgatttaaaggattagagaaatctacaaatgtatgtcataaataagcaaatttgtaaacttttctgaactttagtgaaacatttagttcacaagcactcctccccggcggcccgtgttcctgttgtttaccacagctacctttgccattctccacaa

SEQ ID NO: 446108 - DNA, 3635 bp, Homo sapiens
  misc_feature (3635)..(3635): n is a, c, g, or t
ctcgacgagccggactttctgtgacaacgtgcgacacggacggctggctggcctgcgctcgcggcatccaggcgacagctcgatatcgcggacatgagaggcccgtggctgcgttgggctccgggaagccgttcgggctggggctgtcggccgcggggcggaggcactcgcgcggggggggtaattcggggtctgggttctggtgccgcgcagctttccccgtctaaaagttggttttaattggttgcccacaggattgacttggcctctacttcttgttaaggaaattcatctcttgttttatcaggtgtgtgtggtttcagcgcagcatggctgtggtcatccgtttgcaaggtctcccaattgtggcggggaccatggacattcgccacttcttctctggattgaccattcctgatgggggcgtgcatattgtagggggtgaactgggtgaggctttcatcgtttttgccactgatgaagatgcaaggcttggtatgatgcgcacaggtggtacaattaaagggtcaaaagtaacactattgttgagtagtaagacggaaatgcagaatatgattgaactgagtcgtaggcgttttgaaactgccaacttagatataccaccagcaaatgccagtagatcaggaccaccacctagctcaggaatgagtagcagggtaaacttgcccacaacagtatccaactttaataatccatcacccagtgtagttactgccaccacttctgttcatgaaagcaacaaaaacatacagacattttccacagccagcgtaggaacagctcctccaaatatgggggcttcctttgggagcccaacgtttagctcaactgttccaagcacagcctctccaatgaacacagtcccgccgccaccaattcctccaattccagcgatgccatctctgccaccaatgccatccattcccccaattccagttcctcctccagtacctacattgcctcctgtgcctcctgtgcccccgattcccccagttccttctgtgccacccatgaccccactgccacccatgtcgggcatgccgcccttgaatccgccacctgtggcacctctacctgctggaatgaatggctctggagcacctatgaatttgaacaataatctgaatcctatgtttcttggtccgttgaatcctgttaaccctatccagatgaactctcagagcagtgtgaagccactccccatcaaccctgatgatctgtatgtcagtgtgcatggaatgcccttttctgcaatggaaaatgatgtcagagatttttttcatgggctccgtgttgatgcagtgcatttgttgaaagatcatgtaggtcgaaataatgggaatggattggttaagtttctctcccctcaagatacatttgaagctttgaaacgaaacagaatgctgatgattcaacgctatgtggaagttagccctgccacagaaagacagtgggtagctgctggaggccatatcacttttaagcaaaatatgggaccttctggacaaactcatccccctcctcagacacttcccaggtcaaaatcgcccagtgggcagaaaagatcaaggtcaagatcaccacatgaggctggtttttgtgtttacttgaaagggctaccatttgaagcagaaaacaaacatgtcattgatttttttaaaaagctggatattgtggaagatagtatttatatagcttatggacccaatgggaaagcaactggcgaaggctttgtagagttcagaaatgaggctgactataaggctgctctgtgtcgtcataaacagtacatgggcaatcgctttattcaagttcatccaattactaagaaaggtatgctagaaaagatagatatgattcgaaaaagactgcagaacttcagctatgaccagagggaaatgatactaaatccagagggggatgtcaactctgccaaagtctgtgcccacataacaaatattccattcagcattacaaagatggatgttcttcagttcctagaaggaatcccagtggatgaaaatgctgtacatgttcttgttgataacaatgggcaaggtctaggacaggcattggttcagtttaaaaatgaagatgatgcacatggcccactgcgtgaccttggttcagctgtccatttcctgtgaccatctcattgacaaggacatcggctccaagtctgacccactctgcgtccttttacaggatgtgggagggggcagctgggctgagcttggccggactgaacgggtgcggaactgctcaagccctgagttctccaagactctacagcttgagtaccgctttgagacagtccagaagctacgctttggaatctatgacatagacaacaagacgccagagctgagggatgatgacttcctagggggtgctgagtgttccctaggacagattgtgtccagccaggtactgactctccccttgatgctgaagcctggaaaacctgctgggcgggggaccatcacggtctcagctcaggaattaaaggacaatcgtgtagtaaccatggaggtagaggccagaaacctagataagaaggacttcctgggaaaatcagatccatttctggagttcttccgccagggtgatgggaaatggcacctggtgtacagatctgaggtcatcaagaacaacctgaaccctacatggaagcgtttctcagtccccgttcagcatttctgtggtgggaaccccagcacacccatccaggtgcaatgctccgattatgacagtgacgggtcacatgatctcatcggtaccttccacaccagcttggcccagctgcaggcagtcccggctgagtttgaatgcatccaccctgagaagcagcagaaaaagaaaagctacaagaactctggaactatccgtgtcaagatttgtcgggtagaaacagagtactcctttctggactatgtgatgggaggctgtcagatcaacttcactgtgggcgtggacttcactggctccaatggagacccctcctcacctgactccctacactacctgagtccaacaggggtcaatgagtacctgatggcactgtggagtgtgggcagcgtggttcaggactatgactcagacaagctgttccctgcatttggatttggggcccaggttccccctgactggcaggtctcgcatgaatttgccttgaatttcaaccccagtaacccctactgtgcaggcatccagggcattgtggatgcctaccgccaagccctgccccaagttcgcctctatggccctaccaactttgcacccatcatcaaccatgtggccaggtttgcagcccaggctgcacatcaggggactgcctcgcaatacttcatgctgttgctgctgactgatggtgctgtgacggatgtggaagccacacgtgaggctgtggtgcgtgcctcgaacctgcccatgtcagtgatcattgtgggtgtgggtggtgctgactttgaggccatggagcagctggacgctgatggtggacccctgcatacacgttctgggcaggctgctgcccgcgacattgtgcagtttgtacctacggcgggtcgaatgcccggggggctgggccccgggtcccaatgccaccgggtccn

SEQ ID NO: 446109 - DNA, 4143 bp, Homo sapiens
ctcgacgagccggactttctgtgacaacgtgcgacacggacggctggctggcctgcgctcgcggcatccaggcgacagctcgatatcgcggacatgagaggcccgtggctgcgttgggctccgggaagccgttcgggctggggctgtcggccgcggggcggaggcactcgcgcggggggggtaattcggggtctgggttctggtgccgcgcagctttccccgtctaaaagttggttttaattggttgcccacaggattgacttggcctctacttcttgttaaggaaattcatctcttgttttatcaggtgtgtgtggtttcagcgcagcatggctgtggtcatccgtttgcaaggtctcccaattgtggcggggaccatggacattcgccacttcttctctggattgaccattcctgatgggggcgtgcatattgtagggggtgaactgggtgaggctttcatcgtttttgccactgatgaagatgcaaggcttggtatgatgcgcacaggtggtacaattaaagggtcaaaagtaacactattgttgagtagtaagacggaaatgcagaatatgattgaactgagtcgtaggcgttttgaaactgccaacttagatataccaccagcaaatgccagtagatcaggaccaccacctagctcaggaatgagtagcagggtaaacttgcccacaacagtatccaactttaataatccatcacccagtgtagttactgccaccacttctgttcatgaaagcaacaaaaacatacagacattttccacagccagcgtaggaacagctcctccaaatatgggggcttcctttgggagcccaacgtttagctcaactgttccaagcacagcctctccaatgaacacagtcccgccgccaccaattcctccaattccagcgatgccatctctgccaccaatgccatccattcccccaattccagttcctcctccagtacctacattgcctcctgtgcctcctgtgcccccgattcccccagttccttctgtgccacccatgaccccactgccacccatgtcgggcatgccgcccttgaatccgccacctgtggcacctctacctgctggaatgaatggctctggagcacctatgaatttgaacaataatctgaatcctatgtttcttggtccgttgaatcctgttaaccctatccagatgaactctcagagcagtgtgaagccactccccatcaaccctgatgatctgtatgtcagtgtgcatggaatgcccttttctgcaatggaaaatgatgtcagagatttttttcatgggctccgtgttgatgcagtgcatttgttgaaagatcatgtaggtcgaaataatgggaatggattggttaagtttctctcccctcaagatacatttgaagctttgaaacgaaacagaatgctgatgattcaacgctatgtggaagttagccctgccacagaaagacagtgggtagctgctggaggccatatcacttttaagcaaaatatgggaccttctggacaaactcatccccctcctcagacacttcccaggtcaaaatcgcccagtgggcagaaaagatcaaggtcaagatcaccacatgaggctggtttttgtgtttacttgaaagggctaccatttgaagcagaaaacaaacatgtcattgatttttttaaaaagctggatattgtggaagatagtatttatatagcttatggacccaatgggaaagcaactggcgaaggctttgtagagttcagaaatgaggctgactataaggctgctctgtgtcgtcataaacagtacatgggcaatcgctttattcaagttcatccaattactaagaaaggtatgctagaaaagatagatatgattcgaaaaagactgcagaacttcagctatgaccagagggaaatgatactaaatccagagggggatgtcaactctgccaaagtctgtgcccacataacaaatattccattcagcattacaaagatggatgttcttcagttcctagaaggaatcccagtggatgaaaatgctgtacatgttcttgttgataacaatgggcaaggtctaggacaggcattggttcagtttaaaaatgaagatgatgcacatggcccactgcgtgaccttggttcagctgtccatttcctgtgaccatctcattgacaaggacatcggctccaagtctgacccactctgcgtccttttacaggatgtgggagggggcagctgggctgagcttggccggactgaacgggtgcggaactgctcaagccctgagttctccaagactctacagcttgagtaccgctttgagacagtccagaagctacgctttggaatctatgacatagacaacaagacgccagagctgagggatgatgacttcctagggggtgctgagtgttccctaggacagattgtgtccagccaggtactgactctccccttgatgctgaagcctggaaaacctgctgggcgggggaccatcacggtctcagctcaggaattaaaggacaatcgtgtagtaaccatggaggtagaggccagaaacctagataagaaggacttcctgggaaaatcagatccatttctggagttcttccgccagggtgatgggaaatggcacctggtgtacagatctgaggtcatcaagaacaacctgaaccctacatggaagcgtttctcagtccccgttcagcatttctgtggtgggaaccccagcacacccatccaggtgcaatgctccgattatgacagtgacgggtcacatgatctcatcggtaccttccacaccagcttggcccagctgcaggcagtcccggctgagtttgaatgcatccaccctgagaagcagcagaaaaagaaaagctacaagaactctggaactatccgtgtcaagatttgtcgggtagaaacagagtactcctttctggactatgtgatgggaggctgtcagatcaacttcactgtgggcgtggacttcactggctccaatggagacccctcctcacctgactccctacactacctgagtccaacaggggtcaatgagtacctgatggcactgtggagtgtgggcagcgtggttcaggactatgactcagacaagctgttccctgcatttggatttggggcccaggttccccctgactggcaggtctcgcatgaatttgccttgaatttcaaccccagtaacccctactgtgcaggcatccagggcattgtggatgcctaccgccaagccctgccccaagttcgcctctatggccctaccaactttgcacccatcatcaaccatgtggccaggtttgcagcccaggctgcacatcaggggactgcctcggacatgaatgggcttgtccccagcaatacttcatgctgttgctgctgactgatggtgctgtgacggatgtggaagccacacgtgaggctgtggtgcgtgcctcgaacctgcccatgtcagtgatcattgtgggtgtgggtggtgctgactttgaggccatggagcagctggacgctgatggtggacccctgcatacacgttctgggcaggctgctgcccgcgacattgtgcagtttgtaccctaccgccggttccagaatgtgagtaggtgcaaatttgatctgggagtttaccctttcacctttccctgatgtgagtagggttgaggcccaagggatgctcaccttttcctctaagcctgggatatggttgggttcttgggcatgaaatacagactttgggcagctgttctgggccaccactgacttttcccttttcttggcaggcccctcgggaggcattggcacagaccgtgctcgcagaagtgcccacacaactggtctcatacttcagggcccagggttgggccccgctcaagccacttccaccctcagccaaggatcctgcacaggccccccaggcctaggttcccttggaggctgtggcaagtcctcaatcctgtgtcccagaggtccctctgggccacaacccaacccttctcactctcctcagtgctagcactttgtattttttgatacttttatacttgtttctgcttttgctgctcttgatcccacctttgctcctgacaaccctcattcaataaagaccagtgaagaccaa

SEQ ID NO: 446110 - DNA, 6548 bp, Homo sapiens
ctcgacgagccggactttctgtgacaacgtgcgacacggacggctggctggcctgcgctcgcggcatccaggcgacagctcgatatcgcggacatgagaggcccgtggctgcgttgggctccgggaagccgttcgggctggggctgtcggccgcggggcggaggcactcgcgcggggggggtaattcggggtctgggttctggtgccgcgcagctttccccgtctaaaagttggttttaattggttgcccacaggattgacttggcctctacttcttgttaaggaaattcatctcttgttttatcaggtgtgtgtggtttcagcgcagcatggctgtggtcatccgtttgcaaggtctcccaattgtggcggggaccatggacattcgccacttcttctctggattgaccattcctgatgggggcgtgcatattgtagggggtgaactgggtgaggctttcatcgtttttgccactgatgaagatgcaaggcttggtatgatgcgcacaggtggtacaattaaagggtcaaaagtaacactattgttgagtagtaagacggaaatgcagaatatgattgaactgagtcgtaggcgttttgaaactgccaacttagatataccaccagcaaatgccagtagatcaggaccaccacctagctcaggaatgagtagcagggtaaacttgcccacaacagtatccaactttaataatccatcacccagtgtagttactgccaccacttctgttcatgaaagcaacaaaaacatacagacattttccacagccagcgtaggaacagctcctccaaatatgggggcttcctttgggagcccaacgtttagctcaactgttccaagcacagcctctccaatgaacacagtcccgccgccaccaattcctccaattccagcgatgccatctctgccaccaatgccatccattcccccaattccagttcctcctccagtacctacattgcctcctgtgcctcctgtgcccccgattcccccagttccttctgtgccacccatgaccccactgccacccatgtcgggcatgccgcccttgaatccgccacctgtggcacctctacctgctggaatgaatggctctggagcacctatgaatttgaacaataatctgaatcctatgtttcttggtccgttgaatcctgttaaccctatccagatgaactctcagagcagtgtgaagccactccccatcaaccctgatgatctgtatgtcagtgtgcatggaatgcccttttctgcaatggaaaatgatgtcagagatttttttcatgggctccgtgttgatgcagtgcatttgttgaaagatcatgtaggtcgaaataatgggaatggattggttaagtttctctcccctcaagatacatttgaagctttgaaacgaaacagaatgctgatgattcaacgctatgtggaagttagccctgccacagaaagacagtgggtagctgctggaggccatatcacttttaagcaaaatatgggaccttctggacaaactcatccccctcctcagacacttcccaggtcaaaatcgcccagtgggcagaaaagatcaaggtcaagatcaccacatgaggctggtttttgtgtttacttgaaagggctaccatttgaagcagaaaacaaacatgtcattgatttttttaaaaagctggatattgtggaagatagtatttatatagcttatggacccaatgggaaagcaactggcgaaggctttgtagagttcagaaatgaggctgactataaggctgctctgtgtcgtcataaacagtacatgggcaatcgctttattcaagttcatccaattactaagaaaggtatgctagaaaagatagatatgattcgaaaaagactgcagaacttcagctatgaccagagggaaatgatactaaatccagagggggatgtcaactctgccaaagtctgtgcccacataacaaatattccattcagcattacaaagatggatgttcttcagttcctagaaggaatcccagtggatgaaaatgctgtacatgttcttgttgataacaatgggcaaggtctaggacaggcattggttcagaatgcccaatgcgggactgcccggtgtgggactgcccagtgcaggacttcccggtgcaggcctgcccagcacaggactgcctggttcagcaataaccagtgcaggactgcctggtgcgggaatgcccagtgcaggaatacctagtgcaggaggtgaagagcatgccttcctgactgtaggatcaaaggaagccaataatgggcctccatttaactttcctggtaattttggtggatcaaatgcctttgggccaccaatccctcctccaggattaggaggcggggcctttggtgatgctaggcctggtatgccttcagttggaaacagtggtttgcctggtctaggactggatgttccgggttttggaggtggaccaaacaatttaagtgggccatcgggatttggagggggccctcagaattttggaaatggccctggtagcttaggcggtcccccggggtttggaagtggccctcctggtcttggaagtgcccctgggcatttgggtgggccaccagcttttgggcctggccccggccccggccccggccctggcccaatccatattggtggtccccctggctttgcatctagttctggaaaaccaggaccgacagtaattaaagtgcaaaacatgccctttactgtgtctattgatgagattttagatttcttttatggctatcaagtaatcccaggctcagtgtgtttaaaatacaatgaaaaaggtatgcccacaggtgaagccatggtggcctttgagtctcgggatgaagccacagctgctgtcattgacttaaatgacaggcctataggttcaagaaaagtaaaacttgtattagggtagccattcacatcattttttatagggtagatcttcatattgctgtgattaatgcatccagattgttttcctagtatttccaggttagaacctgtggattgtttcaattgcatatagcttggtttccataacatagagcattggttgactgtttacagaagactcactcaccaggataaacattgctgtatgttacagtaaagctatctggagagaacacataaatgattttggcataccattagagaaaccatttgtaaaactcaaatgaccacataaagcttatcaaggagtctagattggttttgttttataccatatgggatgaagaaaatagaaatgtcagtagaactcattgagggtgctcttgccagctgctgaaaatagaagttggctactctcagaatttggtttaaagctggacagatttgctttgttatagggtaaagctttgtctaaagtcctcattttcttttaaaattgaataaaatttctgtatacagattcattgtatgtacctttattgcttcttaagggtccttgctgtatagacagtcctgcttcagaagttgctgctttgtttgtctaattgactcatttgtaaatgagcagaactgttttgttggtttttttccctaaatataaaagtccacacttcgtttgtgctataacctcaaactttgatttctaatgtcacacttaaaactgtgtggaataagacttttgccataaaaataaactatggagtcctttatctaccagagcctttttggtttgaccgccacgatttaggttagtcagtttaaaaattgttcatgttgtttggatggtatcgaaaaccagaaaccacttttaataatgtgtttaagatacttgatttgaagtccttttcatatggactaattgtagtatcaatttcctcctgtcccgattatgtgaaattttggcctttaaacaaagaggggcccattcataagaaagtgttatatctaggtttttaaaactgaagttgaaattatctttgttagcagtagtagtatagaataaaagatccgtatgctggttcgtagattgatacgtgttagtcctgttatttggaggctttttggcatagttgttcgatcaggagcctgtttactaaaagtcttcatacagagtacaagtgcagccgccagaggagaaaattgagattcttgaccctttcatactcttttctttggtattcaggacactaaggcaggaggaccacatgagttctggttggtaagtgtccttgtcatgaaaacacttgccttacaaggctctaattatgatttccctagtcagtgctctgaagatgtgtcacattatattataaacaatacggaaggggagataggtgagatgatatgaaaaacaaattttctcactgtcataaaaggctctaattatggttactttccttgtgatgaaaaacttggccttacagggctctagttatggttactttccctagtcaatgctctgaaaatgtgtcacattataaacaatacagaaggagagatagatgagagatcatgaaaaccaaattttatcttttacatggcccctttgtcttcgtttgaaacatccccaacatttcctacaaatcagcgtagttacaaaggggtcagtcttttaaaataagtatttcctattaaactatatatatatacagtgcctttttggtgttgtgagtcagtggaacactgaaatacagcggttgtgtaatttaagagtggcaacagtttcatttgataagatttgaaaaggctttttatcactacaatcttagaggattgacagtacaggatttttgtttaagagaaggattgtttagactcaagaggtgactatgttgtgggtcttttgataattcatgaatacagatttgctttgaccgatcactagatactgcctcctcaatttcaaaagcaatataacgtttgtatatgctgtttaatttaagttaatgttaagtaatcatttctcattccaaagacaatgcaaaaaacttcagcactgcttgagagttgtatttcagccacagatattttctccattggaaagctattttcattttagaaaaatgggttgtttgaagatgaaagtcttttatcttttttcacaatttattttggttatatgttcgtacattcttattaaatatttcatacactttattgcaactactttgttatttctacatcttagataaatgctgaaaaggaaaacgatttcattgttcatctaattaaataaattaaaagagcggtttgtgtagaaattggagagaactatgttttatatgaatcacaacagtgctcgttgtggactgtaattaaatgctttgccctctggaacttgatttttgtgtatctgagatttattaacagtgctaactgctaaggatactgtttatcttgttctgggcattggagtttcagtttttaaaaaattcttgaaaatgtattctgtgaaactactcatacctctcttcctgcgaattttctcctaagaactaggtttggggtagaaatgaattgacattattttctcatttgctttgtatggtatgaaggatttgtaaagctttgctcaaagttgtgtgcatttgtaaacactatcatgatattttcaattttatgtgtaaattttattgtctgtttttggtgactctgacattaatggaagagaatattttccattagatttaattttttttcctctcccttctgattttttttttattggtgttcatttttcttttgatttaaaggattagagaaatctacaaatgtatgtcataaataagcaaatttgtaaacttttctgaactttagtgaaacatttagttcacaagcataatttggaggtgtgttctgtgtttacacagtagtttggatgtacaattattattagtggctttttaaaaaatgaaacagtgttaagtgaaatgtagttcctagctttgtactccaagttgtcaaagcatcaacaatgaaaattcgattaggaaactttatttaaaatttcaggtagtaatattcagtgtagttaaggccagtcttaacccactggatgaaaatctaggactgtatggaagtaagcaaacattacatttttaggtggaaatagtcagccttgcataaaaacaaggatgcgtgaaagccttaaattccagctcccttttactggagtctgtggttgtgtacaggtatgggccaagtgtaaaatctcatcaattttaagaacactcgggaaatgagtaaagaaaatgtaaaattgctgctagtcaaatcttttggaaagaatttctggaagtggtcactttaaaaattattttccacccttgcaaaattgccacatttaaattgttttactggcagttctatagtagtccagactttagaaaccaaacacaacaaaatggcttgttgccaatatggccacaacattgccagcaaatactgccttggcatcactcagcagaggtttttgtttataaagatgaagtcttgaatactgttcaataaacttgtcaaaaaataaaacaggctgatgcttttaatgctttaactgca

SEQ ID NO: 446111 - DNA, 3377 bp, Homo sapiens
ctcgacgagccggactttctgtgacaacgtgcgacacggacggctggctggcctgcgctcgcggcatccaggcgacagctcgatatcgcggacatgagaggcccgtggctgcgttgggctccgggaagccgttcgggctggggctgtcggccgcggggcggaggcactcgcgcggggggggtaattcggggtctgggttctggtgccgcgcagctttccccgtctaaaagttggttttaattggttgcccacaggattgacttggcctctacttcttgttaaggaaattcatctcttgttttatcaggtgtgtgtggtttcagcgcagcatggctgtggtcatccgtttgcaaggtctcccaattgtggcggggaccatggacattcgccacttcttctctggattgaccattcctgatgggggcgtgcatattgtagggggtgaactgggtgaggctttcatcgtttttgccactgatgaagatgcaaggcttggtatgatgcgcacaggtggtacaattaaagggtcaaaagtaacactattgttgagtagtaagacggaaatgcagaatatgattgaactgagtcgtaggcgttttgaaactgccaacttagatataccaccagcaaatgccagtagatcaggaccaccacctagctcaggaatgagtagcagggtaaacttgcccacaacagtatccaactttaataatccatcacccagtgtagttactgccaccacttctgttcatgaaagcaacaaaaacatacagacattttccacagccagcgtaggaacagctcctccaaatatgggggcttcctttgggagcccaacgtttagctcaactgttccaagcacagcctctccaatgaacacagtcccgccgccaccaattcctccaattccagcgatgccatctctgccaccaatgccatccattcccccaattccagttcctcctccagtacctacattgcctcctgtgcctcctgtgcccccgattcccccagttccttctgtgccacccatgaccccactgccacccatgtcgggcatgccgcccttgaatccgccacctgtggcacctctacctgctggaatgaatggctctggagcacctatgaatttgaacaataatctgaatcctatgtttcttggtccgttgaatcctgttaaccctatccagatgaactctcagagcagtgtgaagccactccccatcaaccctgatgatctgtatgtcagtgtgcatggaatgcccttttctgcaatggaaaatgatgtcagagatttttttcatgggctccgtgttgatgcagtgcatttgttgaaagatcatgtaggtcgaaataatgggaatggattggttaagtttctctcccctcaagatacatttgaagctttgaaacgaaacagaatgctgatgattcaacgctatgtggaagttagccctgccacagaaagacagtgggtagctgctggaggccatatcacttttaagcaaaatatgggaccttctggacaaactcatccccctcctcagacacttcccaggtcaaaatcgcccagtgggcagaaaagatcaaggtcaagatcaccacatgaggctggtttttgtgtttacttgaaagggctaccatttgaagcagaaaacaaacatgtcattgatttttttaaaaagctggatattgtggaagatagtatttatatagcttatggacccaatgggaaagcaactggcgaaggctttgtagagttcagaaatgaggctgactataaggctgctctgtgtcgtcataaacagtacatgggcaatcgctttattcaagttcatccaattactaagaaaggtatgctagaaaagatagatatgattcgaaaaagactgcagaacttcagctatgaccagagggaaatgatactaaatccagagggggatgtcaactctgccaaagtctgtgcccacataacaaatattccattcagcattacaaagatggatgttcttcagttcctagaaggaatcccagtggatgaaaatgctgtacatgttcttgttgataacaatgggcaaggtctaggacaggcattggttcagtttaaaaatgaagatgatgcacatggcccactgcgtgaccttggttcagctgtccatttcctgtgaccatctcattgacaaggacatcggctccaagtctgacccactctgcgtccttttacaggatgtgggagggggcagctgggctgagcttggccggactgaacgggtgcggaactgctcaagccctgagttctccaagactctacagcttgagtaccgctttgagacagtccagaagctacgctttggaatctatgacatagacaacaagacgccagagctgagggatgatgacttcctagggggtgctgagtgttccctaggacagattgtgtccagccaggtactgactctccccttgatgctgaagcctggaaaacctgctgggcgggggaccatcacggtctcagctcaggaattaaaggacaatcgtgtagtaaccatggaggtagaggccagaaacctagataagaaggacttcctgggaaaatcagatccatttctggagttcttccgccagggtgatgggaaatggcacctggtgtacagatctgaggtcatcaagaacaacctgaaccctacatggaagcgtttctcagtccccgttcagcatttctgtggtgggaaccccagcacacccatccaggtgcaatgctccgattatgacagtgacgggtcacatgatctcatcggtaccttccacaccagcttggcccagctgcaggcagtcccggctgagtttgaatgcatccaccctgagaagcagcagaaaaagaaaagctacaagaactctggaactatccgtgtcaagatttgtcgggtagaaacagagtactcctttctggactatgtgatgggaggctgtcagatcaacttcactgtgggcgtggacttcactggctccaatggagacccctcctcacctgactccctacactacctgagtccaacaggggtcaatgagtacctgatggcactgtggagtgtgggcagcgtggttcaggactatgactcagacaagctgttccctgcatttggatttggggcccaggttccccctgactggcaggcctaggttcccttggaggctgtggcaagtcctcaatcctgtgtcccagaggtccctctgggccacaacccaacccttctcactctcctcagtgctagcactttgtattttttgatacttttatacttgtttctgcttttgctgctcttgatcccacctttgctcctgacaaccctcattcaataaagaccagtgaagaccaa

SEQ ID NO: 446112 - DNA, 4292 bp, Homo sapiens
ctcgacgagccggactttctgtgacaacgtgcgacacggacggctggctggcctgcgctcgcggcatccaggcgacagctcgatatcgcggacatgagaggcccgtggctgcgttgggctccgggaagccgttcgggctggggctgtcggccgcggggcggaggcactcgcgcggggggggtaattcggggtctgggttctggtgccgcgcagctttccccgtctaaaagttggttttaattggttgcccacaggattgacttggcctctacttcttgttaaggaaattcatctcttgttttatcaggtgtgtgtggtttcagcgcagcatggctgtggtcatccgtttgcaaggtctcccaattgtggcggggaccatggacattcgccacttcttctctggattgaccattcctgatgggggcgtgcatattgtagggggtgaactgggtgaggctttcatcgtttttgccactgatgaagatgcaaggcttggtatgatgcgcacaggtggtacaattaaagggtcaaaagtaacactattgttgagtagtaagacggaaatgcagaatatgattgaactgagtcgtaggcgttttgaaactgccaacttagatataccaccagcaaatgccagtagatcaggaccaccacctagctcaggaatgagtagcagggtaaacttgcccacaacagtatccaactttaataatccatcacccagtgtagttactgccaccacttctgttcatgaaagcaacaaaaacatacagacattttccacagccagcgtaggaacagctcctccaaatatgggggcttcctttgggagcccaacgtttagctcaactgttccaagcacagcctctccaatgaacacagtcccgccgccaccaattcctccaattccagcgatgccatctctgccaccaatgccatccattcccccaattccagttcctcctccagtacctacattgcctcctgtgcctcctgtgcccccgattcccccagttccttctgtgccacccatgaccccactgccacccatgtcgggcatgccgcccttgaatccgccacctgtggcacctctacctgctggaatgaatggctctggagcacctatgaatttgaacaataatctgaatcctatgtttcttggtccgttgaatcctgttaaccctatccagatgaactctcagagcagtgtgaagccactccccatcaaccctgatgatctgtatgtcagtgtgcatggaatgcccttttctgcaatggaaaatgatgtcagagatttttttcatgggctccgtgttgatgcagtgcatttgttgaaagatcatgtaggtcgaaataatgggaatggattggttaagtttctctcccctcaagatacatttgaagctttgaaacgaaacagaatgctgatgattcaacgctatgtggaagttagccctgccacagaaagacagtgggtagctgctggaggccatatcacttttaagcaaaatatgggaccttctggacaaactcatccccctcctcagacacttcccaggtcaaaatcgcccagtgggcagaaaagatcaaggtcaagatcaccacatgaggctggtttttgtgtttacttgaaagggctaccatttgaagcagaaaacaaacatgtcattgatttttttaaaaagctggatattgtggaagatagtatttatatagcttatggacccaatgggaaagcaactggcgaaggctttgtagagttcagaaatgaggctgactataaggctgctctgtgtcgtcataaacagtacatgggcaatcgctttattcaagttcatccaattactaagaaaggtatgctagaaaagatagatatgattcgaaaaagactgcagaacttcagctatgaccagagggaaatgatactaaatccagagggggatgtcaactctgccaaagtctgtgcccacataacaaatattccattcagcattacaaagatggatgttcttcagttcctagaaggaatcccagtggatgaaaatgctgtacatgttcttgttgataacaatgggcaaggtctaggacaggcattggttcagtttaaaaatgaagatgatgcacatggcccactgcgtgaccttggttcagctgtccatttcctgtgaccatctcattgacaaggacatcggctccaagtctgacccactctgcgtccttttacaggatgtgggagggggcagctgggctgagcttggccggactgaacgggtgcggaactgctcaagccctgagttctccaagactctacagcttgagtaccgctttgagacagtccagaagctacgctttggaatctatgacatagacaacaagacgccagagctgagggatgatgacttcctagggggtgctgagtgttccctaggacagattgtgtccagccaggtactgactctccccttgatgctgaagcctggaaaacctgctgggcgggggaccatcacggtctcagctcaggaattaaaggacaatcgtgtagtaaccatggaggtagaggccagaaacctagataagaaggacttcctgggaaaatcagatccatttctggagttcttccgccagggtgatgggaaatggcacctggtgtacagatctgaggtcatcaagaacaacctgaaccctacatggaagcgtttctcagtccccgttcagcatttctgtggtgggaaccccagcacacccatccaggtgcaatgctccgattatgacagtgacgggtcacatgatctcatcggtaccttccacaccagcttggcccagctgcaggcagtcccggctgagtttgaatgcatccaccctgagaagcagcagaaaaagaaaagctacaagaactctggaactatccgtgtcaagatttgtcgggtagaaacagagtactcctttctggactatgtgatgggaggctgtcagatcaacttcactgtgggcgtggacttcactggctccaatggagacccctcctcacctgactccctacactaccacacaactggtctcatacttcagggcccagggttgggccccgctcaagccacttccaccctcagccaaggatcctgcacaggccccccaggcctaggttcccttggaggctgtggcaagtcctcaatcctgtgtcccagaggtccctctgggccacaacccaacccttctcactctcctcagtgctagcactttgtattttttgatacttttatacttgtttctgcttttgctgctcttgatcccacctttgctcctgacaaccctcattcaataaagaccagtgaagaccaaaaaaaaaaaaaaaaaaaaaaaaaaaaaaaaaaaaaaaaaaaaaaaaaaaaaaaaaaaaaaaaaagagagagagggggggcgcgcgcccaaaaatatatcccccgcggggggcgcgccccttgcgcgcgcgcgcccccccgacttttgtgctgcgaacaagaaggggcgccccacaagaagggaggcccgcttattatacccgaccgagcgagcgcggagcgggcgccgcgttaaaaacaagcgcgcgcacaggggaaaaacacgcgcccacagcgcggcagcaacctccgtgggagaagagaaccacccccacacgcggggggggaggcgcgaccaccaacctatgtgggggcgccccactcctcctcctcaccagacagagatttatttacaccccccactagggggagaacaatatctacaacactctcttctacacgggggtactacataaggggtggtgtacaacaccaaggcgcccgataatatccccctccttcgcgcctagcgaaaacatttttcgccccccaaccgacgagtcatctagatatcgcgaggaggacacaaatatttttttaacccacgggggggtcttgttttttatataataaaaatctcgcgcagtgacgacccagtcagaactacagagcaaccaggcccacagacacacgccagcgcgacgaggactgaccactcacaaacagaccgaaccaaccgagcacacaagagtgctacgacgccgattgacgtacctaggaccaagaagcaaagaccgctctacccacctcacagctcgctaagccaagggacacagagtcggagcactgagacgggatgacagcggagaacactacgcagcacgtcaggcacacgaaaacccacaaagccacacaaactacaacacacacgaggcacagaaaaagccaacagcaaaacaacacccacagaaccca

SEQ ID NO: 446113 - DNA, 2676 bp, Homo sapiens
  misc_feature (2621)..(2621): n is a, c, g, or t
  misc_feature (2653)..(2653): n is a, c, g, or t
ctcgacgagccggactttctgtgacaacgtgcgacacggacggctggctggcctgcgctcgcggcatccaggcgacagctcgatatcgcggacatgagaggcccgtggctgcgttgggctccgggaagccgttcgggctggggctgtcggccgcggggcggaggcactcgcgcggggggggtaattcggggtctgggttctggtgccgcgcagctttccccgtctaaaagttggttttaattggttgcccacaggattgacttggcctctacttcttgttaaggaaattcatctcttgttttatcaggtgtgtgtggtttcagcgcagcatggctgtggtcatccgtttgcaaggtctcccaattgtggcggggaccatggacattcgccacttcttctctggattgaccattcctgatgggggcgtgcatattgtagggggtgaactgggtgaggctttcatcgtttttgccactgatgaagatgcaaggcttggtatgatgcgcacaggtggtacaattaaagggtcaaaagtaacactattgttgagtagtaagacggaaatgcagaatatgattgaactgagtcgtaggcgttttgaaactgccaacttagatataccaccagcaaatgccagtagatcaggaccaccacctagctcaggaatgagtagcagggtaaacttgcccacaacagtatccaactttaataatccatcacccagtgtagttactgccaccacttctgttcatgaaagcaacaaaaacatacagacattttccacagccagcgtaggaacagctcctccaaatatgggggcttcctttgggagcccaacgtttagctcaactgttccaagcacagcctctccaatgaacacagtcccgccgccaccaattcctccaattccagcgatgccatctctgccaccaatgccatccattcccccaattccagttcctcctccagtacctacattgcctcctgtgcctcctgtgcccccgattcccccagttccttctgtgccacccatgaccccactgccacccatgtcgggcatgccgcccttgaatccgccacctgtggcacctctacctgctggaatgaatggctctggagcacctatgaatttgaacaataatctgaatcctatgtttcttggtccgttgaatcctgttaaccctatccagatgaactctcagagcagtgtgaagccactccccatcaaccctgatgatctgtatgtcagtgtgcatggaatgcccttttctgcaatggaaaatgatgtcagagatttttttcatgggctccgtgttgatgcagtgcatttgttgaaagatcatgtaggtcgaaataatgggaatggattggttaagtttctctcccctcaagatacatttgaagctttgaaacgaaacagaatgctgatgattcaacgctatgtggaagttagccctgccacagaaagacagtgggtagctgctggaggccatatcacttttaagcaaaatatgggaccttctggacaaactcatccccctcctcagacacttcccaggtcaaaatcgcccagtgggcagaaaagatcaaggtcaagatcaccacatgaggctggtttttgtgtttacttgaaagggctaccatttgaagcagaaaacaaacatgtcattgatttttttaaaaagctggatattgtggaagatagtatttatatagcttatggacccaatgggaaagcaactggcgaaggctttgtagagttcagaaatgaggctgactataaggctgctctgtgtcgtcataaacagtacatgggcaatcgctttattcaagttcatccaattactaagaaaggtatgctagaaaagatagatatgattcgaaaaagactgcagaacttcagctatgaccagagggaaatgatactaaatccagagggggatgtcaactctgccaaagtctgtgcccacataacaaatattccattcagcattacaaagatggatgttcttcagttcctagaaggaatcccagtggatgaaaatgctgtacatgttcttgttgataacaatgggcaaggtctaggacaggcattggttcagtttaaaaatgaagatgatgcacgtaagtctgaacgcttacaccgtaaaaaacttaatgggagagaagcttttgttcatgtagttaccctagaagatatgagagagattgagaaaaatccccctgcccaaggaaaaaagggattaaagatgcctgtgccaggtaatcctgcagttccaggaatgcccaatgcgggactgcccggtgtgggactgcccagtgcaggacttcccggtgcaggcctgcccagcacaggactgcctggttcagcaataaccagtgcaggactgcctggtgcgggaatgcccagtgcaggaatacctagtgcaggaggtgaagagcatgccttcctgactgtaggatcaaaggaagccaataatgggcctccatttaactttcctggtaattttggtggatcaaatgcctttgggccaccaatccctcctccaggattaggaggcggggcctttggtgatgctaggcctggtatgccttcagttggaaacagtggtttgcctgtntatgatgagtgacacataatggccatcgtaanactagcgtccccgggtcaggagg

SEQ ID NO: 446114 - DNA, 371 bp, Homo sapiens
agcggcgggaatcggtcacagaaatgagtcacaggtcatcagattttgccaagattattaacaatacagagaatcttgtgcgggaattgctgtaagttttaaaaagaccaaatcatgttacttttgttagatacttcctaaatctggatgtcttccagtattttctacactctattgtttgttcagaatatttcataatttaaaataatccttgtaagattctctccaattcactattagtacctaacgctttttatttgttccccatcccgtgtttatatgtttttgtttttattttatgtgatatttccaaagatttgaaatcattgtatctaggaatgatttttcagcactgtggcagttaaactggt

SEQ ID NO: 446115 - DNA, 3623 bp, Homo sapiens
gttcggggccggctgcagactctcaccgcagcggccaggaacgccagccgttcacgcgttcggtcctccttggctgactcaccgccctcgccgccgcaccatggacgcccccaggcaggtggtcaactttgggcctggtcccgccaagctgccgcactcagtgttgttagagatacaaaaggaattattagactacaaaggagttggcattagtgttcttgaaatgagtcacaggtcatcagattttgccaagattattaacaatacagagaatcttgtgcgggaattgctagctgttccagacaactataaggtgatttttctgcaaggaggtgggtgcggccagttcagtgctgtccccttaaacctcattggcttgaaagcaggaaggtgtgcggactatgtggtgacaggagcttggtcagctaaggccgcagaagaagccaagaagtttgggactataaatatcgttcaccctaaacttgggagttatacaaaaattccagatccaagcacctggaacctcaacccagatgcctcctacgtgtattattgcgcaaatgagacggtgcatggtgtggagtttgactttatacccgatgtcaagggagcagtactggtttgtgacatgtcctcaaacttcctgtccaagccagtggatgtttccaagtttggtgtgatttttgctggtgcccagaagaatgttggctctgctggggtcaccgtggtgattgtccgtgatgacctgctggggtttgccctccgagagtgcccctcggtcctggaatacaaggtgcaggctggaaacagctccttgtacaacacgcctccatgtttcagcatctacgtcatgggcttggttctggagtggattaaaaacaatggaggtgccgcggccatggagaagcttagctccatcaaatctcaaacaatttatgagattattgataattctcaaggattctacgtgtctgtgggaggcatccgggcctctctgtataatgctgtcacaattgaagacgttcagaagctggccgccttcatgaaaaaatttttggagatgcatcagctatgaacacatcctaaccaggatatactctgttcttgaacaacatacaaagtttaaagtaacttggggatggctacaaaaagttaacacagtatttttctcaaatgaacatgtttattgcagattcttcttttttgaaagaacaacagcaaaacatccacaactctgtaaagctggtgggacctaatgtcaccttaattctgacttgaactggaagcattttaagaaatcttgttgcttttctaacaaattcccgcgtattttgcctttgctgctactttttctagttagatttcaaacttgcctgtggacttaataatgcaagttgcgattaattatttctggagtcatgggaacacacagcacagagggtaggggggccctctaggtgctgaatctacacatctgtggggtctcctgggttcagcggctgttgattcaaggtcaacattgaccattggaggagtggtttaagagtgccaggcgaagggcaaactgtagatcgatctttatgctgttattacaggagaagtgacatactttatatatgtttatattagcaaggtctgtttttaataccatatactttatatttctatacatttatatttctaataatacagttatcactgatatatgtagacacttttagaatttattaaatccttgaccttgtgcattatagcattccattagcaagagttgtaccccctccccagtcttcgccttcctctttttaagctgttttatgaaaaagacctagaagttcttgattcatttttaccattctttccataggtagaagagaaagttgattggttggttgtttttcaattatgccattaaactaaacatttctgttaaattaccctatcctttgttctctactgttttctttgtaatgtatgactacgagagtgatactttgctgaaaagtctttcccctattgtttatctattgtcagtattttatgttgaatatgtaaagaacattaaagtcctaaacacggttctaagctaagtgaaggggaagatctgagagcgtgctgtttgtggctgttgatgcatattcgtgatgtaacaggtcctggggcctcactttaccccatttgtaaaatggggctaatgtcacctgcctcttacctacctcagagggatttggtgaagcaaactgttaatcttcgaaaacgaccatttcacttcttggatatcaagtgctaacccagtatgttcttcttttttatgtaagggacagctttctccacagagtcctttctgctggtgaggacagcatttctgagcagggctttgttctctatgtgcattaggacttttatcatgcccttgttctgtgtgtagttacttgacagcatcaaatgccgcctcttcctaatgtccttcaagttttcatgaactagcaaccccaccttccaccatggttctgggcgcctgattttgctgtgactcccagacccagccactgtttctgccaccctgtaacaggccattaaagctccccagtgttcagcctccttcactcccttgttttccctgttgctatgtgtcacctgggccctacagacaggggcacacgcttatggatgtgtgtaccattgagatgagaatgggtagatggaacggagaccatcaagccacacccccttcttaaaactggggacatgagcctgagcagaaagggtgaagaagagccatgggacacagagttgacccagccagggggaaagcccagctctctttaaaccagctaagccattccagtctcctgtgaagccaaaagggaccaggaaccgtgcaaaggaaactggaaacttttccccgctgggtagagcatgttgctgatactcttctgttttcaagggaaacaatcacattgtttgattccaaatggtaaatgaacactcactattcttcaggcttcagtaaatctttttttcttccttcatatatatatacacaacacacacacacatatgtatatctatacacacatgtgtgttgtgtatatgcatgtgtgtgtgtgcgtgtgtgtatagttttagctccaagccaagcaagtttgtgtttggatagaggggaacttaactattaactacaagttgtatgtctgtggtatcttgattttcccatttctaaagatgaatttcacaaagccataaagcgtgaaattagagctggacttaagactcattggccgaccatcctgtgtcctggcctggccctgcagtaagaagcgtgtctgggtctggagaagggtgcttccgagagtgtgcaggtggcccttccccttggaggcgagaagagagaatgtgctgtctatcttcctggttttcagtccacagagtcggtagaccaggggttacgtgactggggaaaatctcacatctccttgtctgaaaacatttcccctgctgttctctttctaacatgttgtggtaaatctgttcagatactgctcatctgactgttttgtacatgtgacaattgccttaaaacctagcacagtcctcagaaatgaataccgtgtttccactgg

SEQ ID NO: 446116 - DNA, 3754 bp, Homo sapiens
aacggcagtaactctcagcggttctaaggtagcgaggctgggtggcgcgcgttcggtcctccttggctgactcaccgccctcgccgccgcaccatggacgcccccaggcaggtggtcaactttgggcctggtcccgccaagctgccgcactcagtgttgttagagatacaaaaggaattattagactacaaaggagttggcattagtgttcttgaaatgagtcacaggtcatcagattttgccaagattattaacaatacagagaatcttgtgcgggaattgctagctgttccagacaactataaggtgatttttctgcaaggaggtgggtgcggccagttcagtgctgtccccttaaacctcattggcttgaaagcaggaaggtgtgcggactatgtggtgacaggagcttggtcagctaaggccgcagaagaagccaagaagtttgggactataaatatcgttcaccctaaacttgggagttatacaaaaattccagatccaagcacctggaacctcaacccagatgcctcctacgtgtattattgcgcaaatgagacggtgcatggtgtggagtttgactttatacccgatgtcaagggagcagtactggtttgtgacatgtcctcaaacttcctgtccaagccagtggatgtttccaagtttggtgtgatttttgctggtgcccagaagaatgttggctctgctggggtcaccgtggtgattgtccgtgatgacctgctggggtttgccctccgagagtgcccctcggtcctggaatacaaggtgcaggctggaaacagctccttgtacaacacgcctccatgtttcagcatctacgtcatgggcttggttctggagtggattaaaaacaatggaggtgccgcggccatggagaagcttagctccatcaaatctcaaacaatttatgagattattgataattctcaaggattctacgtttgtccagtggagccccaaaatagaagcaagatgaatattccattccgcattggcaatgccaaaggagatgatgctttagaaaaaagatttcttgataaagctcttgaactcaatatgttgtccttgaaagggcataggtctgtgggaggcatccgggcctctctgtataatgctgtcacaattgaagacgttcagaagctggccgccttcatgaaaaaatttttggagatgcatcagctatgaacacatcctaaccaggatatactctgttcttgaacaacatacaaagtttaaagtaacttggggatggctacaaaaagttaacacagtatttttctcaaatgaacatgtttattgcagattcttcttttttgaaagaacaacagcaaaacatccacaactctgtaaagctggtgggacctaatgtcaccttaattctgacttgaactggaagcattttaagaaatcttgttgcttttctaacaaattcccgcgtattttgcctttgctgctactttttctagttagatttcaaacttgcctgtggacttaataatgcaagttgcgattaattatttctggagtcatgggaacacacagcacagagggtaggggggccctctaggtgctgaatctacacatctgtggggtctcctgggttcagcggctgttgattcaaggtcaacattgaccattggaggagtggtttaagagtgccaggcgaagggcaaactgtagatcgatctttatgctgttattacaggagaagtgacatactttatatatgtttatattagcaaggtctgtttttaataccatatactttatatttctatacatttatatttctaataatacagttatcactgatatatgtagacacttttagaatttattaaatccttgaccttgtgcattatagcattccattagcaagagttgtaccccctccccagtcttcgccttcctctttttaagctgttttatgaaaaagacctagaagttcttgattcatttttaccattctttccataggtagaagagaaagttgattggttggttgtttttcaattatgccattaaactaaacatttctgttaaattaccctatcctttgttctctactgttttctttgtaatgtatgactacgagagtgatactttgctgaaaagtctttcccctattgtttatctattgtcagtattttatgttgaatatgtaaagaacattaaagtcctaaacacggttctaagctaagtgaaggggaagatctgagagcgtgctgtttgtggctgttgatgcatattcgtgatgtaacaggtcctggggcctcactttaccccatttgtaaaatggggctaatgtcacctgcctcttacctacctcagagggatttggtgaagcaaactgttaatcttcgaaaacgaccatttcacttcttggatatcaagtgctaacccagtatgttcttcttttttatgtaagggacagctttctccacagagtcctttctgctggtgaggacagcatttctgagcagggctttgttctctatgtgcattaggacttttatcatgcccttgttctgtgtgtagttacttgacagcatcaaatgccgcctcttcctaatgtccttcaagttttcatgaactagcaaccccaccttccaccatggttctgggcgcctgattttgctgtgactcccagacccagccactgtttctgccaccctgtaacaggccattaaagctccccagtgttcagcctccttcactcccttgttttccctgttgctatgtgtcacctgggccctacagacaggggcacacgcttatggatgtgtgtaccattgagatgagaatgggtagatggaacggagaccatcaagccacacccccttcttaaaactggggacatgagcctgagcagaaagggtgaagaagagccatgggacacagagttgacccagccagggggaaagcccagctctctttaaaccagctaagccattccagtctcctgtgaagccaaaagggaccaggaaccgtgcaaaggaaactggaaacttttccccgctgggtagagcatgttgctgatactcttctgttttcaagggaaacaatcacattgtttgattccaaatggtaaatgaacactcactattcttcaggcttcagtaaatctttttttcttccttcatatatatatacacaacacacacacacatatgtatatctatacacacatgtgtgttgtgtatatgcatgtgtgtgtgtgcgtgtgtgtatagttttagctccaagccaagcaagtttgtgtttggatagaggggaacttaactattaactacaagttgtatgtctgtggtatcttgattttcccatttctaaagatgaatttcacaaagccataaagcgtgaaattagagctggacttaagactcattggccgaccatcctgtgtcctggcctggccctgcagtaagaagcgtgtctgggtctggagaagggtgcttccgagagtgtgcaggtggcccttccccttggaggcgagaagagagaatgtgctgtctatcttcctggttttcagtccacagagtcggtagaccaggggttacgtgactggggaaaatctcacatctccttgtctgaaaacatttcccctgctgttctctttctaacatgttgtggtaaatctgttcagatactgctcatctgactgttttgtacatgtgacaattgccttaaaacctagcacagtcctcagaaatgaataccgtgtttccactgg

SEQ ID NO: 446117 - DNA, 1081 bp, Homo sapiens
gttcggggccggctgcagactctcaccgcagcggccaggaacgccagccgttcacgcgttcggtcctccttggctgactcaccgccctcgccgccgcaccatggacgcccccaggcaggtggtcaactttgggcctggtcccgccaagctgccgcactcagtgttgttagagatacaaaaggaattattagactacaaaggagttggcattagtgttcttgaaatgagtcacaggtcatcagattttgccaagattattaacaatacagagaatcttgtgcgggaattgctagctgttccagacaactataaggtgatttttctgcaaggaggtgggtgcggccagttcagtgctgtccccttaaacctcattggcttgaaagcaggaaggtgtgcggactatgtggtgacaggagcttggtcagctaaggccgcagaagaagccaagaagtttgggactataaatatcgttcaccctaaacttgggagttatacaaaaattccagatccaagcacctggaacctcaacccagatgcctcctacgtgtattattgcgcaaatgagacggtgcatggtgtggagtttgactttatacccgatgtcaagggagcagtactggtttgtgacatgtcctcaaacttcctgtccaagccagtggatgtttccaagtttggtgtgatttttgctggtgcccagaagaatgttggctctgctggggtcaccgtggtgattgtccgtgatgacctgctggggtttgccctccgagagtgcccctcggtcctggaatacaaggtgcaggctggaaacagctccttgtacaacacgcctccatgtttcagcatctacgtcatgggcttggttctggagtggattaaaaacaatggaggtgccgcggccatggagaagcttagctccatcaaatctcaaacaatttatgagattattgataattctcaaggattctacgtgtaagtcaatggattttatctcctattttgcctcttgtgaatttaaaactgtgtatatactgtgtacctttgaaaagtggacatattcacctttctctgagacattaaaata

SEQ ID NO: 446118 - DNA, 3828 bp, Homo sapiens
ggaacgagaacagataaactcactaaggcggttcctaacgcgtacagcgacggctctgtgcggctggtcgacactctcggtcaccgacggggccagtatcaccgacgatatctgcgtccattccctgtgcgacttgaaactactacccaggcaacctccgcgcgaccatggacgcccccaggcaggtggtcaactttgggcctggtcccgccaagctgccgcactcagtgttgttagagatacaaaaggaattattagactacaaaggagttggcattagtgttcttgaaatgagtcacaggtcatcagattttgccaagattattaacaatacagagaatcttgtgcgggaattgctagctgttccagacaactataaggtgatttttctgcaaggaggtgggtgcggccagttcagtgctgtccccttaaacctcattggcttgaaagcaggaaggtgtgcggactatgtggtgacaggagcttggtcagctaaggccgcagaagaagccaagaagtttgggactataaatatcgttcaccctaaacttgggagttatacaaaaattccagatccaagcacctggaacctcaacccagatgcctcctacgtgtattattgcgcaaatgagacggtgcatggtgtggagtttgactttatacccgatgtcaagggagcagtactggtttgtgacatgtcctcaaacttcctgtccaagccagtggatgtttccaagtttggtgtgatttttgctggtgcccagaagaatgttggctctgctggggtcaccgtggtgattgtccgtgatgacctgctggggtttgccctccgagagtgcccctcggtcctggaatacaaggtgcaggctggaaacagctccttgtacaacacgcctccatgtttcagcatctacgtcatgggcttggttctggagtggattaaaaacaatggaggtgccgcggccatggagaagcttagctccatcaaatctcaaacaatttatgagattattgataattctcaaggattctacgtttgtccagtggagccccaaaatagaagcaagatgaatattccattccgcattggcaatgccaaaggagatgatgctttagaaaaaagatttcttgataaagctcttgaactcaatatgttgtccttgaaagggcataggtctgtgggaggcatccgggcctctctgtataatgctgtcacaattgaagacgttcagaagctggccgccttcatgaaaaaatttttggagatgcatcagctatgaacacatcctaaccaggatatactctgttcttgaacaacatacaaagtttaaagtaacttggggatggctacaaaaagttaacacagtatttttctcaaatgaacatgtttattgcagattcttcttttttgaaagaacaacagcaaaacatccacaactctgtaaagctggtgggacctaatgtcaccttaattctgacttgaactggaagcattttaagaaatcttgttgcttttctaacaaattcccgcgtattttgcctttgctgctactttttctagttagatttcaaacttgcctgtggacttaataatgcaagttgcgattaattatttctggagtcatgggaacacacagcacagagggtaggggggccctctaggtgctgaatctacacatctgtggggtctcctgggttcagcggctgttgattcaaggtcaacattgaccattggaggagtggtttaagagtgccaggcgaagggcaaactgtagatcgatctttatgctgttattacaggagaagtgacatactttatatatgtttatattagcaaggtctgtttttaataccatatactttatatttctatacatttatatttctaataatacagttatcactgatatatgtagacacttttagaatttattaaatccttgaccttgtgcattatagcattccattagcaagagttgtaccccctccccagtcttcgccttcctctttttaagctgttttatgaaaaagacctagaagttcttgattcatttttaccattctttccataggtagaagagaaagttgattggttggttgtttttcaattatgccattaaactaaacatttctgttaaattaccctatcctttgttctctactgttttctttgtaatgtatgactacgagagtgatactttgctgaaaagtctttcccctattgtttatctattgtcagtattttatgttgaatatgtaaagaacattaaagtcctaaacacggttctaagctaagtgaaggggaagatctgagagcgtgctgtttgtggctgttgatgcatattcgtgatgtaacaggtcctggggcctcactttaccccatttgtaaaatggggctaatgtcacctgcctcttacctacctcagagggatttggtgaagcaaactgttaatcttcgaaaacgaccatttcacttcttggatatcaagtgctaacccagtatgttcttcttttttatgtaagggacagctttctccacagagtcctttctgctggtgaggacagcatttctgagcagggctttgttctctatgtgcattaggacttttatcatgcccttgttctgtgtgtagttacttgacagcatcaaatgccgcctcttcctaatgtccttcaagttttcatgaactagcaaccccaccttccaccatggttctgggcgcctgattttgctgtgactcccagacccagccactgtttctgccaccctgtaacaggccattaaagctccccagtgttcagcctccttcactcccttgttttccctgttgctatgtgtcacctgggccctacagacaggggcacacgcttatggatgtgtgtaccattgagatgagaatgggtagatggaacggagaccatcaagccacacccccttcttaaaactggggacatgagcctgagcagaaagggtgaagaagagccatgggacacagagttgacccagccagggggaaagcccagctctctttaaaccagctaagccattccagtctcctgtgaagccaaaagggaccaggaaccgtgcaaaggaaactggaaacttttccccgctgggtagagcatgttgctgatactcttctgttttcaagggaaacaatcacattgtttgattccaaatggtaaatgaacactcactattcttcaggcttcagtaaatctttttttcttccttcatatatatatacacaacacacacacacatatgtatatctatacacacatgtgtgttgtgtatatgcatgtgtgtgtgtgcgtgtgtgtatagttttagctccaagccaagcaagtttgtgtttggatagaggggaacttaactattaactacaagttgtatgtctgtggtatcttgattttcccatttctaaagatgaatttcacaaagccataaagcgtgaaattagagctggacttaagactcattggccgaccatcctgtgtcctggcctggccctgcagtaagaagcgtgtctgggtctggagaagggtgcttccgagagtgtgcaggtggcccttccccttggaggcgagaagagagaatgtgctgtctatcttcctggttttcagtccacagagtcggtagaccaggggttacgtgactggggaaaatctcacatctccttgtctgaaaacatttcccctgctgttctctttctaacatgttgtggtaaatctgttcagatactgctcatctgactgttttgtacatgtgacaattgccttaaaacctagcacagtcctcagaaatgaataccgtgtttccactgg

SEQ ID NO: 446119 - DNA, 3698 bp, Homo sapiens
  misc_feature (212)..(212): n is a, c, g, or t
gtaataattggatgaataaaagaactagaagcagcaaaatggatgcaccaggaaggtggtcaaatttgggaatggtcccgcaaagatgcagaactaagtgttgttagagataaaaaaggaattattagaataaaaaggagtaggaattagtgtttttgaaatgagtaaaaggtaataagattttgaaaagattattaaaaataaagagaatnttgtgggggaattggtagctgttccagacaactataaggtgatttttctgcaaggaggtgggtgcggccagttcagtgctgtccccttaaacctcattggcttgaaagcaggaaggtgtgcggactatgtggtgacaggagcttggtcagctaaggccgcagaagaagccaagaagtttgggactataaatatcgttcaccctaaacttgggagttatacaaaaattccagatccaagcacctggaacctcaacccagatgcctcctacgtgtattattgcgcaaatgagacggtgcatggtgtggagtttgactttatacccgatgtcaagggagcagtactggtttgtgacatgtcctcaaacttcctgtccaagccagtggatgtttccaagtttggtgtgatttttgctggtgcccagaagaatgttggctctgctggggtcaccgtggtgattgtccgtgatgacctgctggggtttgccctccgagagtgcccctcggtcctggaatacaaggtgcaggctggaaacagctccttgtacaacacgcctccatgtttcagcatctacgtcatgggcttggttctggagtggattaaaaacaatggaggtgccgcggccatggagaagcttagctccatcaaatctcaaacaatttatgagattattgataattctcaaggattctacgtttgtccagtggagccccaaaatagaagcaagatgaatattccattccgcattggcaatgccaaaggagatgatgctttagaaaaaagatttcttgataaagctcttgaactcaatatgttgtccttgaaagggcataggtctgtgggaggcatccgggcctctctgtataatgctgtcacaattgaagacgttcagaagctggccgccttcatgaaaaaatttttggagatgcatcagctatgaacacatcctaaccaggatatactctgttcttgaacaacatacaaagtttaaagtaacttggggatggctacaaaaagttaacacagtatttttctcaaatgaacatgtttattgcagattcttcttttttgaaagaacaacagcaaaacatccacaactctgtaaagctggtgggacctaatgtcaccttaattctgacttgaactggaagcattttaagaaatcttgttgcttttctaacaaattcccgcgtattttgcctttgctgctactttttctagttagatttcaaacttgcctgtggacttaataatgcaagttgcgattaattatttctggagtcatgggaacacacagcacagagggtaggggggccctctaggtgctgaatctacacatctgtggggtctcctgggttcagcggctgttgattcaaggtcaacattgaccattggaggagtggtttaagagtgccaggcgaagggcaaactgtagatcgatctttatgctgttattacaggagaagtgacatactttatatatgtttatattagcaaggtctgtttttaataccatatactttatatttctatacatttatatttctaataatacagttatcactgatatatgtagacacttttagaatttattaaatccttgaccttgtgcattatagcattccattagcaagagttgtaccccctccccagtcttcgccttcctctttttaagctgttttatgaaaaagacctagaagttcttgattcatttttaccattctttccataggtagaagagaaagttgattggttggttgtttttcaattatgccattaaactaaacatttctgttaaattaccctatcctttgttctctactgttttctttgtaatgtatgactacgagagtgatactttgctgaaaagtctttcccctattgtttatctattgtcagtattttatgttgaatatgtaaagaacattaaagtcctaaacacggttctaagctaagtgaaggggaagatctgagagcgtgctgtttgtggctgttgatgcatattcgtgatgtaacaggtcctggggcctcactttaccccatttgtaaaatggggctaatgtcacctgcctcttacctacctcagagggatttggtgaagcaaactgttaatcttcgaaaacgaccatttcacttcttggatatcaagtgctaacccagtatgttcttcttttttatgtaagggacagctttctccacagagtcctttctgctggtgaggacagcatttctgagcagggctttgttctctatgtgcattaggacttttatcatgcccttgttctgtgtgtagttacttgacagcatcaaatgccgcctcttcctaatgtccttcaagttttcatgaactagcaaccccaccttccaccatggttctgggcgcctgattttgctgtgactcccagacccagccactgtttctgccaccctgtaacaggccattaaagctccccagtgttcagcctccttcactcccttgttttccctgttgctatgtgtcacctgggccctacagacaggggcacacgcttatggatgtgtgtaccattgagatgagaatgggtagatggaacggagaccatcaagccacacccccttcttaaaactggggacatgagcctgagcagaaagggtgaagaagagccatgggacacagagttgacccagccagggggaaagcccagctctctttaaaccagctaagccattccagtctcctgtgaagccaaaagggaccaggaaccgtgcaaaggaaactggaaacttttccccgctgggtagagcatgttgctgatactcttctgttttcaagggaaacaatcacattgtttgattccaaatggtaaatgaacactcactattcttcaggcttcagtaaatctttttttcttccttcatatatatatacacaacacacacacacatatgtatatctatacacacatgtgtgttgtgtatatgcatgtgtgtgtgtgcgtgtgtgtatagttttagctccaagccaagcaagtttgtgtttggatagaggggaacttaactattaactacaagttgtatgtctgtggtatcttgattttcccatttctaaagatgaatttcacaaagccataaagcgtgaaattagagctggacttaagactcattggccgaccatcctgtgtcctggcctggccctgcagtaagaagcgtgtctgggtctggagaagggtgcttccgagagtgtgcaggtggcccttccccttggaggcgagaagagagaatgtgctgtctatcttcctggttttcagtccacagagtcggtagaccaggggttacgtgactggggaaaatctcacatctccttgtctgaaaacatttcccctgctgttctctttctaacatgttgtggtaaatctgttcagatactgctcatctgactgttttgtacatgtgacaattgccttaaaacctagcacagtcctcagaaatgaataccgtgtttccactgg

SEQ ID NO: 446120 - DNA, 3212 bp, Homo sapiens
gttcggggccggctgcagactctcaccgcagcggccaggaacgccagccgttcacgcgttcggtcctccttggctgactcaccgccctcgccgccgcaccatggacgcccccaggcaggtggtcaactttgggcctggtcccgccaagctgccgcactcagtgttgttagagatacaaaaggaattattagactacaaaggagttggcattagtgttcttgaaatgagtcacaggtcatcagattttgccaagattattaacaatacagagaatcttgtgcgggaattgctcatctacgtcatgggcttggttctggagtggattaaaaacaatggaggtgccgcggccatggagaagcttagctccatcaaatctcaaacaatttatgagattattgataattctcaaggattctacgtttgtccagtggagccccaaaatagaagcaagatgaatattccattccgcattggcaatgccaaaggagatgatgctttagaaaaaagatttcttgataaagctcttgaactcaatatgttgtccttgaaagggcataggtctgtgggaggcatccgggcctctctgtataatgctgtcacaattgaagacgttcagaagctggccgccttcatgaaaaaatttttggagatgcatcagctatgaacacatcctaaccaggatatactctgttcttgaacaacatacaaagtttaaagtaacttggggatggctacaaaaagttaacacagtatttttctcaaatgaacatgtttattgcagattcttcttttttgaaagaacaacagcaaaacatccacaactctgtaaagctggtgggacctaatgtcaccttaattctgacttgaactggaagcattttaagaaatcttgttgcttttctaacaaattcccgcgtattttgcctttgctgctactttttctagttagatttcaaacttgcctgtggacttaataatgcaagttgcgattaattatttctggagtcatgggaacacacagcacagagggtaggggggccctctaggtgctgaatctacacatctgtggggtctcctgggttcagcggctgttgattcaaggtcaacattgaccattggaggagtggtttaagagtgccaggcgaagggcaaactgtagatcgatctttatgctgttattacaggagaagtgacatactttatatatgtttatattagcaaggtctgtttttaataccatatactttatatttctatacatttatatttctaataatacagttatcactgatatatgtagacacttttagaatttattaaatccttgaccttgtgcattatagcattccattagcaagagttgtaccccctccccagtcttcgccttcctctttttaagctgttttatgaaaaagacctagaagttcttgattcatttttaccattctttccataggtagaagagaaagttgattggttggttgtttttcaattatgccattaaactaaacatttctgttaaattaccctatcctttgttctctactgttttctttgtaatgtatgactacgagagtgatactttgctgaaaagtctttcccctattgtttatctattgtcagtattttatgttgaatatgtaaagaacattaaagtcctaaacacggttctaagctaagtgaaggggaagatctgagagcgtgctgtttgtggctgttgatgcatattcgtgatgtaacaggtcctggggcctcactttaccccatttgtaaaatggggctaatgtcacctgcctcttacctacctcagagggatttggtgaagcaaactgttaatcttcgaaaacgaccatttcacttcttggatatcaagtgctaacccagtatgttcttcttttttatgtaagggacagctttctccacagagtcctttctgctggtgaggacagcatttctgagcagggctttgttctctatgtgcattaggacttttatcatgcccttgttctgtgtgtagttacttgacagcatcaaatgccgcctcttcctaatgtccttcaagttttcatgaactagcaaccccaccttccaccatggttctgggcgcctgattttgctgtgactcccagacccagccactgtttctgccaccctgtaacaggccattaaagctccccagtgttcagcctccttcactcccttgttttccctgttgctatgtgtcacctgggccctacagacaggggcacacgcttatggatgtgtgtaccattgagatgagaatgggtagatggaacggagaccatcaagccacacccccttcttaaaactggggacatgagcctgagcagaaagggtgaagaagagccatgggacacagagttgacccagccagggggaaagcccagctctctttaaaccagctaagccattccagtctcctgtgaagccaaaagggaccaggaaccgtgcaaaggaaactggaaacttttccccgctgggtagagcatgttgctgatactcttctgttttcaagggaaacaatcacattgtttgattccaaatggtaaatgaacactcactattcttcaggcttcagtaaatctttttttcttccttcatatatatatacacaacacacacacacatatgtatatctatacacacatgtgtgttgtgtatatgcatgtgtgtgtgtgcgtgtgtgtatagttttagctccaagccaagcaagtttgtgtttggatagaggggaacttaactattaactacaagttgtatgtctgtggtatcttgattttcccatttctaaagatgaatttcacaaagccataaagcgtgaaattagagctggacttaagactcattggccgaccatcctgtgtcctggcctggccctgcagtaagaagcgtgtctgggtctggagaagggtgcttccgagagtgtgcaggtggcccttccccttggaggcgagaagagagaatgtgctgtctatcttcctggttttcagtccacagagtcggtagaccaggggttacgtgactggggaaaatctcacatctccttgtctgaaaacatttcccctgctgttctctttctaacatgttgtggtaaatctgttcagatactgctcatctgactgttttgtacatgtgacaattgccttaaaacctagcacagtcctcagaaatgaataccgtgtttccactgg

SEQ ID NO: 446121 - DNA, 2705 bp, Homo sapiens
  misc_feature (327)..(327): n is a, c, g, or t
  misc_feature (331)..(331): n is a, c, g, or t
  misc_feature (355)..(355): n is a, c, g, or t
  misc_feature (402)..(403): n is a, c, g, or t
  misc_feature (405)..(405): n is a, c, g, or t
  misc_feature (470)..(470): n is a, c, g, or t
  misc_feature (479)..(479): n is a, c, g, or t
  misc_feature (486)..(486): n is a, c, g, or t
  misc_feature (530)..(530): n is a, c, g, or t
  misc_feature (542)..(542): n is a, c, g, or t
  misc_feature (554)..(554): n is a, c, g, or t
  misc_feature (577)..(577): n is a, c, g, or t
  misc_feature (597)..(597): n is a, c, g, or t
  misc_feature (642)..(642): n is a, c, g, or t
  misc_feature (645)..(645): n is a, c, g, or t
  misc_feature (660)..(660): n is a, c, g, or t
  misc_feature (662)..(662): n is a, c, g, or t
gtaattcatatcactctcactttacacgcatcgcttgtaatcttatcctaattatttgtactgtctaattttctcggtatcgttcattgtgttacctcttttagttagtccttacaaaattcccttcatgcaatttccagtcacactttttaactcgtcttgctagtgattttgcttttaatactgttctactatttggggtcctttgttatcataaaacttggtaactgtttatacgttggcctcttcgaagggattttttggcgcccccttgttttttttttttagatcttttaggactttaatgttctttacatattcacatanaatnctgacaatagattacaataggggnaagacttttcagcaaagtatcactctcgtagtcatacattacaaagnngnacagtagagaacaaaggatagggtaatttaacagaaatgtttagttataatggcatagattgaanacaatccanccaatcnactttctcttctacctactggaaagaatggtataaatgaatganagaacttctagntctttttcatantacagcttcaaaagaggaaggcnaagactggggagggggtacnactcttgctacatggaatgctataatgcacaagttcaaggatttnatncattctaaaagtgtntncatatatcagtgataactgtattattagaaatatatatgtttatattagcaaggtctgtttttaataccatatactttatatttctatacatttatatttctaataatacagttatcactgatatatgtagacacttttagaatttattaaatccttgaccttgtgcattatagcattccattagcaagagttgtaccccctccccagtcttcgccttcctctttttaagctgttttatgaaaaagacctagaagttcttgattcatttttaccattctttccataggtagaagagaaagttgattggttggttgtttttcaattatgccattaaactaaacatttctgttaaattaccctatcctttgttctctactgttttctttgtaatgtatgactacgagagtgatactttgctgaaaagtctttcccctattgtttatctattgtcagtattttatgttgaatatgtaaagaacattaaagtcctaaacacggttctaagctaagtgaaggggaagatctgagagcgtgctgtttgtggctgttgatgcatattcgtgatgtaacaggtcctggggcctcactttaccccatttgtaaaatggggctaatgtcacctgcctcttacctacctcagagggatttggtgaagcaaactgttaatcttcgaaaacgaccatttcacttcttggatatcaagtgctaacccagtatgttcttcttttttatgtaagggacagctttctccacagagtcctttctgctggtgaggacagcatttctgagcagggctttgttctctatgtgcattaggacttttatcatgcccttgttctgtgtgtagttacttgacagcatcaaatgccgcctcttcctaatgtccttcaagttttcatgaactagcaaccccaccttccaccatggttctgggcgcctgattttgctgtgactcccagacccagccactgtttctgccaccctgtaacaggccattaaagctccccagtgttcagcctccttcactcccttgttttccctgttgctatgtgtcacctgggccctacagacaggggcacacgcttatggatgtgtgtaccattgagatgagaatgggtagatggaacggagaccatcaagccacacccccttcttaaaactggggacatgagcctgagcagaaagggtgaagaagagccatgggacacagagttgacccagccagggggaaagcccagctctctttaaaccagctaagccattccagtctcctgtgaagccaaaagggaccaggaaccgtgcaaaggaaactggaaacttttccccgctgggtagagcatgttgctgatactcttctgttttcaagggaaacaatcacattgtttgattccaaatggtaaatgaacactcactattcttcaggcttcagtaaatctttttttcttccttcatatatatatacacaacacacacacacatatgtatatctatacacacatgtgtgttgtgtatatgcatgtgtgtgtgtgcgtgtgtgtatagttttagctccaagccaagcaagtttgtgtttggatagaggggaacttaactattaactacaagttgtatgtctgtggtatcttgattttcccatttctaaagatgaatttcacaaagccataaagcgtgaaattagagctggacttaagactcattggccgaccatcctgtgtcctggcctggccctgcagtaagaagcgtgtctgggtctggagaagggtgcttccgagagtgtgcaggtggcccttccccttggaggcgagaagagagaatgtgctgtctatcttcctggttttcagtccacagagtcggtagaccaggggttacgtgactggggaaaatctcacatctccttgtctgaaaacatttcccctgctgttctctttctaacatgttgtggtaaatctgttcagatactgctcatctgactgttttgtacatgtgacaattgccttaaaacctagcacagtcctcagaaatgaataccgtgtttccactgg

SEQ ID NO: 446122 - DNA, 3761 bp, Homo sapiens
gttcggggccggctgcagactctcaccgcagcggccaggaacgccagccgttcacgcgttcggtcctccttggctgactcaccgccctcgccgccgcaccatggacgcccccaggcaggtggtcaactttgggcctggtcccgccaagctgccgcactcagtgttgttagagatacaaaaggaattattagactacaaaggagttggcattagtgttcttgaaatgagtcacaggtcatcagattttgccaagattattaacaatacagagaatcttgtgcgggaattgctagctgttccagacaactataaggtgatttttctgcaaggaggtgggtgcggccagttcagtgctgtccccttaaacctcattggcttgaaagcaggaaggtgtgcggactatgtggtgacaggagcttggtcagctaaggccgcagaagaagccaagaagtttgggactataaatatcgttcaccctaaacttgggagttatacaaaaattccagatccaagcacctggaacctcaacccagatgcctcctacgtgtattattgcgcaaatgagacggtgcatggtgtggagtttgactttatacccgatgtcaagggagcagtactggtttgtgacatgtcctcaaacttcctgtccaagccagtggatgtttccaagtttggtgtgatttttgctggtgcccagaagaatgttggctctgctggggtcaccgtggtgattgtccgtgatgacctgctggggtttgccctccgagagtgcccctcggtcctggaatacaaggtgcaggctggaaacagctccttgtacaacacgcctccatgtttcagcatctacgtcatgggcttggttctggagtggattaaaaacaatggaggtgccgcggccatggagaagcttagctccatcaaatctcaaacaatttatgagattattgataattctcaaggattctacgtttgtccagtggagccccaaaatagaagcaagatgaatattccattccgcattggcaatgccaaaggagatgatgctttagaaaaaagatttcttgataaagctcttgaactcaatatgttgtccttgaaagggcataggtctgtgggaggcatccgggcctctctgtataatgctgtcacaattgaagacgttcagaagctggccgccttcatgaaaaaatttttggagatgcatcagctatgaacacatcctaaccaggatatactctgttcttgaacaacatacaaagtttaaagtaacttggggatggctacaaaaagttaacacagtatttttctcaaatgaacatgtttattgcagattcttcttttttgaaagaacaacagcaaaacatccacaactctgtaaagctggtgggacctaatgtcaccttaattctgacttgaactggaagcattttaagaaatcttgttgcttttctaacaaattcccgcgtattttgcctttgctgctactttttctagttagatttcaaacttgcctgtggacttaataatgcaagttgcgattaattatttctggagtcatgggaacacacagcacagagggtaggggggccctctaggtgctgaatctacacatctgtggggtctcctgggttcagcggctgttgattcaaggtcaacattgaccattggaggagtggtttaagagtgccaggcgaagggcaaactgtagatcgatctttatgctgttattacaggagaagtgacatactttatatatgtttatattagcaaggtctgtttttaataccatatactttatatttctatacatttatatttctaataatacagttatcactgatatatgtagacacttttagaatttattaaatccttgaccttgtgcattatagcattccattagcaagagttgtaccccctccccagtcttcgccttcctctttttaagctgttttatgaaaaagacctagaagttcttgattcatttttaccattctttccataggtagaagagaaagttgattggttggttgtttttcaattatgccattaaactaaacatttctgttaaattaccctatcctttgttctctactgttttctttgtaatgtatgactacgagagtgatactttgctgaaaagtctttcccctattgtttatctattgtcagtattttatgttgaatatgtaaagaacattaaagtcctaaacacggttctaagctaagtgaaggggaagatctgagagcgtgctgtttgtggctgttgatgcatattcgtgatgtaacaggtcctggggcctcactttaccccatttgtaaaatggggctaatgtcacctgcctcttacctacctcagagggatttggtgaagcaaactgttaatcttcgaaaacgaccatttcacttcttggatatcaagtgctaacccagtatgttcttcttttttatgtaagggacagctttctccacagagtcctttctgctggtgaggacagcatttctgagcagggctttgttctctatgtgcattaggacttttatcatgcccttgttctgtgtgtagttacttgacagcatcaaatgccgcctcttcctaatgtccttcaagttttcatgaactagcaaccccaccttccaccatggttctgggcgcctgattttgctgtgactcccagacccagccactgtttctgccaccctgtaacaggccattaaagctccccagtgttcagcctccttcactcccttgttttccctgttgctatgtgtcacctgggccctacagacaggggcacacgcttatggatgtgtgtaccattgagatgagaatgggtagatggaacggagaccatcaagccacacccccttcttaaaactggggacatgagcctgagcagaaagggtgaagaagagccatgggacacagagttgacccagccagggggaaagcccagctctctttaaaccagctaagccattccagtctcctgtgaagccaaaagggaccaggaaccgtgcaaaggaaactggaaacttttccccgctgggtagagcatgttgctgatactcttctgttttcaagggaaacaatcacattgtttgattccaaatggtaaatgaacactcactattcttcaggcttcagtaaatctttttttcttccttcatatatatatacacaacacacacacacatatgtatatctatacacacatgtgtgttgtgtatatgcatgtgtgtgtgtgcgtgtgtgtatagttttagctccaagccaagcaagtttgtgtttggatagaggggaacttaactattaactacaagttgtatgtctgtggtatcttgattttcccatttctaaagatgaatttcacaaagccataaagcgtgaaattagagctggacttaagactcattggccgaccatcctgtgtcctggcctggccctgcagtaagaagcgtgtctgggtctggagaagggtgcttccgagagtgtgcaggtggcccttccccttggaggcgagaagagagaatgtgctgtctatcttcctggttttcagtccacagagtcggtagaccaggggttacgtgactggggaaaatctcacatctccttgtctgaaaacatttcccctgctgttctctttctaacatgttgtggtaaatctgttcagatactgctcatctgactgttttgtacatgtgacaattgccttaaaacctagcacagtcctcagaaatgaataccgtgtttccactgg

SEQ ID NO: 446123 - DNA, 1689 bp, Homo sapiens
gttcggggccggctgcagactctcaccgcagcggccaggaacgccagccgttcacgcgttcggtcctccttggctgactcaccgccctcgccgccgcaccatggacgcccccaggcaggtggtcaactttgggcctggtcccgccaagctgccgcactcagtgttgttagagatacaaaaggaattattagactacaaaggagttggcattagtgttcttgaaatgagtcacaggtcatcagattttgccaagattattaacaatacagagaatcttgtgcgggaattgctagctgttccagacaactataaggtgatttttctgcaaggaggtgggtgcggccagttcagtgctgtccccttaaacctcattggcttgaaagcaggaaggtgtgcggactatgtggtgacaggagcttggtcagctaaggccgcagaagaagccaagaagtttgggactataaatatcgttcaccctaaacttgggagttatacaaaaattccagatccaagcacctggaacctcaacccagatgcctcctacgtgtattattgcgcaaatgagacggtgcatggtgtggagtttgactttatacccgatgtcaagggagcagtactggtttgtgacatgtcctcaaacttcctgtccaagccagtggatgtttccaagtttggtgtgatttttgctggtgcccagaagaatgttggctctgctggggtcaccgtggtgattgtccgtgatgacctgctggggtttgccctccgagagtgcccctcggtcctggaatacaaggtgcaggctggaaacagctccttgtacaacacgcctccatgtttcagcatctacgtcatgggcttggttctggagtggattaaaaacaatggaggtgccgcggccatggagaagcttagctccatcaaatctcaaacaatttatgagattattgataattctcaaggattctacgtttgtccagtggagccccaaaatagaagcaagatgaatattccattccgcattggcaatgccaaaggagatgatgctttagaaaaaagatttcttgataaagctcttgaactcaatatgttgtccttgaaagggcataggtctgtgggaggcatccgggcctctctgtataatgctgtcacaattgaagacgttcagaagctggccgccttcatgaaaaaatttttggagatgcatcagctatgaacacatcctaaccaggatatactctgttcttgaacaacatacaaagtttaaagtaacttggggatggctacaaaaagttaacacagtatttttctcaaatgaacatgtttattgcagattcttcttttttgaaagaacaacagcaaaacatccacaactctgtaaagctggtgggacctaatgtcaccttaattctgacttgaactggaagcattttaagaaatcttgttgcttttctaacaaattcccgcgtattttgcctttgctgctactttttctagttagatttcaaacttgcctgtggacttaataatgcaagttgcgattaattatttctggagtcatgggaacacacagcacagagggtaggggggccccatggtaactcacttgggggtccgggtccgggtgatcaggcactgcctgcgggtgtaagcgcagaggacgtaacttcgtaagagacactattcttacgg

SEQ ID NO: 446124 - DNA, 3745 bp, Homo sapiens
gtgacgcgtggtcgacccacgcgtcgcggacgcgtgggcgcgttcggtcctccttggctgactcaccgccctcgccgccgcaccatggacgcccccaggcaggtggtcaactttgggcctggtcccgccaagctgccgcactcagtgttgttagagatacaaaaggaattattagactacaaaggagttggcattagtgttcttgaaatgagtcacaggtcatcagattttgccaagattattaacaatacagagaatcttgtgcgggaattgctagctgttccagacaactataaggtgatttttctgcaaggaggtgggtgcggccagttcagtgctgtccccttaaacctcattggcttgaaagcaggaaggtgtgcggactatgtggtgacaggagcttggtcagctaaggccgcagaagaagccaagaagtttgggactataaatatcgttcaccctaaacttgggagttatacaaaaattccagatccaagcacctggaacctcaacccagatgcctcctacgtgtattattgcgcaaatgagacggtgcatggtgtggagtttgactttatacccgatgtcaagggagcagtactggtttgtgacatgtcctcaaacttcctgtccaagccagtggatgtttccaagtttggtgtgatttttgctggtgcccagaagaatgttggctctgctggggtcaccgtggtgattgtccgtgatgacctgctggggtttgccctccgagagtgcccctcggtcctggaatacaaggtgcaggctggaaacagctccttgtacaacacgcctccatgtttcagcatctacgtcatgggcttggttctggagtggattaaaaacaatggaggtgccgcggccatggagaagcttagctccatcaaatctcaaacaatttatgagattattgataattctcaaggattctacgtttgtccagtggagccccaaaatagaagcaagatgaatattccattccgcattggcaatgccaaaggagatgatgctttagaaaaaagatttcttgataaagctcttgaactcaatatgttgtccttgaaagggcataggtctgtgggaggcatccgggcctctctgtataatgctgtcacaattgaagacgttcagaagctggccgccttcatgaaaaaatttttggagatgcatcagctatgaacacatcctaaccaggatatactctgttcttgaacaacatacaaagtttaaagtaacttggggatggctacaaaaagttaacacagtatttttctcaaatgaacatgtttattgcagattcttcttttttgaaagaacaacagcaaaacatccacaactctgtaaagctggtgggacctaatgtcaccttaattctgacttgaactggaagcattttaagaaatcttgttgcttttctaacaaattcccgcgtattttgcctttgctgctactttttctagttagatttcaaacttgcctgtggacttaataatgcaagttgcgattaattatttctggagtcatgggaacacacagcacagagggtaggggggccctctaggtgctgaatctacacatctgtggggtctcctgggttcagcggctgttgattcaaggtcaacattgaccattggaggagtggtttaagagtgccaggcgaagggcaaactgtagatcgatctttatgctgttattacaggagaagtgacatactttatatatgtttatattagcaaggtctgtttttaataccatatactttatatttctatacatttatatttctaataatacagttatcactgatatatgtagacacttttagaatttattaaatccttgaccttgtgcattatagcattccattagcaagagttgtaccccctccccagtcttcgccttcctctttttaagctgttttatgaaaaagacctagaagttcttgattcatttttaccattctttccataggtagaagagaaagttgattggttggttgtttttcaattatgccattaaactaaacatttctgttaaattaccctatcctttgttctctactgttttctttgtaatgtatgactacgagagtgatactttgctgaaaagtctttcccctattgtttatctattgtcagtattttatgttgaatatgtaaagaacattaaagtcctaaacacggttctaagctaagtgaaggggaagatctgagagcgtgctgtttgtggctgttgatgcatattcgtgatgtaacaggtcctggggcctcactttaccccatttgtaaaatggggctaatgtcacctgcctcttacctacctcagagggatttggtgaagcaaactgttaatcttcgaaaacgaccatttcacttcttggatatcaagtgctaacccagtatgttcttcttttttatgtaagggacagctttctccacagagtcctttctgctggtgaggacagcatttctgagcagggctttgttctctatgtgcattaggacttttatcatgcccttgttctgtgtgtagttacttgacagcatcaaatgccgcctcttcctaatgtccttcaagttttcatgaactagcaaccccaccttccaccatggttctgggcgcctgattttgctgtgactcccagacccagccactgtttctgccaccctgtaacaggccattaaagctccccagtgttcagcctccttcactcccttgttttccctgttgctatgtgtcacctgggccctacagacaggggcacacgcttatggatgtgtgtaccattgagatgagaatgggtagatggaacggagaccatcaagccacacccccttcttaaaactggggacatgagcctgagcagaaagggtgaagaagagccatgggacacagagttgacccagccagggggaaagcccagctctctttaaaccagctaagccattccagtctcctgtgaagccaaaagggaccaggaaccgtgcaaaggaaactggaaacttttccccgctgggtagagcatgttgctgatactcttctgttttcaagggaaacaatcacattgtttgattccaaatggtaaatgaacactcactattcttcaggcttcagtaaatctttttttcttccttcatatatatatacacaacacacacacacatatgtatatctatacacacatgtgtgttgtgtatatgcatgtgtgtgtgtgcgtgtgtgtatagttttagctccaagccaagcaagtttgtgtttggatagaggggaacttaactattaactacaagttgtatgtctgtggtatcttgattttcccatttctaaagatgaatttcacaaagccataaagcgtgaaattagagctggacttaagactcattggccgaccatcctgtgtcctggcctggccctgcagtaagaagcgtgtctgggtctggagaagggtgcttccgagagtgtgcaggtggcccttccccttggaggcgagaagagagaatgtgctgtctatcttcctggttttcagtccacagagtcggtagaccaggggttacgtgactggggaaaatctcacatctccttgtctgaaaacatttcccctgctgttctctttctaacatgttgtggtaaatctgttcagatactgctcatctgactgttttgtacatgtgacaattgccttaaaacctagcacagtcctcagaaatgaataccgtgtttccactgg

SEQ ID NO: 446125 - DNA, 3719 bp, Homo sapiens
gtgacgcgtggtcgacccacgcgtcgcggacgcgtgggcgcgttcggtcctccttggctgactcaccgccctcgccgccgcaccatggacgcctggtcccgccaagctgccgcactcagtgttgttagagatacaaaaggaattattagactacaaaggagttggcattagtgttcttgaaatgagtcacaggtcatcagattttgccaagattattaacaatacagagaatcttgtgcgggaattgctagctgttccagacaactataaggtgatttttctgcaaggaggtgggtgcggccagttcagtgctgtccccttaaacctcattggcttgaaagcaggaaggtgtgcggactatgtggtgacaggagcttggtcagctaaggccgcagaagaagccaagaagtttgggactataaatatcgttcaccctaaacttgggagttatacaaaaattccagatccaagcacctggaacctcaacccagatgcctcctacgtgtattattgcgcaaatgagacggtgcatggtgtggagtttgactttatacccgatgtcaagggagcagtactggtttgtgacatgtcctcaaacttcctgtccaagccagtggatgtttccaagtttggtgtgatttttgctggtgcccagaagaatgttggctctgctggggtcaccgtggtgattgtccgtgatgacctgctggggtttgccctccgagagtgcccctcggtcctggaatacaaggtgcaggctggaaacagctccttgtacaacacgcctccatgtttcagcatctacgtcatgggcttggttctggagtggattaaaaacaatggaggtgccgcggccatggagaagcttagctccatcaaatctcaaacaatttatgagattattgataattctcaaggattctacgtttgtccagtggagccccaaaatagaagcaagatgaatattccattccgcattggcaatgccaaaggagatgatgctttagaaaaaagatttcttgataaagctcttgaactcaatatgttgtccttgaaagggcataggtctgtgggaggcatccgggcctctctgtataatgctgtcacaattgaagacgttcagaagctggccgccttcatgaaaaaatttttggagatgcatcagctatgaacacatcctaaccaggatatactctgttcttgaacaacatacaaagtttaaagtaacttggggatggctacaaaaagttaacacagtatttttctcaaatgaacatgtttattgcagattcttcttttttgaaagaacaacagcaaaacatccacaactctgtaaagctggtgggacctaatgtcaccttaattctgacttgaactggaagcattttaagaaatcttgttgcttttctaacaaattcccgcgtattttgcctttgctgctactttttctagttagatttcaaacttgcctgtggacttaataatgcaagttgcgattaattatttctggagtcatgggaacacacagcacagagggtaggggggccctctaggtgctgaatctacacatctgtggggtctcctgggttcagcggctgttgattcaaggtcaacattgaccattggaggagtggtttaagagtgccaggcgaagggcaaactgtagatcgatctttatgctgttattacaggagaagtgacatactttatatatgtttatattagcaaggtctgtttttaataccatatactttatatttctatacatttatatttctaataatacagttatcactgatatatgtagacacttttagaatttattaaatccttgaccttgtgcattatagcattccattagcaagagttgtaccccctccccagtcttcgccttcctctttttaagctgttttatgaaaaagacctagaagttcttgattcatttttaccattctttccataggtagaagagaaagttgattggttggttgtttttcaattatgccattaaactaaacatttctgttaaattaccctatcctttgttctctactgttttctttgtaatgtatgactacgagagtgatactttgctgaaaagtctttcccctattgtttatctattgtcagtattttatgttgaatatgtaaagaacattaaagtcctaaacacggttctaagctaagtgaaggggaagatctgagagcgtgctgtttgtggctgttgatgcatattcgtgatgtaacaggtcctggggcctcactttaccccatttgtaaaatggggctaatgtcacctgcctcttacctacctcagagggatttggtgaagcaaactgttaatcttcgaaaacgaccatttcacttcttggatatcaagtgctaacccagtatgttcttcttttttatgtaagggacagctttctccacagagtcctttctgctggtgaggacagcatttctgagcagggctttgttctctatgtgcattaggacttttatcatgcccttgttctgtgtgtagttacttgacagcatcaaatgccgcctcttcctaatgtccttcaagttttcatgaactagcaaccccaccttccaccatggttctgggcgcctgattttgctgtgactcccagacccagccactgtttctgccaccctgtaacaggccattaaagctccccagtgttcagcctccttcactcccttgttttccctgttgctatgtgtcacctgggccctacagacaggggcacacgcttatggatgtgtgtaccattgagatgagaatgggtagatggaacggagaccatcaagccacacccccttcttaaaactggggacatgagcctgagcagaaagggtgaagaagagccatgggacacagagttgacccagccagggggaaagcccagctctctttaaaccagctaagccattccagtctcctgtgaagccaaaagggaccaggaaccgtgcaaaggaaactggaaacttttccccgctgggtagagcatgttgctgatactcttctgttttcaagggaaacaatcacattgtttgattccaaatggtaaatgaacactcactattcttcaggcttcagtaaatctttttttcttccttcatatatatatacacaacacacacacacatatgtatatctatacacacatgtgtgttgtgtatatgcatgtgtgtgtgtgcgtgtgtgtatagttttagctccaagccaagcaagtttgtgtttggatagaggggaacttaactattaactacaagttgtatgtctgtggtatcttgattttcccatttctaaagatgaatttcacaaagccataaagcgtgaaattagagctggacttaagactcattggccgaccatcctgtgtcctggcctggccctgcagtaagaagcgtgtctgggtctggagaagggtgcttccgagagtgtgcaggtggcccttccccttggaggcgagaagagagaatgtgctgtctatcttcctggttttcagtccacagagtcggtagaccaggggttacgtgactggggaaaatctcacatctccttgtctgaaaacatttcccctgctgttctctttctaacatgttgtggtaaatctgttcagatactgctcatctgactgttttgtacatgtgacaattgccttaaaacctagcacagtcctcagaaatgaataccgtgtttccactgg

SEQ ID NO: 446126 - DNA, 3148 bp, Homo sapiens
agagagagagagagagagagaccaaacttcctgtccaagccagtggatgtttccaagtttggtgtgatttttgctggtgcccagaagaatgttggctctgctggggtcaccgtggtgattgtccgtgatgacctgctggggtttgccctccgagagtgcccctcggtcctggaatacaaggtgcaggctggaaacagctccttgtacaacacgcctccatgtttcagcatctacgtcatgggcttggttctggagtggattaaaaacaatggaggtgccgcggccatggagaagcttagctccatcaaatctcaaacaatttatgagattattgataattctcaaggattctacgtttgtccagtggagccccaaaatagaagcaagatgaatattccattccgcattggcaatgccaaaggagatgatgctttagaaaaaagatttcttgataaagctcttgaactcaatatgttgtccttgaaagggcataggtctgtgggaggcatccgggcctctctgtataatgctgtcacaattgaagacgttcagaagctggccgccttcatgaaaaaatttttggagatgcatcagctatgaacacatcctaaccaggatatactctgttcttgaacaacatacaaagtttaaagtaacttggggatggctacaaaaagttaacacagtatttttctcaaatgaacatgtttattgcagattcttcttttttgaaagaacaacagcaaaacatccacaactctgtaaagctggtgggacctaatgtcaccttaattctgacttgaactggaagcattttaagaaatcttgttgcttttctaacaaattcccgcgtattttgcctttgctgctactttttctagttagatttcaaacttgcctgtggacttaataatgcaagttgcgattaattatttctggagtcatgggaacacacagcacagagggtaggggggccctctaggtgctgaatctacacatctgtggggtctcctgggttcagcggctgttgattcaaggtcaacattgaccattggaggagtggtttaagagtgccaggcgaagggcaaactgtagatcgatctttatgctgttattacaggagaagtgacatactttatatatgtttatattagcaaggtctgtttttaataccatatactttatatttctatacatttatatttctaataatacagttatcactgatatatgtagacacttttagaatttattaaatccttgaccttgtgcattatagcattccattagcaagagttgtaccccctccccagtcttcgccttcctctttttaagctgttttatgaaaaagacctagaagttcttgattcatttttaccattctttccataggtagaagagaaagttgattggttggttgtttttcaattatgccattaaactaaacatttctgttaaattaccctatcctttgttctctactgttttctttgtaatgtatgactacgagagtgatactttgctgaaaagtctttcccctattgtttatctattgtcagtattttatgttgaatatgtaaagaacattaaagtcctaaacacggttctaagctaagtgaaggggaagatctgagagcgtgctgtttgtggctgttgatgcatattcgtgatgtaacaggtcctggggcctcactttaccccatttgtaaaatggggctaatgtcacctgcctcttacctacctcagagggatttggtgaagcaaactgttaatcttcgaaaacgaccatttcacttcttggatatcaagtgctaacccagtatgttcttcttttttatgtaagggacagctttctccacagagtcctttctgctggtgaggacagcatttctgagcagggctttgttctctatgtgcattaggacttttatcatgcccttgttctgtgtgtagttacttgacagcatcaaatgccgcctcttcctaatgtccttcaagttttcatgaactagcaaccccaccttccaccatggttctgggcgcctgattttgctgtgactcccagacccagccactgtttctgccaccctgtaacaggccattaaagctccccagtgttcagcctccttcactcccttgttttccctgttgctatgtgtcacctgggccctacagacaggggcacacgcttatggatgtgtgtaccattgagatgagaatgggtagatggaacggagaccatcaagccacacccccttcttaaaactggggacatgagcctgagcagaaagggtgaagaagagccatgggacacagagttgacccagccagggggaaagcccagctctctttaaaccagctaagccattccagtctcctgtgaagccaaaagggaccaggaaccgtgcaaaggaaactggaaacttttccccgctgggtagagcatgttgctgatactcttctgttttcaagggaaacaatcacattgtttgattccaaatggtaaatgaacactcactattcttcaggcttcagtaaatctttttttcttccttcatatatatatacacaacacacacacacatatgtatatctatacacacatgtgtgttgtgtatatgcatgtgtgtgtgtgcgtgtgtgtatagttttagctccaagccaagcaagtttgtgtttggatagaggggaacttaactattaactacaagttgtatgtctgtggtatcttgattttcccatttctaaagatgaatttcacaaagccataaagcgtgaaattagagctggacttaagactcattggccgaccatcctgtgtcctggcctggccctgcagtaagaagcgtgtctgggtctggagaagggtgcttccgagagtgtgcaggtggcccttccccttggaggcgagaagagagaatgtgctgtctatcttcctggttttcagtccacagagtcggtagaccaggggttacgtgactggggaaaatctcacatctccttgtctgaaaacatttcccctgctgttctctttctaacatgttgtggtaaatctgttcagatactgctcatctgactgttttgtacatgtgacaattgccttaaaacctagcacagtcctcagaaatgaataccgtgtttccactgg

SEQ ID NO: 446127 - DNA, 2097 bp, Homo sapiens
tcgtgcagaagatcaccttatcgtgcagaagaccaccttcgtgcagaagatcacctaccgtgcagaagatcacctctcgtgcagaagatcaccttatcgtgcagaagaccaccttcgtgcagaagatcacctatcgtgcagaagatcacctcatcgtgcagaagatcacctactgatatatgtagacacttttagaatttattaaatccttgaccttgtgcattatagcattccattagcaagagttgtaccccctccccagtcttcgccttcctctttttaagctgttttatgaaaaagacctagaagttcttgattcatttttaccattctttccataggtagaagagaaagttgattggttggttgtttttcaattatgccattaaactaaacatttctgttaaattaccctatcctttgttctctactgttttctttgtaatgtatgactacgagagtgatactttgctgaaaagtctttcccctattgtttatctattgtcagtattttatgttgaatatgtaaagaacattaaagtcctaaacacggttctaagctaagtgaaggggaagatctgagagcgtgctgtttgtggctgttgatgcatattcgtgatgtaacaggtcctggggcctcactttaccccatttgtaaaatggggctaatgtcacctgcctcttacctacctcagagggatttggtgaagcaaactgttaatcttcgaaaacgaccatttcacttcttggatatcaagtgctaacccagtatgttcttcttttttatgtaagggacagctttctccacagagtcctttctgctggtgaggacagcatttctgagcagggctttgttctctatgtgcattaggacttttatcatgcccttgttctgtgtgtagttacttgacagcatcaaatgccgcctcttcctaatgtccttcaagttttcatgaactagcaaccccaccttccaccatggttctgggcgcctgattttgctgtgactcccagacccagccactgtttctgccaccctgtaacaggccattaaagctccccagtgttcagcctccttcactcccttgttttccctgttgctatgtgtcacctgggccctacagacaggggcacacgcttatggatgtgtgtaccattgagatgagaatgggtagatggaacggagaccatcaagccacacccccttcttaaaactggggacatgagcctgagcagaaagggtgaagaagagccatgggacacagagttgacccagccagggggaaagcccagctctctttaaaccagctaagccattccagtctcctgtgaagccaaaagggaccaggaaccgtgcaaaggaaactggaaacttttccccgctgggtagagcatgttgctgatactcttctgttttcaagggaaacaatcacattgtttgattccaaatggtaaatgaacactcactattcttcaggcttcagtaaatctttttttcttccttcatatatatatacacaacacacacacacatatgtatatctatacacacatgtgtgttgtgtatatgcatgtgtgtgtgtgcgtgtgtgtatagttttagctccaagccaagcaagtttgtgtttggatagaggggaacttaactattaactacaagttgtatgtctgtggtatcttgattttcccatttctaaagatgaatttcacaaagccataaagcgtgaaattagagctggacttaagactcattggccgaccatcctgtgtcctggcctggccctgcagtaagaagcgtgtctgggtctggagaagggtgcttccgagagtgtgcaggtggcccttccccttggaggcgagaagagagaatgtgctgtctatcttcctggttttcagtccacagagtcggtagaccaggggttacgtgactggggaaaatctcacatctccttgtctgaaaacatttcccctgctgttctctttctaacatgttgtggtaaatctgttcagatactgctcatctgactgttttgtacatgtgacaattgccttaaaacctagcacagtcctcagaaatgaataccgtgtttccactgg

SEQ ID NO: 446128 - DNA, 1504 bp, Homo sapiens
  misc_feature (1498)..(1498): n is a, c, g, or t
  misc_feature (1502)..(1504): n is a, c, g, or t
ggctcggtacctacttttccacggtattaagagctattttagaaagctaaatgaatcgcaagttaacttggaaatcagtagaaagctaaagtgatcctaaatatgacagtgggcagcacctttctagcgtgagctgtagagtaacgagaagtgctttatactgaacgtggttgatgggaggagagacgaggcattcgggccggtggggcgtaagggttatcgttaagcacaagacacagaatagtttacacactgtgtgggggacggcttctcacgctttgtttactctcttcatccgttgtgactctaggcttcaggttgcattggggttcctctgtacagcaagatgtttcttgccttttgttaatgcattgttgtaaagtatttgatgtacattacagattaaagaagaaaagcgcgttgtgtatattacaccaatgccgccgtgtttcctcatctatggttctaaatattgcttcaatttcaaacttttgaaagatgtatggatttccagtttttctttactttctcccagtatgttttaacaaaaaaaaaaaaaagcaggaaaaaaggaatatttagcagtattgttcgttctgatatgtgaatttgtttgtgacaactaaacaaggcattcagcagtttctgacaattaacatacatcattccacactccttgtcaacaaagtgctttttcactgcctaaaattttagatgtagatatttgaaatagattttttcatttataccagttttctttatgatgatacagtgttaaaagaaaataaattacaattgatctgtcatccatatttgctaagaatgtctatttccaagaacctatatcttacaaaatacacattcttgcttgtgtgtctgtgtgtgtgggtgtatgtatgtccacgtactagaaaaattacctgtgtgagattttattttgacagaagctatttcatttgctgttcatcttgtacaaactttgtttttggttttttagtataaatgtacatcagtttgttccttttgtactgtatctattcttctgaccatctagtgactcaggatattaggccagttgaagtggagttataggattttcacacattcacgcatacttggatatcaaccctctctacaggtccgtttccttacacattttatcccctcagaacacgataaaccatggccaattcagtttcactttggggccaattacttgaagtatccacagaaaatgtaaactgctcgccttattcccccaaactttttgttcatgtggcagggagcagtacacaactatggaatagattattaaaactgaacttgaagctaacgttagaatagtggttaacagagctaagaaataaggctaaccatcgaaaagaacatgggccgcgggtaaactagctttgctctttagatgcaagtggctgaggccaataggtgcctagtaaatgttaactgttcttggaaaaaataaaaacatcagtaacaaaanaaannn

SEQ ID NO: 446129 - DNA, 407 bp, Homo sapiens
  misc_feature (3)..(3): n is a, c, g, or t
  misc_feature (8)..(8): n is a, c, g, or t
ctnccccnggtgatctagaggaccccgcctaagtggaagatgctccgaatagacaatgaccgtgtggtgtgcgcggtggccactgcgctgcggaacatggccttggacgtcagaaataaggagctcatcggcaaatacgccatgcgagacctagtccacaggcttccaggagggaacaacagcaacaacactgcaagcaaggccatgtcggatgacacagtgacagctgtctgctgcacactgcacgaagtgattaccaagaacatggagaacgccaaggcctggccgactcaggaggcatagagaagctggtgaacataaccaaaggcaggggcgacagatcatctctgaaagtggtgaaggcagcagcccaggtcttgaatacattatggcaatatcgggacctc

SEQ ID NO: 446130 - DNA, 5518 bp, Homo sapiens
  misc_feature (5512)..(5512): n is a, c, g, or t
  misc_feature (5516)..(5518): n is a, c, g, or t
gccagcatcccttgtcccgcggccgcgctcagacaacaaaagcggaagatgctgcagttgggcaaggtcaggaccttgccctgaagccgggcggcgccgcgcacgcctcttcccggactgaggagctgtcgccggcggagggtgcatgtttgcgaggaagccgccgggcgccgcgcctttgggagctatgcctgttccagaccagccttcatcagcctcagagaagacgagttccctgagccccggcttaaacacctccaacggggatggctctgaaacagaaaccacctctgccatcctcgcctcagtcaaagaacaggaattacagtttgaaaggctgacccgagagctggaggctgaacggcagatcgtagccagccagctggagcgatgcaagctcggatccgagactggcagcatgagcagcatgagttcagcagaagagcagtttcagtggcagtcacaagatggtcaaaaagatatcgaagatgagcttacaacaggtctcgagctggtggactcctgtattaggtcactacaggaatcaggaatacttgacccacaggattattctacaggtgaaaggcccagcctgctctcccagagtgcacttcagctcaattccaaacctgaagggtctttccagtatccggccagctaccatagcaaccagaccctggccctgggggaaaccaccccttcacagctcccggcccgaggcacacaagcccgagctacgggccagagcttcagccagggcacgaccagccgcgccggccacctggcggggcccgagcccgcgccgccgccgccgccgccgccgcgggagccgttcgcgcccagcctgggcagcgccttccacctgcccgacgcgccgcccgccgccgccgccgccgcgctctactactccagctccacgctgcccgcgccgccgcgcgggggctccccgctggccgcgccccagggcggttcgcccaccaagctgcagcgcggcggctcggcccccgagggcgccacctacgccgcgccgcgcggctcctcgcccaagcagtcgcccagccgcctggccaagtcctacagcaccagctcgcccatcaacatcgtcgtgtcctcggccggcctgtccccgatccgcgtgacctcgccccccaccgtgcagtccaccatctcctcctcgcccatccaccagctgagctccaccatcggcacgtacgccaccctgtcgcccaccaagcgcctggtccacgcgtccgagcagtacagcaagcactcgcaggagctgtatgccacggccaccctccagaggccgggcagcctggcagctggttcccgagcctcatacagcagccagcatgggcacctgggcccagagttgcgggccctgcagtccccagaacaccacatagatcccatctatgaagaccgcgtctatcagaagccccctatgaggagtctcagccagagccagggggaccctctgccgccagcacacaccggcacctaccgcacgagcacagccccatcttcccctggtgtcgactccgtccccttgcagcgcacaggcagccagcacggcccacagaatgccgccgcggccaccttccagagggccagctatgccgccggcccagcctccaattacgcggacccctaccgacagctgcagtattgtccctctgttgagtctccatacagcaaatccggccctgctctcccgcctgaaggcaccttggccaggtccccgtccattgatagcattcagaaagatcccagagaatttggatggagagacccggaactgccggaagtgattcagatgttgcagcaccagtttccctcggtccagtctaacgcggcagcctacttgcaacacctctgttttggagacaacaaaattaaagccgagataaggagacaaggaggcatccagctcctggtggacctgttggatcatcggatgaccgaagtccaccgtagtgcctgtggagctctgagaaacctggtgtatgggaaggccaacgatgataacaaaattgccctgaaaaactgtggtggcatcccagcactggtgaggttactccgcaagacgactgacctggagatccgggagctggtcacaggagtcctttggaacctctcctcatgcgatgcactcaaaatgccaatcatccaggatgccctagcagtactgaccaacgcggtgattatcccccactcaggctgggaaaattcgcctcttcaggatgatcggaaaatacagctgcattcatcacaggtgctgcgtaacgccaccgggtgcctaaggaatgttagttcggccggagaggaggcccgcagaaggatgagagagtgtgatgggcttacggatgccttgctgtacgtgatccagtctgcgctggggagcagtgagatcgatagcaagaccgttgaaaactgtgtgtgcattttaaggaacctctcgtaccggctggcggcagaaacgtctcagggacagcacatgggcacggacgagctggacgggctactctgtggcgaggccaatggcaaggatgctgagagctctgggtgctggggcaagaagaagaagaaaaagaaatcccaagatcagtgggatggagtaggacctcttccagactgtgctgaaccaccaaaagggatccagatgctgtggcacccatcaatagtcaaaccctacctcacactgctctctgagtgctcaaatccagacacgctggaaggggcggcaggcgccctgcagaacttggctgcagggagctggaagggctgggctgaggatgtggcaggcatggcatatgccctacgttcactgccagagggggctccctgcctgccacagtggtcagtatatatccgagccgctgtccgaaaagagaaaggcctgcccatcctcgtggagctgctccgaatagacaatgaccgtgtggtgtgcgcggtggccactgcgctgcggaacatggccttggacgtcagaaataaggagctcatcggcaaatacgccatgcgagacctagtccacaggcttccaggagggaacaacagcaacaacactgcaagcaaggccatgtcggatgacacagtgacagctgtctgctgcacactgcacgaagtgattaccaagaacatggagaacgccaaggccttacgggatgccggtggcatcgagaagttggtcggcatctccaaaagcaaaggagataaacactctccaaaagtggtcaaggctgcatctcaggtcctcaacagcatgtggcagtaccgagatctgaggagtctctacaaaaaggatggatggtcacaataccactttgtagcctcgtcttcaaccatcgagagggaccggcaaaggccctactcctcctcccgcacgccctccatctcccctgtgcgcgtgtctcccaacaaccgctcagcaagtgccccagcttcacctcgggaaatgatcagcctcaaagaaaggaaaacagactacgagtgcaccggcagcaacgccacctaccacggagctaaaggcgaacacacttccaggaaagatgccatgacagctcaaaacactggaatttcaactttgtataggaattcttatggtgcgcccgctgaagacatcaaacacaaccaggtttcagcacagccagtcccacaggagcccagcagaaaagattacgagacctaccagccatttcagaattccacaagaaattacgatgagtccttcttcgaggaccaggtccaccatcgccctcccgccagcgagtacaccatgcacctgggtctcaagtccaccggcaactacgttgacttctactcagctgcccgtccctacagtgaactgaactatgaaacgagccactacccggcctcccccgactcctgggtgtgaggagcagggcacaggcgctccgggaacagtgcatgtgcatgcataccacaagacatttctttctgttttgtttttttctcctgcaaatttagtttgttaaagcctgttccataggaaggctgtgataaccagtaaggaaatattaagagctattttagaaagctaaatgaatcgcaagttaacttggaaatcagtagaaagctaaagtgatcctaaatatgacagtgggcagcacctttctagcgtgagctgtagagtaacgagaagtgctttatactgaacgtggttgatgggaggagagacgaggcattcgggccggtggggcgtaagggttatcgttaagcacaagacacagaatagtttacacactgtgtgggggacggcttctcacgctttgtttactctcttcatccgttgtgactctaggcttcaggttgcattggggttcctctgtacagcaagatgtttcttgccttttgttaatgcattgttgtaaagtatttgatgtacattacagattaaagaagaaaagcgcgttgtgtatattacaccaatgccgccgtgtttcctcatctatggttctaaatattgcttcaatttcaaacttttgaaagatgtatggatttccagtttttctttactttctcccagtatgttttaacaaaaaaaaaaaaaagcaggaaaaaaggaatatttagcagtattgttcgttctgatatgtgaatttgtttgtgacaactaaacaaggcattcagcagtttctgacaattaacatacatcattccacactccttgtcaacaaagtgctttttcactgcctaaaattttagatgtagatatttgaaatagattttttcatttataccagttttctttatgatgatacagtgttaaaagaaaataaattacaattgatctgtcatccatatttgctaagaatgtctatttccaagaacctatatcttacaaaatacacattcttgcttgtgtgtctgtgtgtgtgggtgtatgtatgtccacgtactagaaaaattacctgtgtgagattttattttgacagaagctatttcatttgctgttcatcttgtacaaactttgtttttggttttttagtataaatgtacatcagtttgttccttttgtactgtatctattcttctgaccatctagtgactcaggatattaggccagttgaagtggagttataggattttcacacattcacgcatacttggatatcaaccctctctacaggtccgtttccttacacattttatcccctcagaacacgataaaccatggccaattcagtttcactttggggccaattacttgaagtatccacagaaaatgtaaactgctcgccttattcccccaaactttttgttcatgtggcagggagcagtacacaactatggaatagattattaaaactgaacttgaagctaacgttagaatagtggttaacagagctaagaaataaggctaaccatcgaaaagaacatgggccgcgggtaaactagctttgctctttagatgcaagtggctgaggccaataggtgcctagtaaatgttaactgttcttggaaaaaataaaaacatcagtaacaaaanaaannn

SEQ ID NO: 446131 - DNA, 4365 bp, Homo sapiens
gccagcatcccttgtcccgcggccgcgctcagacaacaaaagcggaagatgctgcagttgggcaaggtcaggaccttgccctgaagccgggcggcgccgcgcacgcctcttcccggactgaggagctgtcgccggcggagggtgcatgtttgcgaggaagccgccgggcgccgcgcctttgggagctatgcctgttccagaccagccttcatcagcctcagagaagacgagttccctgagccccggcttaaacacctccaacggggatggctctgaaacagaaaccacctctgccatcctcgcctcagtcaaagaacaggaattacagtttgaaaggctgacccgagagctggaggctgaacggcagatcgtagccagccagctggagcgatgcaagctcggatccgagactggcagcatgagcagcatgagttcagcagaagagcagtttcagtggcagtcacaagatggtcaaaaagatatcgaagatgagcttacaacaggtctcgagctggtggactcctgtattaggtcactacaggaatcaggaatacttgacccacaggattattctacaggtgaaaggcccagcctgctctcccagagtgcacttcagctcaattccaaacctgaagggtctttccagtatccggccagctaccatagcaaccagaccctggccctgggggaaaccaccccttcacagctcccggcccgaggcacacaagcccgagctacgggccagagcttcagccagggcacgaccagccgcgccggccacctggcggggcccgagcccgcgccgccgccgccgccgccgccgcgggagccgttcgcgcccagcctgggcagcgccttccacctgcccgacgcgccgcccgccgccgccgccgccgcgctctactactccagctccacgctgcccgcgccgccgcgcgggggctccccgctggccgcgccccagggcggttcgcccaccaagctgcagcgcggcggctcggcccccgagggcgccacctacgccgcgccgcgcggctcctcgcccaagcagtcgcccagccgcctggccaagtcctacagcaccagctcgcccatcaacatcgtcgtgtcctcggccggcctgtccccgatccgcgtgacctcgccccccaccgtgcagtccaccatctcctcctcgcccatccaccagctgagctccaccatcggcacgtacgccaccctgtcgcccaccaagcgcctggtccacgcgtccgagcagtacagcaagcactcgcaggagctgtatgccacggccaccctccagaggccgggcagcctggcagctggttcccgagcctcatacagcagccagcatgggcacctgggcccagagttgcgggccctgcagtccccagaacaccacatagatcccatctatgaagaccgcgtctatcagaagccccctatgaggagtctcagccagagccagggggaccctctgccgccagcacacaccggcacctaccgcacgagcacagccccatcttcccctggtgtcgactccgtccccttgcagcgcacaggcagccagcacggcccacagaatgccgccgcggccaccttccagagggccagctatgccgccggcccagcctccaattacgcggacccctaccgacagctgcagtattgtccctctgttgagtctccatacagcaaatccggccctgctctcccgcctgaaggcaccttggccaggtccccgtccattgatagcattcagaaagatcccagagaatttggatggagagacccggaactgccggaagtgattcagatgttgcagcaccagtttccctcggtccagtctaacgcggcagcctacttgcaacacctctgttttggagacaacaaaattaaagccgagataaggagacaaggaggcatccagctcctggtggacctgttggatcatcggatgaccgaagtccaccgtagtgcctgtggagctctgagaaacctggtgtatgggaaggccaacgatgataacaaaattgccctgaaaaactgtggtggcatcccagcactggtgaggttactccgcaagacgactgacctggagatccgggagctggtcacaggagtcctttggaacctctcctcatgcgatgcactcaaaatgccaatcatccaggatgccctagcagtactgaccaacgcggtgattatcccccactcaggctgggaaaattcgcctcttcaggatgatcggaaaatacagctgcattcatcacaggtgctgcgtaacgccaccgggtgcctaaggaatgttagttcggccggagaggaggcccgcagaaggatgagagagtgtgatgggcttacggatgccttgctgtacgtgatccagtctgcgctggggagcagtgagatcgatagcaagaccgttgaaaactgtgtgtgcattttaaggaacctctcgtaccggctggcggcagaaacgtctcagggacagcacatgggcacggacgagctggacgggctactctgtggcgaggccaatggcaaggatgctgagagctctgggtgctggggcaagaagaagaagaaaaagaaatcccaagatcagtgggatggagtaggacctcttccagactgtgctgaaccaccaaaagggatccagatgctgtggcacccatcaatagtcaaaccctacctcacactgctctctgagtgctcaaatccagacacgctggaaggggcggcaggcgccctgcagaacttggctgcagggagctggaagtggtcagtatatatccgagccgctgtccgaaaagagaaaggcctgcccatcctcgtggagctgctccgaatagacaatgaccgtgtggtgtgcgcggtggccactgcgctgcggaacatggccttggacgtcagaaataaggagctcatcggcaaatacgccatgcgagacctagtccacaggcttccaggagggaacaacagcaacaacactgcaagcaaggccatgtcggatgacacagtgacagctgtctgctgcacactgcacgaagtgattaccaagaacatggagaacgccaaggccttacgggatgccggtggcatcgagaagttggtcggcatctccaaaagcaaaggagataaacactctccaaaagtggtcaaggctgcatctcaggtcctcaacagcatgtggcagtaccgagatctgaggagtctctacaaaaaggatggatggtcacaataccactttgtagcctcgtcttcaaccatcgagagggaccggcaaaggccctactcctcctcccgcacgccctccatctcccctgtgcgcgtgtctcccaacaaccgctcagcaagtgccccagcttcacctcgggaaatgatcagcctcaaagaaaggaaaacagactacgagtgcaccggcagcaacgccacctaccacggagctaaaggcgaacacacttccaggaaagatgccatgacagctcaaaacactggaatttcaactttgtataggaattcttatggtgcgcccgctgaagacatcaaacacaaccaggtttcagcacagccagtcccacaggagcccagcagaaaagattacgagacctaccagccatttcagaattccacaagaaattacgatgagtccttcttcgaggaccaggtccaccatcgccctcccgccagcgagtacaccatgcacctgggtctcaagtccaccggcaactacgttgacttctactcagctgcccgtccctacagtgaactgaactatgaaacgagccactacccggcctcccccgactcctgggtgtgaggagcagggcacaggcgctccgggaacagtgcatgtgcatgcataccacaagacatttctttctgttttgtttttttctcctgcaaatttagtttgttaaagcctgttccataggaaggctgtgataaccagtaaggaaatattaagagctattttagaaagctaaatgaatcgcaagttaacttggaaatcagtagaaagctaaagtgatcctaaatatgacagtgggcagcacctttctagcgtgagctgtagagtaacgagaagtgctttatactgaacgtggttgatgggaggagagacgaggcattcgggccggtggggcgtaagggttatcgttaagcacaagacacagaatagtttacacactgtgtgggggacggcttctcacgctttgtttactctcttcatccgttgtgactctaggcttcaggttgcattggggttcctctgtacagcaagatgtttcttgccttttgttaatgcattgttgtaaagtatttgatgtacattacagattaaagaagaaaagcgcgttgtgt

SEQ ID NO: 446132 - DNA, 2643 bp, Homo sapiens
  misc_feature (25)..(25): n is a, c, g, or t
  misc_feature (2637)..(2637): n is a, c, g, or t
  misc_feature (2641)..(2643): n is a, c, g, or t
tacgacatagacagattcgaatcgnctcgtaccgcctaatggatgctccgaatagacaatgaccgtgtggtgtgcgcggtggccactgcgctgcggaacatggccttggacgtcagaaataaggagctcatcggcaaatacgccatgcgagacctagtccacaggcttccaggagggaacaacagcaacaacactgcaagcaaggccatgtcggatgacacagtgacagctgtctgctgcacactgcacgaagtgattaccaagaacatggagaacgccaaggccttacgggatgccggtggcatcgagaagttggtcggcatctccaaaagcaaaggagataaacactctccaaaagtggtcaaggctgcatctcaggtcctcaacagcatgtggcagtaccgagatctgaggagtctctacaaaaaggatggatggtcacaataccactttgtagcctcgtcttcaaccatcgagagggaccggcaaaggccctactcctcctcccgcacgccctccatctcccctgtgcgcgtgtctcccaacaaccgctcagcaagtgccccagcttcacctcgggaaatgatcagcctcaaagaaaggaaaacagactacgagtgcaccggcagcaacgccacctaccacggagctaaaggcgaacacacttccaggaaagatgccatgacagctcaaaacactggaatttcaactttgtataggaattcttatggtgcgcccgctgaagacatcaaacacaaccaggtttcagcacagccagtcccacaggagcccagcagaaaagattacgagacctaccagccatttcagaattccacaagaaattacgatgagtccttcttcgaggaccaggtccaccatcgccctcccgccagcgagtacaccatgcacctgggtctcaagtccaccggcaactacgttgacttctactcagctgcccgtccctacagtgaactgaactatgaaacgagccactacccggcctcccccgactcctgggtgtgaggagcagggcacaggcgctccgggaacagtgcatgtgcatgcataccacaagacatttctttctgttttgtttttttctcctgcaaatttagtttgttaaagcctgttccataggaaggctgtgataaccagtaaggaaatattaagagctattttagaaagctaaatgaatcgcaagttaacttggaaatcagtagaaagctaaagtgatcctaaatatgacagtgggcagcacctttctagcgtgagctgtagagtaacgagaagtgctttatactgaacgtggttgatgggaggagagacgaggcattcgggccggtggggcgtaagggttatcgttaagcacaagacacagaatagtttacacactgtgtgggggacggcttctcacgctttgtttactctcttcatccgttgtgactctaggcttcaggttgcattggggttcctctgtacagcaagatgtttcttgccttttgttaatgcattgttgtaaagtatttgatgtacattacagattaaagaagaaaagcgcgttgtgtatattacaccaatgccgccgtgtttcctcatctatggttctaaatattgcttcaatttcaaacttttgaaagatgtatggatttccagtttttctttactttctcccagtatgttttaacaaaaaaaaaaaaaagcaggaaaaaaggaatatttagcagtattgttcgttctgatatgtgaatttgtttgtgacaactaaacaaggcattcagcagtttctgacaattaacatacatcattccacactccttgtcaacaaagtgctttttcactgcctaaaattttagatgtagatatttgaaatagattttttcatttataccagttttctttatgatgatacagtgttaaaagaaaataaattacaattgatctgtcatccatatttgctaagaatgtctatttccaagaacctatatcttacaaaatacacattcttgcttgtgtgtctgtgtgtgtgggtgtatgtatgtccacgtactagaaaaattacctgtgtgagattttattttgacagaagctatttcatttgctgttcatcttgtacaaactttgtttttggttttttagtataaatgtacatcagtttgttccttttgtactgtatctattcttctgaccatctagtgactcaggatattaggccagttgaagtggagttataggattttcacacattcacgcatacttggatatcaaccctctctacaggtccgtttccttacacattttatcccctcagaacacgataaaccatggccaattcagtttcactttggggccaattacttgaagtatccacagaaaatgtaaactgctcgccttattcccccaaactttttgttcatgtggcagggagcagtacacaactatggaatagattattaaaactgaacttgaagctaacgttagaatagtggttaacagagctaagaaataaggctaaccatcgaaaagaacatgggccgcgggtaaactagctttgctctttagatgcaagtggctgaggccaataggtgcctagtaaatgttaactgttcttggaaaaaataaaaacatcagtaacaaaanaaannn

SEQ ID NO: 446133 - DNA, 2725 bp, Homo sapiens
  misc_feature (2719)..(2719): n is a, c, g, or t
  misc_feature (2723)..(2725): n is a, c, g, or t
gggtacactccatgaccctgttgctgggtatcagcagcagtggctgcagaacagcggatattggtgaaccgcagatgctgctgcctgatcgttcttctggaagttttgtctcagaggagtacctggccgtgtgaggtgtcagtccacccctactggggggtgcctcccagttaggctactcgggggtcagggacccacttgaggaggcagtctgcccgttctcagatctcaagctgcatgctgggagaacccaggagggaacaacagcaacaacactgcaagcaaggccatgtcggatgacacagtgacagctgtctgctgcacactgcacgaagtgattaccaagaacatggagaacgccaaggccttacgggatgccggtggcatcgagaagttggtcggcatctccaaaagcaaaggagataaacactctccaaaagtggtcaaggctgcatctcaggtcctcaacagcatgtggcagtaccgagatctgaggagtctctacaaaaaggatggatggtcacaataccactttgtagcctcgtcttcaaccatcgagagggaccggcaaaggccctactcctcctcccgcacgccctccatctcccctgtgcgcgtgtctcccaacaaccgctcagcaagtgccccagcttcacctcgggaaatgatcagcctcaaagaaaggaaaacagactacgagtgcaccggcagcaacgccacctaccacggagctaaaggcgaacacacttccaggaaagatgccatgacagctcaaaacactggaatttcaactttgtataggaattcttatggtgcgcccgctgaagacatcaaacacaaccaggtttcagcacagccagtcccacaggagcccagcagaaaagattacgagacctaccagccatttcagaattccacaagaaattacgatgagtccttcttcgaggaccaggtccaccatcgccctcccgccagcgagtacaccatgcacctgggtctcaagtccaccggcaactacgttgacttctactcagctgcccgtccctacagtgaactgaactatgaaacgagccactacccggcctcccccgactcctgggtgtgaggagcagggcacaggcgctccgggaacagtgcatgtgcatgcataccacaagacatttctttctgttttgtttttttctcctgcaaatttagtttgttaaagcctgttccataggaaggctgtgataaccagtaaggaaatattaagagctattttagaaagctaaatgaatcgcaagttaacttggaaatcagtagaaagctaaagtgatcctaaatatgacagtgggcagcacctttctagcgtgagctgtagagtaacgagaagtgctttatactgaacgtggttgatgggaggagagacgaggcattcgggccggtggggcgtaagggttatcgttaagcacaagacacagaatagtttacacactgtgtgggggacggcttctcacgctttgtttactctcttcatccgttgtgactctaggcttcaggttgcattggggttcctctgtacagcaagatgtttcttgccttttgttaatgcattgttgtaaagtatttgatgtacattacagattaaagaagaaaagcgcgttgtgtatattacaccaatgccgccgtgtttcctcatctatggttctaaatattgcttcaatttcaaacttttgaaagatgtatggatttccagtttttctttactttctcccagtatgttttaacaaaaaaaaaaaaaagcaggaaaaaaggaatatttagcagtattgttcgttctgatatgtgaatttgtttgtgacaactaaacaaggcattcagcagtttctgacaattaacatacatcattccacactccttgtcaacaaagtgctttttcactgcctaaaattttagatgtagatatttgaaatagattttttcatttataccagttttctttatgatgatacagtgttaaaagaaaataaattacaattgatctgtcatccatatttgctaagaatgtctatttccaagaacctatatcttacaaaatacacattcttgcttgtgtgtctgtgtgtgtgggtgtatgtatgtccacgtactagaaaaattacctgtgtgagattttattttgacagaagctatttcatttgctgttcatcttgtacaaactttgtttttggttttttagtataaatgtacatcagtttgttccttttgtactgtatctattcttctgaccatctagtgactcaggatattaggccagttgaagtggagttataggattttcacacattcacgcatacttggatatcaaccctctctacaggtccgtttccttacacattttatcccctcagaacacgataaaccatggccaattcagtttcactttggggccaattacttgaagtatccacagaaaatgtaaactgctcgccttattcccccaaactttttgttcatgtggcagggagcagtacacaactatggaatagattattaaaactgaacttgaagctaacgttagaatagtggttaacagagctaagaaataaggctaaccatcgaaaagaacatgggccgcgggtaaactagctttgctctttagatgcaagtggctgaggccaataggtgcctagtaaatgttaactgttcttggaaaaaataaaaacatcagtaacaaaanaaannn

SEQ ID NO: 446134 - DNA, 1939 bp, Homo sapiens
  misc_feature (29)..(32): n is a, c, g, or t
  misc_feature (1933)..(1933): n is a, c, g, or t
  misc_feature (1937)..(1939): n is a, c, g, or t
agcagtgaaagaaacgaacgaggaaagannnnttgaacgaacaagatgcgagttcagggtttcagcacagccagtcccacaggagcccagcagaaaagattacgagacctaccagccatttcagaattccacaagaaattacgatgagtccttcttcgaggaccaggtccaccatcgccctcccgccagcgagtacaccatgcacctgggtctcaagtccaccggcaactacgttgacttctactcagctgcccgtccctacagtgaactgaactatgaaacgagccactacccggcctcccccgactcctgggtgtgaggagcagggcacaggcgctccgggaacagtgcatgtgcatgcataccacaagacatttctttctgttttgtttttttctcctgcaaatttagtttgttaaagcctgttccataggaaggctgtgataaccagtaaggaaatattaagagctattttagaaagctaaatgaatcgcaagttaacttggaaatcagtagaaagctaaagtgatcctaaatatgacagtgggcagcacctttctagcgtgagctgtagagtaacgagaagtgctttatactgaacgtggttgatgggaggagagacgaggcattcgggccggtggggcgtaagggttatcgttaagcacaagacacagaatagtttacacactgtgtgggggacggcttctcacgctttgtttactctcttcatccgttgtgactctaggcttcaggttgcattggggttcctctgtacagcaagatgtttcttgccttttgttaatgcattgttgtaaagtatttgatgtacattacagattaaagaagaaaagcgcgttgtgtatattacaccaatgccgccgtgtttcctcatctatggttctaaatattgcttcaatttcaaacttttgaaagatgtatggatttccagtttttctttactttctcccagtatgttttaacaaaaaaaaaaaaaagcaggaaaaaaggaatatttagcagtattgttcgttctgatatgtgaatttgtttgtgacaactaaacaaggcattcagcagtttctgacaattaacatacatcattccacactccttgtcaacaaagtgctttttcactgcctaaaattttagatgtagatatttgaaatagattttttcatttataccagttttctttatgatgatacagtgttaaaagaaaataaattacaattgatctgtcatccatatttgctaagaatgtctatttccaagaacctatatcttacaaaatacacattcttgcttgtgtgtctgtgtgtgtgggtgtatgtatgtccacgtactagaaaaattacctgtgtgagattttattttgacagaagctatttcatttgctgttcatcttgtacaaactttgtttttggttttttagtataaatgtacatcagtttgttccttttgtactgtatctattcttctgaccatctagtgactcaggatattaggccagttgaagtggagttataggattttcacacattcacgcatacttggatatcaaccctctctacaggtccgtttccttacacattttatcccctcagaacacgataaaccatggccaattcagtttcactttggggccaattacttgaagtatccacagaaaatgtaaactgctcgccttattcccccaaactttttgttcatgtggcagggagcagtacacaactatggaatagattattaaaactgaacttgaagctaacgttagaatagtggttaacagagctaagaaataaggctaaccatcgaaaagaacatgggccgcgggtaaactagctttgctctttagatgcaagtggctgaggccaataggtgcctagtaaatgttaactgttcttggaaaaaataaaaacatcagtaacaaaanaaannn

SEQ ID NO: 446135 - DNA, 1932 bp, Homo sapiens
  misc_feature (40)..(40): n is a, c, g, or t
  misc_feature (1926)..(1926): n is a, c, g, or t
  misc_feature (1930)..(1932): n is a, c, g, or t
actacaacgcccaacgccccccattgtgacacactaaaanaaaagccttgtgtttcagcacagccagtcccacaggagcccagcagaaaagattacgagacctaccagccatttcagaattccacaagaaattacgatgagtccttcttcgaggaccaggtccaccatcgccctcccgccagcgagtacaccatgcacctgggtctcaagtccaccggcaactacgttgacttctactcagctgcccgtccctacagtgaactgaactatgaaacgagccactacccggcctcccccgactcctgggtgtgaggagcagggcacaggcgctccgggaacagtgcatgtgcatgcataccacaagacatttctttctgttttgtttttttctcctgcaaatttagtttgttaaagcctgttccataggaaggctgtgataaccagtaaggaaatattaagagctattttagaaagctaaatgaatcgcaagttaacttggaaatcagtagaaagctaaagtgatcctaaatatgacagtgggcagcacctttctagcgtgagctgtagagtaacgagaagtgctttatactgaacgtggttgatgggaggagagacgaggcattcgggccggtggggcgtaagggttatcgttaagcacaagacacagaatagtttacacactgtgtgggggacggcttctcacgctttgtttactctcttcatccgttgtgactctaggcttcaggttgcattggggttcctctgtacagcaagatgtttcttgccttttgttaatgcattgttgtaaagtatttgatgtacattacagattaaagaagaaaagcgcgttgtgtatattacaccaatgccgccgtgtttcctcatctatggttctaaatattgcttcaatttcaaacttttgaaagatgtatggatttccagtttttctttactttctcccagtatgttttaacaaaaaaaaaaaaaagcaggaaaaaaggaatatttagcagtattgttcgttctgatatgtgaatttgtttgtgacaactaaacaaggcattcagcagtttctgacaattaacatacatcattccacactccttgtcaacaaagtgctttttcactgcctaaaattttagatgtagatatttgaaatagattttttcatttataccagttttctttatgatgatacagtgttaaaagaaaataaattacaattgatctgtcatccatatttgctaagaatgtctatttccaagaacctatatcttacaaaatacacattcttgcttgtgtgtctgtgtgtgtgggtgtatgtatgtccacgtactagaaaaattacctgtgtgagattttattttgacagaagctatttcatttgctgttcatcttgtacaaactttgtttttggttttttagtataaatgtacatcagtttgttccttttgtactgtatctattcttctgaccatctagtgactcaggatattaggccagttgaagtggagttataggattttcacacattcacgcatacttggatatcaaccctctctacaggtccgtttccttacacattttatcccctcagaacacgataaaccatggccaattcagtttcactttggggccaattacttgaagtatccacagaaaatgtaaactgctcgccttattcccccaaactttttgttcatgtggcagggagcagtacacaactatggaatagattattaaaactgaacttgaagctaacgttagaatagtggttaacagagctaagaaataaggctaaccatcgaaaagaacatgggccgcgggtaaactagctttgctctttagatgcaagtggctgaggccaataggtgcctagtaaatgttaactgttcttggaaaaaataaaaacatcagtaacaaaanaaannn

SEQ ID NO: 446136 - DNA, 214 bp, Homo sapiens
agaaaaccagaacagtcatttatgaaatattttcttttagagtcaggtacatttcatacacgagctaaccatgtgttaacagtgtggtaggatttctctctcatattctccccgcttctttccttttgttcagagaatttggatggagagacccggaactgccggaagtgattcagatgttgcagcaccagtttccctcggtccagtctaacgc

SEQ ID NO: 446137 - DNA, 270 bp, Homo sapiens
caggctgggaaaattcgcctcttcaggatgatcggaaaatacagctgcattcatcacaggtgctgcgtaacgccaccgggtgcctaaggtcagtcctgtgtcacgagtgcctcctcccaccatcttcccctggccagacactgtctctttccataactttagtggctcttttactgaggatcagaccattctgaaaacatgaatgttgatgtggcaacggagtataagaagttaattttaaattttctaaccaggtaataaagacatata

SEQ ID NO: 446138 - DNA, 5443 bp, Homo sapiens
  misc_feature (5437)..(5437): n is a, c, g, or t
  misc_feature (5441)..(5443): n is a, c, g, or t
gccagcatcccttgtcccgcggccgcgctcagacaacaaaagcggaagatgctgcagttgggcaaggtcaggaccttgccctgaagccgggcggcgccgcgcacgcctcttcccggactgaggagctgtcgccggcggagggtgcatgtttgcgaggaagccgccgggcgccgcgcctttgggagctatgcctgttccagaccagccttcatcagcctcagagaagacgagttccctgagccccggcttaaacacctccaacggggatggctctgaaacagaaaccacctctgccatcctcgcctcagtcaaagaacaggaattacagtttgaaaggctgacccgagagctggaggctgaacggcagatcgtagccagccagctggagcgatgcaagctcggatccgagactggcagcatgagcagcatgagttcagcagaagagcagtttcagtggcagtcacaagatggtcaaaaagatatcgaagatgagcttacaacaggtctcgagctggtggactcctgtattaggtcactacaggaatcaggaatacttgacccacaggattattctacaggtgaaaggcccagcctgctctcccagagtgcacttcagctcaattccaaacctgaagggtctttccagtatccggccagctaccatagcaaccagaccctggccctgggggaaaccaccccttcacagctcccggcccgaggcacacaagcccgagctacgggccagagcttcagccagggcacgaccagccgcgccggccacctggcggggcccgagcccgcgccgccgccgccgccgccgccgcgggagccgttcgcgcccagcctgggcagcgccttccacctgcccgacgcgccgcccgccgccgccgccgccgcgctctactactccagctccacgctgcccgcgccgccgcgcgggggctccccgctggccgcgccccagggcggttcgcccaccaagctgcagcgcggcggctcggcccccgagggcgccacctacgccgcgccgcgcggctcctcgcccaagcagtcgcccagccgcctggccaagtcctacagcaccagctcgcccatcaacatcgtcgtgtcctcggccggcctgtccccgatccgcgtgacctcgccccccaccgtgcagtccaccatctcctcctcgcccatccaccagctgagctccaccatcggcacgtacgccaccctgtcgcccaccaagcgcctggtccacgcgtccgagcagtacagcaagcactcgcaggagctgtatgccacggccaccctccagaggccgggcagcctggcagctggttcccgagcctcatacagcagccagcatgggcacctgggcccagagttgcgggccctgcagtccccagaacaccacatagatcccatctatgaagaccgcgtctatcagaagccccctatgaggagtctcagccagagccagggggaccctctgccgccagcacacaccggcacctaccgcacgagcacagccccatcttcccctggtgtcgactccgtccccttgcagcgcacaggcagccagcacggcccacagaatgccgccgcggccaccttccagagggccagctatgccgccggcccagcctccaattacgcggacccctaccgacagctgcagtattgtccctctgttgagtctccatacagcaaatccggccctgctctcccgcctgaaggcaccttggccaggtccccgtccattgatagcattcagaaagatcccagagaatttggatggagagacccggaactgccggaagtgattcagatgttgcagcaccagtttccctcggtccagtctaacgcggcagcctacttgcaacacctctgttttggagacaacaaaattaaagccgagataaggagacaaggaggcatccagctcctggtggacctgttggatcatcggatgaccgaagtccaccgtagtgcctgtggagctctgagaaacctggtgtatgggaaggccaacgatgataacaaaattgccctgaaaaactgtggtggcatcccagcactggtgaggttactccgcaagacgactgacctggagatccgggagctggtcacaggagtcctttggaacctctcctcatgcgatgcactcaaaatgccaatcatccaggatgccctagcagtactgaccaacgcggtgattatcccccactcaggctgggaaaattcgcctcttcaggatgatcggaaaatacagctgcattcatcacaggtgctgcgtaacgccaccgggtgcctaaggaatgttagttcggccggagaggaggcccgcagaaggatgagagagtgtgatgggcttacggatgccttgctgtacgtgatccagtctgcgctggggagcagtgagatcgatagcaagaccgttgaaaactgtgtgtgcattttaaggaacctctcgtaccggctggcggcagaaacgtctcagggacagcacatgggcacggacgagctggacgggctactctgtggcgaggccaatggcaaggatgctgagagctctgggtgctggggcaagaagaagaagaaaaagaaatcccaagatcagtgggatggagtaggacctcttccagactgtgctgaaccaccaaaagggatccagatgctgtggcacccatcaatagtcaaaccctacctcacactgctctctgagtgctcaaatccagacacgctggaaggggcggcaggcgccctgcagaacttggctgcagggagctggaagtggtcagtatatatccgagccgctgtccgaaaagagaaaggcctgcccatcctcgtggagctgctccgaatagacaatgaccgtgtggtgtgcgcggtggccactgcgctgcggaacatggccttggacgtcagaaataaggagctcatcggcaaatacgccatgcgagacctagtccacaggcttccaggagggaacaacagcaacaacactgcaagcaaggccatgtcggatgacacagtgacagctgtctgctgcacactgcacgaagtgattaccaagaacatggagaacgccaaggccttacgggatgccggtggcatcgagaagttggtcggcatctccaaaagcaaaggagataaacactctccaaaagtggtcaaggctgcatctcaggtcctcaacagcatgtggcagtaccgagatctgaggagtctctacaaaaaggatggatggtcacaataccactttgtagcctcgtcttcaaccatcgagagggaccggcaaaggccctactcctcctcccgcacgccctccatctcccctgtgcgcgtgtctcccaacaaccgctcagcaagtgccccagcttcacctcgggaaatgatcagcctcaaagaaaggaaaacagactacgagtgcaccggcagcaacgccacctaccacggagctaaaggcgaacacacttccaggaaagatgccatgacagctcaaaacactggaatttcaactttgtataggaattcttatggtgcgcccgctgaagacatcaaacacaaccaggtttcagcacagccagtcccacaggagcccagcagaaaagattacgagacctaccagccatttcagaattccacaagaaattacgatgagtccttcttcgaggaccaggtccaccatcgccctcccgccagcgagtacaccatgcacctgggtctcaagtccaccggcaactacgttgacttctactcagctgcccgtccctacagtgaactgaactatgaaacgagccactacccggcctcccccgactcctgggtgtgaggagcagggcacaggcgctccgggaacagtgcatgtgcatgcataccacaagacatttctttctgttttgtttttttctcctgcaaatttagtttgttaaagcctgttccataggaaggctgtgataaccagtaaggaaatattaagagctattttagaaagctaaatgaatcgcaagttaacttggaaatcagtagaaagctaaagtgatcctaaatatgacagtgggcagcacctttctagcgtgagctgtagagtaacgagaagtgctttatactgaacgtggttgatgggaggagagacgaggcattcgggccggtggggcgtaagggttatcgttaagcacaagacacagaatagtttacacactgtgtgggggacggcttctcacgctttgtttactctcttcatccgttgtgactctaggcttcaggttgcattggggttcctctgtacagcaagatgtttcttgccttttgttaatgcattgttgtaaagtatttgatgtacattacagattaaagaagaaaagcgcgttgtgtatattacaccaatgccgccgtgtttcctcatctatggttctaaatattgcttcaatttcaaacttttgaaagatgtatggatttccagtttttctttactttctcccagtatgttttaacaaaaaaaaaaaaaagcaggaaaaaaggaatatttagcagtattgttcgttctgatatgtgaatttgtttgtgacaactaaacaaggcattcagcagtttctgacaattaacatacatcattccacactccttgtcaacaaagtgctttttcactgcctaaaattttagatgtagatatttgaaatagattttttcatttataccagttttctttatgatgatacagtgttaaaagaaaataaattacaattgatctgtcatccatatttgctaagaatgtctatttccaagaacctatatcttacaaaatacacattcttgcttgtgtgtctgtgtgtgtgggtgtatgtatgtccacgtactagaaaaattacctgtgtgagattttattttgacagaagctatttcatttgctgttcatcttgtacaaactttgtttttggttttttagtataaatgtacatcagtttgttccttttgtactgtatctattcttctgaccatctagtgactcaggatattaggccagttgaagtggagttataggattttcacacattcacgcatacttggatatcaaccctctctacaggtccgtttccttacacattttatcccctcagaacacgataaaccatggccaattcagtttcactttggggccaattacttgaagtatccacagaaaatgtaaactgctcgccttattcccccaaactttttgttcatgtggcagggagcagtacacaactatggaatagattattaaaactgaacttgaagctaacgttagaatagtggttaacagagctaagaaataaggctaaccatcgaaaagaacatgggccgcgggtaaactagctttgctctttagatgcaagtggctgaggccaataggtgcctagtaaatgttaactgttcttggaaaaaataaaaacatcagtaacaaaanaaannn

SEQ ID NO: 446139 - DNA, 502 bp, Homo sapiens
gccagcatcccttgtcccgcggccgcgctcagacaacaaaagcggaagatgctgcagttgggcaaggtcaggaccttgccctgaagccgggcggcgccgcgcacgcctcttcccggactgaggagctgtcgccggcggagggtgcatgtttgcgaggaagccgccgggcgccgcgcctttgggagctatgcctgttccagaccagccttcatcagcctcagagaagacgagttccctgagccccggcttaaacacctccaacggggatggctctgaaacagaaaccacctctgccatcctcgcctcagtcaaagaacaggaattacagtttgaaaggctgacccgagagctggaggctgaacggcagatcgtagccagccagctggagcgatgcaagctcggatccgagactggcagcatgagcagcatgagaagcagaaggaaaacacttcacctccctacctctacatctgttgtttcaacctgaagtctcgggaacatg

SEQ ID NO: 446140 - DNA, 2640 bp, Homo sapiens
  misc_feature (3)..(3): n is a, c, g, or t
  misc_feature (8)..(8): n is a, c, g, or t
  misc_feature (2634)..(2634): n is a, c, g, or t
  misc_feature (2638)..(2640): n is a, c, g, or t
ctnccccnggtgatctagaggaccccgcctaagtggaagatgctccgaatagacaatgaccgtgtggtgtgcgcggtggccactgcgctgcggaacatggccttggacgtcagaaataaggagctcatcggcaaatacgccatgcgagacctagtccacaggcttccaggagggaacaacagcaacaacactgcaagcaaggccatgtcggatgacacagtgacagctgtctgctgcacactgcacgaagtgattaccaagaacatggagaacgccaaggccttacgggatgccggtggcatcgagaagttggtcggcatctccaaaagcaaaggagataaacactctccaaaagtggtcaaggctgcatctcaggtcctcaacagcatgtggcagtaccgagatctgaggagtctctacaaaaaggatggatggtcacaataccactttgtagcctcgtcttcaaccatcgagagggaccggcaaaggccctactcctcctcccgcacgccctccatctcccctgtgcgcgtgtctcccaacaaccgctcagcaagtgccccagcttcacctcgggaaatgatcagcctcaaagaaaggaaaacagactacgagtgcaccggcagcaacgccacctaccacggagctaaaggcgaacacacttccaggaaagatgccatgacagctcaaaacactggaatttcaactttgtataggaattcttatggtgcgcccgctgaagacatcaaacacaaccaggtttcagcacagccagtcccacaggagcccagcagaaaagattacgagacctaccagccatttcagaattccacaagaaattacgatgagtccttcttcgaggaccaggtccaccatcgccctcccgccagcgagtacaccatgcacctgggtctcaagtccaccggcaactacgttgacttctactcagctgcccgtccctacagtgaactgaactatgaaacgagccactacccggcctcccccgactcctgggtgtgaggagcagggcacaggcgctccgggaacagtgcatgtgcatgcataccacaagacatttctttctgttttgtttttttctcctgcaaatttagtttgttaaagcctgttccataggaaggctgtgataaccagtaaggaaatattaagagctattttagaaagctaaatgaatcgcaagttaacttggaaatcagtagaaagctaaagtgatcctaaatatgacagtgggcagcacctttctagcgtgagctgtagagtaacgagaagtgctttatactgaacgtggttgatgggaggagagacgaggcattcgggccggtggggcgtaagggttatcgttaagcacaagacacagaatagtttacacactgtgtgggggacggcttctcacgctttgtttactctcttcatccgttgtgactctaggcttcaggttgcattggggttcctctgtacagcaagatgtttcttgccttttgttaatgcattgttgtaaagtatttgatgtacattacagattaaagaagaaaagcgcgttgtgtatattacaccaatgccgccgtgtttcctcatctatggttctaaatattgcttcaatttcaaacttttgaaagatgtatggatttccagtttttctttactttctcccagtatgttttaacaaaaaaaaaaaaaagcaggaaaaaaggaatatttagcagtattgttcgttctgatatgtgaatttgtttgtgacaactaaacaaggcattcagcagtttctgacaattaacatacatcattccacactccttgtcaacaaagtgctttttcactgcctaaaattttagatgtagatatttgaaatagattttttcatttataccagttttctttatgatgatacagtgttaaaagaaaataaattacaattgatctgtcatccatatttgctaagaatgtctatttccaagaacctatatcttacaaaatacacattcttgcttgtgtgtctgtgtgtgtgggtgtatgtatgtccacgtactagaaaaattacctgtgtgagattttattttgacagaagctatttcatttgctgttcatcttgtacaaactttgtttttggttttttagtataaatgtacatcagtttgttccttttgtactgtatctattcttctgaccatctagtgactcaggatattaggccagttgaagtggagttataggattttcacacattcacgcatacttggatatcaaccctctctacaggtccgtttccttacacattttatcccctcagaacacgataaaccatggccaattcagtttcactttggggccaattacttgaagtatccacagaaaatgtaaactgctcgccttattcccccaaactttttgttcatgtggcagggagcagtacacaactatggaatagattattaaaactgaacttgaagctaacgttagaatagtggttaacagagctaagaaataaggctaaccatcgaaaagaacatgggccgcgggtaaactagctttgctctttagatgcaagtggctgaggccaataggtgcctagtaaatgttaactgttcttggaaaaaataaaaacatcagtaacaaaanaaannn

SEQ ID NO: 446141 - DNA, 3583 bp, Homo sapiens
gccagcatcccttgtcccgcggccgcgctcagacaacaaaagcggaagatgctgcagttgggcaaggtcaggaccttgccctgaagccgggcggcgccgcgcacgcctcttcccggactgaggagctgtcgccggcggagggtgcatgtttgcgaggaagccgccgggcgccgcgcctttgggagctatgcctgttccagaccagccttcatcagcctcagagaagacgagttccctgagccccggcttaaacacctccaacggggatggctctgaaacagaaaccacctctgccatcctcgcctcagtcaaagaacaggaattacagtttgaaaggctgacccgagagctggaggctgaacggcagatcgtagccagccagctggagcgatgcaagctcggatccgagactggcagcatgagcagcatgagttcagcagaagagcagtttcagtggcagtcacaagatggtcaaaaagatatcgaagatgagcttacaacaggtctcgagctggtggactcctgtattaggtcactacaggaatcaggaatacttgacccacaggattattctacaggtgaaaggcccagcctgctctcccagagtgcacttcagctcaattccaaacctgaagggtctttccagtatccggccagctaccatagcaaccagaccctggccctgggggaaaccaccccttcacagctcccggcccgaggcacacaagcccgagctacgggccagagcttcagccagggcacgaccagccgcgccggccacctggcggggcccgagcccgcgccgccgccgccgccgccgccgcgggagccgttcgcgcccagcctgggcagcgccttccacctgcccgacgcgccgcccgccgccgccgccgccgcgctctactactccagctccacgctgcccgcgccgccgcgcgggggctccccgctggccgcgccccagggcggttcgcccaccaagctgcagcgcggcggctcggcccccgagggcgccacctacgccgcgccgcgcggctcctcgcccaagcagtcgcccagccgcctggccaagtcctacagcaccagctcgcccatcaacatcgtcgtgtcctcggccggcctgtccccgatccgcgtgacctcgccccccaccgtgcagtccaccatctcctcctcgcccatccaccagctgagctccaccatcggcacgtacgccaccctgtcgcccaccaagcgcctggtccacgcgtccgagcagtacagcaagcactcgcaggagctgtatgccacggccaccctccagaggccgggcagcctggcagctggttcccgagcctcatacagcagccagcatgggcacctgggcccagagttgcgggccctgcagtccccagaacaccacatagatcccatctatgaagaccgcgtctatcagaagccccctatgaggagtctcagccagagccagggggaccctctgccgccagcacacaccggcacctaccgcacgagcacagccccatcttcccctggtgtcgactccgtccccttgcagcgcacaggcagccagcacggcccacagaatgccgccgcggccaccttccagagggccagctatgccgccggcccagcctccaattacgcggacccctaccgacagctgcagtattgtccctctgttgagtctccatacagcaaatccggccctgctctcccgcctgaaggcaccttggccaggtccccgtccattgatagcattcagaaagatcccagagaatttggatggagagacccggaactgccggaagtgattcagatgttgcagcaccagtttccctcggtccagtctaacgcggcagcctacttgcaacacctctgttttggagacaacaaaattaaagccgagataaggagacaaggaggcatccagctcctggtggacctgttggatcatcggatgaccgaagtccaccgtagtgcctgtggagctctgagaaacctggtgtatgggaaggccaacgatgataacaaaattgccctgaaaaactgtggtggcatcccagcactggtgaggttactccgcaagacgactgacctggagatccgggagctggtcacaggagtcctttggaacctctcctcatgcgatgcactcaaaatgccaatcatccaggatgccctagcagtactgaccaacgcggtgattatcccccactcaggctgggaaaattcgcctcttcaggatgatcggaaaatacagctgcattcatcacaggtgctgcgtaacgccaccgggtgcctaaggaatgttagttcggccggagaggaggcccgcagaaggatgagagagtgtgatgggcttacggatgccttgctgtacgtgatccagtctgcgctggggagcagtgagatcgatagcaagaccgttgaaaactgtgtgtgcattttaaggaacctctcgtaccggctggcggcagaaacgtctcagggacagcacatgggcacggacgagctggacgggctactctgtggcgaggccaatggcaaggatgctgagagctctgggtgctggggcaagaagaagaagaaaaagaaatcccaagatcagtgggatggagtaggacctcttccagactgtgctgaaccaccaaaagggatccagatgctgtggcacccatcaatagtcaaaccctacctcacactgctctctgagtgctcaaatccagacacgctggaaggggcggcaggcgccctgcagaacttggctgcagggagctggaagggctgggctgaggatgtggcaggcatggcatatgccctacgttcactgccagagggggctccctgcctgccacagtggtcagtatatatccgagccgctgtccgaaaagagaaaggcctgcccatcctcgtggagctgctccgaatagacaatgaccgtgtggtgtgcgcggtggccactgcgctgcggaacatggccttggacgtcagaaataaggagctcatcggcaaatacgccatgcgagacctagtccacaggcttccaggagggaacaacagcaacaacactgcaagcaaggccatgtcggatgacacagtgacagctgtctgctgcacactgcacgaagtgattaccaagaacatggagaacgccaaggccttacgggatgccggtggcatcgagaagttggtcggcatctccaaaagcaaaggagataaacactctccaaaagtggtcaaggctgcatctcaggtcctcaacagcatgtggcagtaccgagatctgaggagtctctacaaaaaggatggatggtcacaataccactttgtagcctcgtcttcaaccatcgagagggaccggcaaaggccctactcctcctcccgcacgccctccatctcccctgtgcgcgtgtctcccaacaaccgctcagcaagtgccccagcttcacctcgggaaatgatcagcctcaaagaaaggaaaacagactacgagtgcaccggcagcaacgccacctaccacggaagtccacttaggcgggtacgagctcgattcgatcatggctagtgtctgtataaaagcaaa

SEQ ID NO: 446142 - DNA, 2358 bp, Homo sapiens
  misc_feature (2352)..(2352): n is a, c, g, or t
  misc_feature (2356)..(2358): n is a, c, g, or t
tgcctagaggatcccgctagtagctgggaatctagtaacggtatgaaccctctgtctccttattaaatgtggatccacgatacctcgtgaggatacagatgagttcatttacctaccggagcagttcggagtctctacaaaaaggatggatggtcacaataccactttgtagcctcgtcttcaaccatcgagagggaccggcaaaggccctactcctcctcccgcacgccctccatctcccctgtgcgcgtgtctcccaacaaccgctcagcaagtgccccagcttcacctcgggaaatgatcagcctcaaagaaaggaaaacagactacgagtgcaccggcagcaacgccacctaccacggagctaaaggcgaacacacttccaggaaagatgccatgacagctcaaaacactggaatttcaactttgtataggaattcttatggtgcgcccgctgaagacatcaaacacaaccaggtttcagcacagccagtcccacaggagcccagcagaaaagattacgagacctaccagccatttcagaattccacaagaaattacgatgagtccttcttcgaggaccaggtccaccatcgccctcccgccagcgagtacaccatgcacctgggtctcaagtccaccggcaactacgttgacttctactcagctgcccgtccctacagtgaactgaactatgaaacgagccactacccggcctcccccgactcctgggtgtgaggagcagggcacaggcgctccgggaacagtgcatgtgcatgcataccacaagacatttctttctgttttgtttttttctcctgcaaatttagtttgttaaagcctgttccataggaaggctgtgataaccagtaaggaaatattaagagctattttagaaagctaaatgaatcgcaagttaacttggaaatcagtagaaagctaaagtgatcctaaatatgacagtgggcagcacctttctagcgtgagctgtagagtaacgagaagtgctttatactgaacgtggttgatgggaggagagacgaggcattcgggccggtggggcgtaagggttatcgttaagcacaagacacagaatagtttacacactgtgtgggggacggcttctcacgctttgtttactctcttcatccgttgtgactctaggcttcaggttgcattggggttcctctgtacagcaagatgtttcttgccttttgttaatgcattgttgtaaagtatttgatgtacattacagattaaagaagaaaagcgcgttgtgtatattacaccaatgccgccgtgtttcctcatctatggttctaaatattgcttcaatttcaaacttttgaaagatgtatggatttccagtttttctttactttctcccagtatgttttaacaaaaaaaaaaaaaagcaggaaaaaaggaatatttagcagtattgttcgttctgatatgtgaatttgtttgtgacaactaaacaaggcattcagcagtttctgacaattaacatacatcattccacactccttgtcaacaaagtgctttttcactgcctaaaattttagatgtagatatttgaaatagattttttcatttataccagttttctttatgatgatacagtgttaaaagaaaataaattacaattgatctgtcatccatatttgctaagaatgtctatttccaagaacctatatcttacaaaatacacattcttgcttgtgtgtctgtgtgtgtgggtgtatgtatgtccacgtactagaaaaattacctgtgtgagattttattttgacagaagctatttcatttgctgttcatcttgtacaaactttgtttttggttttttagtataaatgtacatcagtttgttccttttgtactgtatctattcttctgaccatctagtgactcaggatattaggccagttgaagtggagttataggattttcacacattcacgcatacttggatatcaaccctctctacaggtccgtttccttacacattttatcccctcagaacacgataaaccatggccaattcagtttcactttggggccaattacttgaagtatccacagaaaatgtaaactgctcgccttattcccccaaactttttgttcatgtggcagggagcagtacacaactatggaatagattattaaaactgaacttgaagctaacgttagaatagtggttaacagagctaagaaataaggctaaccatcgaaaagaacatgggccgcgggtaaactagctttgctctttagatgcaagtggctgaggccaataggtgcctagtaaatgttaactgttcttggaaaaaataaaaacatcagtaacaaaanaaannn

SEQ ID NO: 446143 - DNA, 1932 bp, Homo sapiens
  misc_feature (27)..(30): n is a, c, g, or t
  misc_feature (1926)..(1926): n is a, c, g, or t
  misc_feature (1930)..(1932): n is a, c, g, or t
cgtaccagcgaaaatcttacaaggagnnnncccaaaacaaggcacacttgagtttcagcacagccagtcccacaggagcccagcagaaaagattacgagacctaccagccatttcagaattccacaagaaattacgatgagtccttcttcgaggaccaggtccaccatcgccctcccgccagcgagtacaccatgcacctgggtctcaagtccaccggcaactacgttgacttctactcagctgcccgtccctacagtgaactgaactatgaaacgagccactacccggcctcccccgactcctgggtgtgaggagcagggcacaggcgctccgggaacagtgcatgtgcatgcataccacaagacatttctttctgttttgtttttttctcctgcaaatttagtttgttaaagcctgttccataggaaggctgtgataaccagtaaggaaatattaagagctattttagaaagctaaatgaatcgcaagttaacttggaaatcagtagaaagctaaagtgatcctaaatatgacagtgggcagcacctttctagcgtgagctgtagagtaacgagaagtgctttatactgaacgtggttgatgggaggagagacgaggcattcgggccggtggggcgtaagggttatcgttaagcacaagacacagaatagtttacacactgtgtgggggacggcttctcacgctttgtttactctcttcatccgttgtgactctaggcttcaggttgcattggggttcctctgtacagcaagatgtttcttgccttttgttaatgcattgttgtaaagtatttgatgtacattacagattaaagaagaaaagcgcgttgtgtatattacaccaatgccgccgtgtttcctcatctatggttctaaatattgcttcaatttcaaacttttgaaagatgtatggatttccagtttttctttactttctcccagtatgttttaacaaaaaaaaaaaaaagcaggaaaaaaggaatatttagcagtattgttcgttctgatatgtgaatttgtttgtgacaactaaacaaggcattcagcagtttctgacaattaacatacatcattccacactccttgtcaacaaagtgctttttcactgcctaaaattttagatgtagatatttgaaatagattttttcatttataccagttttctttatgatgatacagtgttaaaagaaaataaattacaattgatctgtcatccatatttgctaagaatgtctatttccaagaacctatatcttacaaaatacacattcttgcttgtgtgtctgtgtgtgtgggtgtatgtatgtccacgtactagaaaaattacctgtgtgagattttattttgacagaagctatttcatttgctgttcatcttgtacaaactttgtttttggttttttagtataaatgtacatcagtttgttccttttgtactgtatctattcttctgaccatctagtgactcaggatattaggccagttgaagtggagttataggattttcacacattcacgcatacttggatatcaaccctctctacaggtccgtttccttacacattttatcccctcagaacacgataaaccatggccaattcagtttcactttggggccaattacttgaagtatccacagaaaatgtaaactgctcgccttattcccccaaactttttgttcatgtggcagggagcagtacacaactatggaatagattattaaaactgaacttgaagctaacgttagaatagtggttaacagagctaagaaataaggctaaccatcgaaaagaacatgggccgcgggtaaactagctttgctctttagatgcaagtggctgaggccaataggtgcctagtaaatgttaactgttcttggaaaaaataaaaacatcagtaacaaaanaaannn

SEQ ID NO: 446144 - DNA, 139 bp, Homo sapiens
gtcagttcagttgtgaacaaagccctttgtgtacgtttttaaattttagttcacacgataacaatgctttgcaagtaggtgtaattattttactcccattttatggatgagaaaacaacagagaggttgattggcccca

SEQ ID NO: 446145 - DNA, 4681 bp, Homo sapiens
ccgctccatgagcagctggagctgtaccacacggtgatgtatcgcaactaccaaagaaagaacgacatggatgagccgcccccctttgactacggctctggggatgaagacggcaagagcgagaagaggaagaacaaggaccccctctatgccaagatggaggagcgcttctaccgctatggcatcaagccagagtggatgatgattcaccgaatcctgaaccatagctttgacaagaagggggatgtgcactacctgatcaagtggaaagacctgccctacgaccagtgcacctgggagatcgatgacatcgacatcccctactacgacaacctcaagcaggcctactggggccacagggagctgatgctgggagaagacaccaggctgcccaagaggctgctcaagaagggcaagaagctgagggacgacaagcaggagaagccgccggacacgcccattgtggaccccacggtcaagttcgacaagcagccatggtacatcgactccacaggcggcacactgcacccgtaccagctggagggcctcaactggctgcgcttctcttgggcccagggcactgacaccatcctggccgatgagatgggtctgggcaagacggtgcagaccatcgtgttcctttactccctctacaaggagggccactccaaagggccctacctggttagcgcgcccctctccaccatcatcaactgggaacgcgagtttgagatgtgggcgcccgacttctacgtggtcacctacacgggggacaaggagagccgctcggtgattcgggagaacgagttttcctttgaggacaacgccattcggagtgggaagaaggtattccgtatgaagaaagaagtgcagatcaaattccacgtgctgctcacctcctatgagctcatcaccatcgaccaggccatcctgggctccatcgagtgggcctgcctggtggtagatgaggcccaccgcctcaagaacaaccagtccaagttttttagggtcttaaacagctacaagattgattacaagctgctgctgacagggaccccccttcagaacaacctggaggagctgttccatctcctcaacttcctgactccagagaggttcaacaacctggagggcttcctggaggagtttgctgacatctccaaggaagaccagatcaagaagctgcatgacctgctggggccgcacatgctcaggcggctcaaggctgacgtgttcaagaacatgccggccaagaccgagctcattgtccgggtggagctgagccagatgcagaagaagtactacaagttcatcctcacacggaactttgaggcactgaactccaaggggggcgggaaccaagtatcgctgctcaacatcatgatggacctgaaaaagtgctgcaaccacccctacctcttccctgtggctgccgtggaggcccctgtcttgcccaatggctcctacgatggaagctccctggtcaagtcttcagggaagctcatgctgctacagaagatgctgaagaaactgcgggatgaggggcaccgtgtgctcatcttctcccagatgaccaagatgctggacctcctggaggacttcctggagtacgaaggctacaagtatgagcggattgatggtggcatcaccgggggcctccggcaggaggcaatcgacagattcaatgcccccggggcccagcagttctgcttcctcctctcaacccgggcaggtggtctgggcatcaacctggccacggcggacactgtcatcatctacgactcggactggaacccgcacaatgacatccaggccttcagccgcgcccaccgcatcggccagaacaagaaggtgatgatctaccgcttcgtgactcgggcctcggtggaggagcgcatcacgcaggtggccaagcgcaagatgatgctcacccacctggtggtgcggcccggcctcggctccaagtcggggtccatgaccaagcaggagctggacgacatcctcaagttcggcacggaggaactcttcaaggacgacgtggagggcatgatgtctcagggccagaggccggtcacacccatccctgatgtccagtcctccaaaggggggaacttggccgccagtgcaaagaagaagcacggtagcaccccgccaggtgacaacaaggacgtggaggacagcagtgtgatccactatgacgatgcggccatctccaagctgctggaccggaaccaggacgctacagatgacacggagctacagaacatgaacgagtacctgagctccttcaaggtggcgcagtacgtggtgcgcgaggaggacggcgtggaggaggtggagcgggaaatcatcaagcaggaggagaacgtggaccccgactactgggagaagctgctgcggcaccactatgagcagcagcaggaggacctggcccgcaacctgggcaagggcaagcgcatccgcaagcaggtcaactacaacgatgcctcccaggaggaccaggagtggcaggatgagctctctgataaccagtcagaatattccattggctctgaggatgaggatgaggactttgaagagaggccggaagggcagagtggacgacgacaatcccggaggcagctgaagagtgacagggacaagcccctgcccccgcttctcgcccgagttggtggcaacatcgaggtgctgggcttcaatgcccgacagcggaaggcctttctgaacgccatcatgcgctggggcatgcccccgcaggacgccttcaactcccactggctggtgcgggaccttcgagggaagagcgagaaggagtttagagcctatgtgtccctcttcatgcggcacctgtgtgagccgggggcggatggtgcagagaccttcgcagacggcgtgccccgggagggcctctccaggcagcacgtgctgacccgcatcggggtcatgtcactagttaggaagaaggttcaggagtttgagcatgtcaacgggaagtacagcaccccagacttgatccctgaggggcccgaggggaagaagccgggcgaggtgatctcctcggaccccaacacaccagtgcccgccagccctgcccacctcctgccagccccgctgggcctgccagacaaaatggaagcccagctgggctacatggatgagaaagaccccggggcacagaagccaaggcagcccctggaagtccaggcccttccagccgccttggatagagtggagagtgaggacaagcacgagagcccagccagcaaggagagagcccgagaggagcggccagaggagacggagaaggccccgccctccccggagcagctgccgagagaggaggtgcttcctgagaaggagaagatcctggacaagctggagctgagcttgatccacagcagaggggacagttccgaactcaggccagatgacaccaaggctgaggagaaggagcccattgaaacacagcaaaatggtgacaaagaggaagatgacgaggggaagaaggaggacaagaaggggaaattcaagttcatgttcaacatcgcggacgggggcttcacggagttgcacacgctgtggcagaacgaggagcgggctgctgtatcctctgggaaaatctacgacatctggcaccggcgccatgactactggctgctggcgggcatcgtgacgcacggctacgcccgctggcaggacatccagaatgacccacggtacatgatcctcaacgagcccttcaagtctgaggtccacaagggcaactacctggagatgaagaacaagttcctggcccgcaggtttaagctgctggagcaggcgttggtcattgaggagcagctccggagggccgcgtacctgaacatgacgcaggaccccaaccaccccgccatggccctcaacgcccgcctggctgaagtggagtgcctcgccgagagccaccagcacctgtccaaggagtcccttgctgggaacaagcctgccaatgccgtcctgcacaaggtcctgaaccagctggaggagctgctgagcgacatgaaggccgacgtgacccggctgccatccatgctgtcccgcatccccccggtggccgcccggctgcagatgtcggagcgcagcatcctgagccgcctgaccaaccgcgccggggaccccaccatccagcagggcgctttcggctcctcccagatgtacagcaacaactttgggcccaacttccggggccctggaccgggagggattgtcaactacaaccagatgcccctggggccctatgtgaccgatatctagccgtcctcgagacttccctgtgttgcagcgctcatttccagctgagccacgcctgccgggccacctgcccgacccacatgggagagaaaagctgccacctttttaggagccagcgccaccttgggacaaaaagggaaacctagtaatgccatcacatggaggacgaggcccagctcagctgggccagagcccagaagtgccacctcatcataattcaagtgttcttccacacagcgttgcccccacaaccacgccggacgtgccccctcgccaccttttccagacgacttcttagaagagatttcatttatttgtacatcttttgcactttcctattgaagacttgaacacgtttgtcttgataaaagttggatgacgtatggaagattcg

SEQ ID NO: 446146 - DNA, 4672 bp, Homo sapiens
ccgctccatgagcagctggagctgtaccacacggtgatgtatcgcaactaccaaagaaagaacgacatggatgagccgcccccctttgactacggctctggggatgaagacggcaagagcgagaagaggaagaacaaggaccccctctatgccaagatggaggagcgcttctaccgctatggcatcaagccagagtggatgatgattcaccgaatcctgaaccatagctttgacaagaagggggatgtgcactacctgatcaagtggaaagacctgccctacgaccagtgcacctgggagatcgatgacatcgacatcccctactacgacaacctcaagcaggcctactggggccacagggagctgatgctgggagaagacaccaggctgcccaagaggctgctcaagaagggcaagaagctgagggacgacaagcaggagaagccgccggacacgcccattgtggaccccacggtcaagttcgacaagcagccatggtacatcgactccacaggcggcacactgcacccgtaccagctggagggcctcaactggctgcgcttctcttgggcccagggcactgacaccatcctggccgatgagatgggtctgggcaagacggtgcagaccatcgtgttcctttactccctctacaaggagggccactccaaagggccctacctggttagcgcgcccctctccaccatcatcaactgggaacgcgagtttgagatgtgggcgcccgacttctacgtggtcacctacacgggggacaaggagagccgctcggtgattcgggagaacgagttttcctttgaggacaacgccattcggagtgggaagaaggtattccgtatgaagaaagaagtgcagatcaaattccacgtgctgctcacctcctatgagctcatcaccatcgaccaggccatcctgggctccatcgagtgggcctgcctggtggtagatgaggcccaccgcctcaagaacaaccagtccaagttttttagggtcttaaacagctacaagattgattacaagctgctgctgacagggaccccccttcagaacaacctggaggagctgttccatctcctcaacttcctgactccagagaggttcaacaacctggagggcttcctggaggagtttgctgacatctccaaggaagaccagatcaagaagctgcatgacctgctggggccgcacatgctcaggcggctcaaggctgacgtgttcaagaacatgccggccaagaccgagctcattgtccgggtggagctgagccagatgcagaagaagtactacaagttcatcctcacacggaactttgaggcactgaactccaaggggggcgggaaccaagtatcgctgctcaacatcatgatggacctgaaaaagtgctgcaaccacccctacctcttccctgtggctgccgtggaggcccctgtcttgcccaatggctcctacgatggaagctccctggtcaagtcttcagggaagctcatgctgctacagaagatgctgaagaaactgcgggatgaggggcaccgtgtgctcatcttctcccagatgaccaagatgctggacctcctggaggacttcctggagtacgaaggctacaagtatgagcggattgatggtggcatcaccgggggcctccggcaggaggcaatcgacagattcaatgcccccggggcccagcagttctgcttcctcctctcaacccgggcaggtggtctgggcatcaacctggccacggcggacactgtcatcatctacgactcggactggaacccgcacaatgacatccaggccttcagccgcgcccaccgcatcggccagaacaagaaggtgatgatctaccgcttcgtgactcgggcctcggtggaggagcgcatcacgcaggtggccaagcgcaagatgatgctcacccacctggtggtgcggcccggcctcggctccaagtcggggtccatgaccaagcaggagctggacgacatcctcaagttcggcacggaggaactcttcaaggacgacgtggagggcatgatgtctcagggccagaggccggtcacacccatccctgatgtccagtcctccaaaggggggaacttggccgccagtgcaaagaagaagcacggtagcaccccgccaggtgacaacaaggacgtggaggacagcagtgtgatccactatgacgatgcggccatctccaagctgctggaccggaaccaggacgctacagatgacacggagctacagaacatgaacgagtacctgagctccttcaaggtggcgcagtacgtggtgcgcgaggaggacggcgtggaggaggtggagcgggaaatcatcaagcaggaggagaacgtggaccccgactactgggagaagctgctgcggcaccactatgagcagcagcaggaggacctggcccgcaacctgggcaagggcaagcgcatccgcaagcaggtcaactacaacgatgcctcccaggaggaccaggagtggcaggatgagctctctgataaccagtcagaatattccattggctctgaggatgaggatgaggactttgaagagaggccggaagggcagagtggacgacgacaatcccggaggcagctgaagagtgacagggacaagcccctgcccccgcttctcgcccgagttggtggcaacatcgaggtgctgggcttcaatgcccgacagcggaaggcctttctgaacgccatcatgcgctggggcatgcccccgcaggacgccttcaactcccactggctggtgcgggaccttcgagggaagagcgagaaggagtttagagcctatgtgtccctcttcatgcggcacctgtgtgagccgggggcggatggtgcagagaccttcgcagacggcgtgccccgggagggcctctccaggcagcacgtgctgacccgcatcggggtcatgtcactagttaggaagaaggttcaggagtttgagcatgtcaacgggaagtacagcaccccagacttgatccctgaggggcccgaggggaagaagccgggcgaggtgatctcctcggaccccaacacaccagtgcccgccagccctgcccacctcctgccagccccgctgggcctgccagacaaaatggaagcccagctgggctacatggatgagaaagaccccggggcacagaagccaaggcagcccctggaagtccaggcccttccagccgccttggatagagtggagagtgaggacaagcacgagagcccagccagcaaggagagagcccgagaggagcggccagaggagacggagaaggccccgccctccccggagcagctgccgagagcgtcttgctctgtcactcaggctggagtgcagtggcgccatctcggctcatgggagcctttatctcctcggctcaagcgaccctcccacctcagcttcctgaacagaggaggtgcttcctgagaaggagaagatcctggacaagctggagctgagcttgatccacagcagaggggacagttccgaactcaggccagatgacaccaaggctgaggagaaggagcccattgaaacacagcaaaatggtgacaaagaggaagatgacgaggggaagaaggaggacaagaaggggaaattcaagttcatgttcaacatcgcggacgggggcttcacggagttgcacacgctgtggcagaacgaggagcgggctgctgtatcctctgggaaaatctacgacatctggcaccggcgccatgactactggctgctggcgggcatcgtgacgcacggctacgcccgctggcaggacatccagaatgacccacggtacatgatcctcaacgagcccttcaagtctgaggtccacaagggcaactacctggagatgaagaacaagttcctggcccgcaggtttaagctgctggagcaggcgttggtcattgaggagcagctccggagggccgcgtacctgaacatgacgcaggaccccaaccaccccgccatggccctcaacgcccgcctggctgaagtggagtgcctcgccgagagccaccagcacctgtccaaggagtcccttgctgggaacaagcctgccaatgccgtcctgcacaaggtcctgaaccagctggaggagctgctgagcgacatgaaggccgacgtgacccggctgccatccatgctgtcccgcatccccccggtggccgcccggctgcagatgtcggagcgcagcatcctgagccgcctgaccaaccgcgccggggaccccaccatccagcagatatctagccgtcctcgagacttccctgtgttgcagcgctcatttccagctgagccacgcctgccgggccacctgcccgacccacatgggagagaaaagctgccacctttttaggagccagcgccaccttgggacaaaaagggaaacctagtaatgccatcacatggaggacgaggcccagctcagctgggccagagcccagaagtgccacctcatcataattcaagtgttcttccacacagcgttgcccccacaaccacgccggacgtgccccctcgccaccttttccagacgacttcttagaagagatttcatttatttgtacatcttttgcactttcctattgaagacttgaacacgtttgtcttgataaaagttggatgacgtatggaagattcg

SEQ ID NO: 446147 - DNA, 7938 bp, Homo sapiens
  misc_feature (4994)..(4994): n is a, c, g, or t
  misc_feature (5227)..(5227): n is a, c, g, or t
ccgctccatgagcagctggagctgtaccacacggtgatgtatcgcaactaccaaagaaagaacgacatggatgagccgcccccctttgactacggctctggggatgaagacggcaagagcgagaagaggaagaacaaggaccccctctatgccaagatggaggagcgcttctaccgctatggcatcaagccagagtggatgatgattcaccgaatcctgaaccatagctttgacaagaagggggatgtgcactacctgatcaagtggaaagacctgccctacgaccagtgcacctgggagatcgatgacatcgacatcccctactacgacaacctcaagcaggcctactggggccacagggagctgatgctgggagaagacaccaggctgcccaagaggctgctcaagaagggcaagaagctgagggacgacaagcaggagaagccgccggacacgcccattgtggaccccacggtcaagttcgacaagcagccatggtacatcgactccacaggcggcacactgcacccgtaccagctggagggcctcaactggctgcgcttctcttgggcccagggcactgacaccatcctggccgatgagatgggtctgggcaagacggtgcagaccatcgtgttcctttactccctctacaaggagggccactccaaagggccctacctggttagcgcgcccctctccaccatcatcaactgggaacgcgagtttgagatgtgggcgcccgacttctacgtggtcacctacacgggggacaaggagagccgctcggtgattcgggagaacgagttttcctttgaggacaacgccattcggagtgggaagaaggtattccgtatgaagaaagaagtgcagatcaaattccacgtgctgctcacctcctatgagctcatcaccatcgaccaggccatcctgggctccatcgagtgggcctgcctggtggtagatgaggcccaccgcctcaagaacaaccagtccaagttttttagggtcttaaacagctacaagattgattacaagctgctgctgacagggaccccccttcagaacaacctggaggagctgttccatctcctcaacttcctgactccagagaggttcaacaacctggagggcttcctggaggagtttgctgacatctccaaggaagaccagatcaagaagctgcatgacctgctggggccgcacatgctcaggcggctcaaggctgacgtgttcaagaacatgccggccaagaccgagctcattgtccgggtggagctgagccagatgcagaagaagtactacaagttcatcctcacacggaactttgaggcactgaactccaaggggggcgggaaccaagtatcgctgctcaacatcatgatggacctgaaaaagtgctgcaaccacccctacctcttccctgtggctgccgtggaggcccctgtcttgcccaatggctcctacgatggaagctccctggtcaagtcttcagggaagctcatgctgctacagaagatgctgaagaaactgcgggatgaggggcaccgtgtgctcatcttctcccagatgaccaagatgctggacctcctggaggacttcctggagtacgaaggctacaagtatgagcggattgatggtggcatcaccgggggcctccggcaggaggcaatcgacagattcaatgcccccggggcccagcagttctgcttcctcctctcaacccgggcaggtggtctgggcatcaacctggccacggcggacactgtcatcatctacgactcggactggaacccgcacaatgacatccaggccttcagccgcgcccaccgcatcggccagaacaagaaggtgatgatctaccgcttcgtgactcgggcctcggtggaggagcgcatcacgcaggtggccaagcgcaagatgatgctcacccacctggtggtgcggcccggcctcggctccaagtcggggtccatgaccaagcaggagctggacgacatcctcaagttcggcacggaggaactcttcaaggacgacgtggagggcatgatgtctcagggccagaggccggtcacacccatccctgatgtccagtcctccaaaggggggaacttggccgccagtgcaaagaagaagcacggtagcaccccgccaggtgacaacaaggacgtggaggacagcagtgtgatccactatgacgatgcggccatctccaagctgctggaccggaaccaggacgctacagatgacacggagctacagaacatgaacgagtacctgagctccttcaaggtggcgcagtacgtggtgcgcgaggaggacggcgtgctgtccccgaagagctccttgtgggtctctcctggaggcctttccgtttcctcctctgctccccaccctccgtgcagacctggaggaggtggagcgggaaatcatcaagcaggaggagaacgtggaccccgactactgggagaagctgctgcggcaccactatgagcagcagcaggaggacctggcccgcaacctgggcaagggcaagcgcatccgcaagcaggtcaactacaacgatgcctcccaggaggaccaggagtggcaggatgagctctctgataaccagtcagaatattccattggctctgaggatgaggatgaggactttgaagagaggccggaagggcagagtggacgacgacaatcccggaggcagctgaagagtgacagggacaagcccctgcccccgcttctcgcccgagttggtggcaacatcgaggtgctgggcttcaatgcccgacagcggaaggcctttctgaacgccatcatgcgctggggcatgcccccgcaggacgccttcaactcccactggctggtgcgggaccttcgagggaagagcgagaaggagtttagagcctatgtgtccctcttcatgcggcacctgtgtgagccgggggcggatggtgcagagaccttcgcagacggcgtgccccgggagggcctctccaggcagcacgtgctgacccgcatcggggtcatgtcactagttaggaagaaggttcaggagtttgagcatgtcaacgggaagtacagcaccccagacttgatccctgaggggcccgaggggaagaagccgggcgaggtgatctcctcggaccccaacacaccagtgcccgccagccctgcccacctcctgccagccccgctgggcctgccagacaaaatggaagcccagctgggctacatggatgagaaagaccccggggcacagaagccaaggcagcccctggaagtccaggcccttccagccgccttggatagagtggagagtgaggacaagcacgagagcccagccagcaaggagagagcccgagaggagcggccagaggagacggagaaggccccgccctccccggagcagctgccgagagaggaggtgcttcctgagaaggagaagatcctggacaagctggagctgagcttgatccacagcagaggggacagttccgaactcaggccagatgacaccaaggctgaggagaaggagcccattgaaacacagcaaaatggtgacaaagaggaagatgacgaggggaagaaggaggacaagaaggggaaattcaagttcatgttcaacatcgcggacgggggcttcacggagttgcacacgctgtggcagaacgaggagcgggctgctgtatcctctgggaaaatctacgacatctggcaccggcgccatgactactggctgctggcgggcatcgtgacgcacggctacgcccgctggcaggacatccagaatgacccacggtacatgatcctcaacgagcccttcaagtctgaggtccacaagggcaactacctggagatgaagaacaagttcctggcccgcaggtttaagctgctggagcaggcgttggtcattgaggagcagctccggagggccgcgtacctgaacatgacgcaggaccccaaccaccccgccatggccctcaacgcccgcctggctgaagtggagtgcctcgccgagagccaccagcacctgtccaaggagtcccttgctgggaacaagcctgccaatgccgtcctgcacaaggtcctgaaccagctggaggagctgctgagcgacatgaaggccgacgtgacccggctgccatccatgctgtcccgcatccccccggtggccgcccggctgcagatgtcggagcgcagcatcctgagccgcctgaccaaccgcgccggggaccccaccatccagcagggcgctttcggctcctcccagatgtacagcaacaactttgggcccaacttccggggccctggaccgggagggattgtcaactacaaccagatgcccctggggccctatgtgaccgatatctagccgtcctcgagacttccctgtgttgcagcgctcatttccagctgagccacgcctgccgggccacctgcccgacccacatgggagagaaaagctgccacctttttaggagccagcgccaccttgggacaaaaagggaaacctagtaatgccatcacatggaggacgaggcccagctcagctgggccagagcccagaagtgccacctcatcataattcaagtgttcttccacacagcgttgcccccacaaccacgccggacgtgccccctcgccaccttttccagacgacttcttagaagagatttcatttatttgtacatcttttgcactttcctattgaagacttgaacacgtttgtcttgataaaagttggatgacgtatggaagattcgaacctgcagcactgatgtctctttaccgatgggttccagacccaaggtagtcctggcactgccctgtggactcagcccagctggggaggacatggcgcccggtgccctaggagccctcagtgtcccctacctgacctgtctgcacctgtgtgacagccccttctgatttggccccctgcccgcttggagcctcccagcaccagacagggcaggtttggggagccgctgtcnagccctatggtgagaccctggctgacatttcccctccttcctgccaaggctggaggccgccaggtgtttgctctctccttgtggggaggtggatcctctgccagcaggtgtctgtccccggcccagcgcatcttgaaggccctggactctgttaccagtggggggcctgtggccccggctcttcacagcaggcagaagcgtatgatcccagggagggtgggctgggggggggncagcacttgcctcggagccactgctgcgttgggtttgccttctgccagaggtgtggttaagggcagtgatagctgcgccccagcaaggagggtcatgggccctgagctggcccaggagaccctggccctgccctgtgccctgggatgcctaccctgcccacctccggaggtggaaccgggctgcccctgggggcctggacttgtcccattcccctgtccctggaaaggccttcccgggggctttttgcctgaggctgcactcttggaaggcgtggggagagttctgcctggagggggactggacccagtgccctctgcagacccctcccagccgcagcaccaagggcttgctgccttgtttcctgccaggagcgccctgacatcccaaaaccatcttcccacatgtgggttgttggaatcccacccactcccccggaccctgcccctccaagttggggacggagatggggagcaggtcaggccctccctaggcctgtttgtgtgtgatccttctcctggccccaggtcgacctggaaggcgtttctgagtcttgtactgggaccttcccagggaaggtgccttggggtgcagaatcctgggaatgttaggaaagggctgcgtgaaaaacccagctgggcctggggtggaggtgcacacgggctggggctcagctccttggagagggcctgcctgggactgagggggccagggctgggtcaggattcaccagcttgtgttgcagacactggagcaattgcctggccctccctaagccctatatgcctcactcataatgaggctgtctctgaaccccggagggcgggacctacaagtccttcctcttggcgcattcccacactccagtctggatccaggtctgcaaggccagcccgaccctgacactgcacgtgggcgtagtggggagcaccctggagtggagatgattgtcagcgggctcacatgttatggttcatccacatgcgtgttgtgtgctctgcggtgcctcctggcaaagggtcctggctcgggtcagaagctcactcccgtgccctcgtccccaaacaagcagtggcaagcactggggttggccctcgttgggagcagtgcccaccttccttggcccacagcagataggtcccgagcagcaggactggaggcctgtggcggtcagggcaggggtctgtgtctccaccccaagggctgatggtccctcccctgtgcgccttcctctcaggcaggcttgctctgtcccttcctctctgcttccctcccaggcctcgccagggctcccttctcctctgcctggttagactcgggcacccaggaccatcaccacttttggcagagatgactgacaaaccaagaaggacattctcagatcttttcatctctgccaaaagtggtgatggtggtgtccgtatgtttggcgtctttgggctgggtttggtttttgctgctggtagaatcagggtcctcgggcatgaacgcgagcccaaagtgccagtctgcgattggaaatttccagccactttaagccagtgctgagtagggcttctgcagagccatgtttgagccaaggtcttggaaggcattgccccatgggctcaggtgactcggggtggagtgagcacgtctgcagggccctctcatacacgcctgaggcagaagcagcgtcccccgtgaaagccaccttccgaagctcctgcgttttttgcaaacttggcttcccccaggggcaggctggactttccctgccccctatgattgaagtcctcctgcttttgggggctgccttcccagagtcccccgggtgctcccctgccgaggtcaggagctgaccaagcctttggcccggtgacacctgcagccctcactcctgtcatcccaggacacttgaggcccaaggaggtggagtggagagtgggctcgggtacatgggagccagaagccagatggacttggtcaagtgtcggtcacttggagcctccagtgtgcgtcagggtctgtgggcaggggacagggcgtgggtgggggccgaggctggcacgcccctctgccctcaccgtcttggtgacctggcctcggcccctcccccaagtctcttctgtgcaaggcccgcctcggcctcggcagctggttcctgtcctgttttctgtgtctgaaagtttacaggttgtggtgcatcagcccaaactcactggcgttgtgttttttttttctttaattttcagattttttttttaaacaaagtatttttttaggtgcgataacccagaaagggcccgttgggtgtgtgtgtgtgtcctgaactcctcaagcagcgattggagcccaagcacccctggagaggaagggagggtccccactggcccgtggggtctgagttcaggggtgtggagggagcagactccaccggcccaggcccagctaagagggggccgacccctttccccaggcacagccccaggctggcaaagggagggccctgggctgggtgcagggcgcgccaggagtcccagccagggtggccccggcgggggcgggtccagctttggaagccaggctcccctgtgagccgtggcttgtctggtcttcgcccacgggaggctggacagaggctgtagccaacacaatcacctttactttgtactctgtgtgtatgttttggttttctgtgttttaataaatcctttgggaaaggaataaaaaa

SEQ ID NO: 446148 - DNA, 2811 bp, Homo sapiens
  misc_feature (2598)..(2598): n is a, c, g, or t
  misc_feature (2608)..(2608): n is a, c, g, or t
  misc_feature (2626)..(2626): n is a, c, g, or t
  misc_feature (2647)..(2647): n is a, c, g, or t
  misc_feature (2654)..(2654): n is a, c, g, or t
  misc_feature (2670)..(2670): n is a, c, g, or t
  misc_feature (2678)..(2678): n is a, c, g, or t
  misc_feature (2741)..(2741): n is a, c, g, or t
  misc_feature (2749)..(2749): n is a, c, g, or t
  misc_feature (2758)..(2758): n is a, c, g, or t
  misc_feature (2781)..(2781): n is a, c, g, or t
ccgctccatgagcagctggagctgtaccacacggtgatgtatcgcaactaccaaagaaagaacgacatggatgagccgcccccctttgactacggctctggggatgaagacggcaagagcgagaagaggaagaacaaggaccccctctatgccaagatggaggagcgcttctaccgctatggcatcaagccagagtggatgatgattcaccgaatcctgaaccatagctttgacaagaagggggatgtgcactacctgatcaagtggaaagacctgccctacgaccagtgcacctgggagatcgatgacatcgacatcccctactacgacaacctcaagcaggcctactggggccacagggagctgatgctgggagaagacaccaggctgcccaagaggctgctcaagaagggcaagaagctgagggacgacaagcaggagaagccgccggacacgcccattgtggaccccacggtcaagttcgacaagcagccatggtacatcgactccacaggcggcacactgcacccgtaccagctggagggcctcaactggctgcgcttctcttgggcccagggcactgacaccatcctggccgatgagatgggtctgggcaagacggtgcagaccatcgtgttcctttactccctctacaaggagggccactccaaagggccctacctggttagcgcgcccctctccaccatcatcaactgggaacgcgagtttgagatgtgggcgcccgacttctacgtggtcacctacacgggggacaaggagagccgctcggtgattcgggagaacgagttttcctttgaggacaacgccattcggagtgggaagaaggtattccgtatgaagaaagaagtgcagatcaaattccacgtgctgctcacctcctatgagctcatcaccatcgaccaggccatcctgggctccatcgagtgggcctgcctggtggtagatgaggcccaccgcctcaagaacaaccagtccaagttttttagggtcttaaacagctacaagattgattacaagctgctgctgacagggaccccccttcagaacaacctggaggagctgttccatctcctcaacttcctgactccagagaggttcaacaacctggagggcttcctggaggagtttgctgacatctccaaggaagaccagatcaagaagctgcatgacctgctggggccgcacatgctcaggcggctcaaggctgacgtgttcaagaacatgccggccaagaccgagctcattgtccgggtggagctgagccagatgcagaagaagtactacaagttcatcctcacacggaactttgaggcactgaactccaaggggggcgggaaccaagtatcgctgctcaacatcatgatggacctgaaaaagtgctgcaaccacccctacctcttccctgtggctgccgtggaggcccctgtcttgcccaatggctcctacgatggaagctccctggtcaagtcttcagggaagctcatgctgctacagaagatgctgaagaaactgcgggatgaggggcaccgtgtgctcatcttctcccagatgaccaagatgctggacctcctggaggacttcctggagtacgaaggctacaagtatgagcggattgatggtggcatcaccgggggcctccggcaggaggcaatcgacagattcaatgcccccggggcccagcagttctgcttcctcctctcaacccgggcaggtggtctgggcatcaacctggccacggcggacactgtcatcatctacgactcggactggaacccgcacaatgacatccaggccttcagccgcgcccaccgcatcggccagaacaagaaggtgatgatctaccgcttcgtgactcgggcctcggtggaggagcgcatcacgcaggtggccaagcgcaagatgatgctcacccacctggtggtgcggcccggcctcggctccaagtcggggtccatgaccaagcaggagctggacgacatcctcaagttcggcacggaggaactcttcaaggacgacgtggagggcatgatgtctcagggccagaggccggtcacacccatccctgatgtccagtcctccaaaggggggaacttggccgccagtgcaaagaagaagcacggtagcaccccgccaggtgacaacaaggacgtggaggacagcagtgtgatccactatgacgatgcggccatctccaagctgctggaccggaaccaggacgctacagatgacacggagctacagaacatgaacgagtacctgagctccttcaaggtggcgcagtacgtggtgcgcgaggaggacggcgtggaggaggtggagcgggaaatcatcaagcaggaggagaacgtggaccccgactactgggagaagctgctgcggcaccactatgagcagcagcaggaggacctggcccgcaacctgggcaagggcaagcgcatccgcaagcaggtcaactacaacgatgcctcccaggaggaccaggagtggcaggatgagctctctgataaccagtcagaatattccattggctctgaggatgaggatgaggactttgaagagaggccggaagggcagaantggaccaacnaacaattcccggaaggcntcttgaaaaattgacaggggnacaaagnccccttggccccccgntttttttngcccggagtttgggggggccaaacattcgaagggggggttgggggcttttaaaattggccccngaacaagngggggaaangggccctttttttttgaaaaccnccccttttatttgccccctttggggggcaa

SEQ ID NO: 446149 - DNA, 7981 bp, Homo sapiens
  misc_feature (4912)..(4912): n is a, c, g, or t
  misc_feature (5145)..(5145): n is a, c, g, or t
ccgctccatgagcagctggagctgtaccacacggtgatgtatcgcaactaccaaagaaagaacgacatggatgagccgcccccctttgactacggctctggggatgaagacggcaagagcgagaagaggaagaacaaggaccccctctatgccaagatggaggagcgcttctaccgctatggcatcaagccagagtggatgatgattcaccgaatcctgaaccatagctttgacaagaagggggatgtgcactacctgatcaagtggaaagacctgccctacgaccagtgcacctgggagatcgatgacatcgacatcccctactacgacaacctcaagcaggcctactggggccacagggagctgatgctgggagaagacaccaggctgcccaagaggctgctcaagaagggcaagaagctgagggacgacaagcaggagaagccgccggacacgcccattgtggaccccacggtcaagttcgacaagcagccatggtacatcgactccacaggcggcacactgcacccgtaccagctggagggcctcaactggctgcgcttctcttgggcccagggcactgacaccatcctggccgatgagatgggtctgggcaagacggtgcagaccatcgtgttcctttactccctctacaaggagggccactccaaagggccctacctggttagcgcgcccctctccaccatcatcaactgggaacgcgagtttgagatgtgggcgcccgacttctacgtggtcacctacacgggggacaaggagagccgctcggtgattcgggagaacgagttttcctttgaggacaacgccattcggagtgggaagaaggtattccgtatgaagaaagaagtgcagatcaaattccacgtgctgctcacctcctatgagctcatcaccatcgaccaggccatcctgggctccatcgagtgggcctgcctggtggtagatgaggcccaccgcctcaagaacaaccagtccaagttttttagggtcttaaacagctacaagattgattacaagctgctgctgacagggaccccccttcagaacaacctggaggagctgttccatctcctcaacttcctgactccagagaggttcaacaacctggagggcttcctggaggagtttgctgacatctccaaggaagaccagatcaagaagctgcatgacctgctggggccgcacatgctcaggcggctcaaggctgacgtgttcaagaacatgccggccaagaccgagctcattgtccgggtggagctgagccagatgcagaagaagtactacaagttcatcctcacacggaactttgaggcactgaactccaaggggggcgggaaccaagtatcgctgctcaacatcatgatggacctgaaaaagtgctgcaaccacccctacctcttccctgtggctgccgtggaggcccctgtcttgcccaatggctcctacgatggaagctccctggtcaagtcttcagggaagctcatgctgctacagaagatgctgaagaaactgcgggatgaggggcaccgtgtgctcatcttctcccagatgaccaagatgctggacctcctggaggacttcctggagtacgaaggctacaagtatgagcggattgatggtggcatcaccgggggcctccggcaggaggcaatcgacagattcaatgcccccggggcccagcagttctgcttcctcctctcaacccgggcaggtggtctgggcatcaacctggccacggcggacactgtcatcatctacgactcggactggaacccgcacaatgacatccaggccttcagccgcgcccaccgcatcggccagaacaagaaggtgatgatctaccgcttcgtgactcgggcctcggtggaggagcgcatcacgcaggtggccaagcgcaagatgatgctcacccacctggtggtgcggcccggcctcggctccaagtcggggtccatgaccaagcaggagctggacgacatcctcaagttcggcacggaggaactcttcaaggacgacgtggagggcatgatgtctcagggccagaggccggtcacacccatccctgatgtccagtcctccaaaggggggaacttggccgccagtgcaaagaagaagcacggtagcaccccgccaggtgacaacaaggacgtggaggacagcagtgtgatccactatgacgatgcggccatctccaagctgctggaccggaaccaggacgctacagatgacacggagctacagaacatgaacgagtacctgagctccttcaaggtggcgcagtacgtggtgcgcgaggaggacggcgtggaggaggtggagcgggaaatcatcaagcaggaggagaacgtggaccccgactactgggagaagctgctgcggcaccactatgagcagcagcaggaggacctggcccgcaacctgggcaagggcaagcgcatccgcaagcaggtcaactacaacgatgcctcccaggaggaccaggagtggcaggatgagctctctgataaccagtcagaatattccattggctctgaggatgaggatgaggactttgaagagaggccggaagggcagagtggacgacgacaatcccggaggcagctgaagagtgacagggacaagcccctgcccccgcttctcgcccgagttggtggcaacatcgaggtgctgggcttcaatgcccgacagcggaaggcctttctgaacgccatcatgcgctggggcatgcccccgcaggacgccttcaactcccactggctggtgcgggaccttcgagggaagagcgagaaggagtttagagcctatgtgtccctcttcatgcggcacctgtgtgagccgggggcggatggtgcagagaccttcgcagacggcgtgccccgggagggcctctccaggcagcacgtgctgacccgcatcggggtcatgtcactagttaggaagaaggttcaggagtttgagcatgtcaacgggaagtacagcaccccagacttgatccctgaggggcccgaggggaagaagccgggcgaggtgatctcctcggaccccaacacaccagtgcccgccagccctgcccacctcctgccagccccgctgggcctgccagacaaaatggaagcccagctgggctacatggatgagaaagaccccggggcacagaagccaaggcagcccctggaagtccaggcccttccagccgccttggatagagtggagagtgaggacaagcacgagagcccagccagcaaggagagagcccgagaggagcggccagaggagacggagaaggccccgccctccccggagcagctgccgagagaggaggtgcttcctgagaaggagaagatcctggacaagctggagctgagcttgatccacagcagaggggacagttccgaactcaggccagatgacaccaaggctgaggagaaggagcccattgaaacacagcaaaatggtgacaaagaggaagatgacgaggggaagaaggaggacaagaaggggaaattcaagttcatgttcaacatcgcggacgggggcttcacggagttgcacacgctgtggcagaacgaggagcgggctgctgtatcctctgggaaaatctacgacatctggcaccggcgccatgactactggctgctggcgggcatcgtgacgcacggctacgcccgctggcaggacatccagaatgacccacggtacatgatcctcaacgagcccttcaagtctgaggtccacaagggcaactacctggagatgaagaacaagttcctggcccgcaggtttaagctgctggagcaggcgttggtcattgaggagcagctccggagggccgcgtacctgaacatgacgcaggaccccaaccaccccgccatggccctcaacgcccgcctggctgaagtggagtgcctcgccgagagccaccagcacctgtccaaggagtcccttgctgggaacaagcctgccaatgccgtcctgcacaaggtcctgaaccagctggaggagctgctgagcgacatgaaggccgacgtgacccggctgccatccatgctgtcccgcatccccccggtggccgcccggctgcagatgtcggagcgcagcatcctgagccgcctgaccaaccgcgccggggaccccaccatccagcagggcgctttcggctcctcccagatgtacagcaacaactttgggcccaacttccggggccctggaccgggagggattgtcaactacaaccagatgcccctggggccctatgtgaccgatatctagccgtcctcgagacttccctgtgttgcagcgctcatttccagctgagccacgcctgccgggccacctgcccgacccacatgggagagaaaagctgccacctttttaggagccagcgccaccttgggacaaaaagggaaacctagtaatgccatcacatggaggacgaggcccagctcagctgggccagagcccagaagtgccacctcatcataattcaagtgttcttccacacagcgttgcccccacaaccacgccggacgtgccccctcgccaccttttccagacgacttcttagaagagatttcatttatttgtacatcttttgcactttcctattgaagacttgaacacgtttgtcttgataaaagttggatgacgtatggaagattcgaacctgcagcactgatgtctctttaccgatgggttccagacccaaggtagtcctggcactgccctgtggactcagcccagctggggaggacatggcgcccggtgccctaggagccctcagtgtcccctacctgacctgtctgcacctgtgtgacagccccttctgatttggccccctgcccgcttggagcctcccagcaccagacagggcaggtttggggagccgctgtcnagccctatggtgagaccctggctgacatttcccctccttcctgccaaggctggaggccgccaggtgtttgctctctccttgtggggaggtggatcctctgccagcaggtgtctgtccccggcccagcgcatcttgaaggccctggactctgttaccagtggggggcctgtggccccggctcttcacagcaggcagaagcgtatgatcccagggagggtgggctgggggggggncagcacttgcctcggagccactgctgcgttgggtttgccttctgccagaggtgtggttaagggcagtgatagctgcgccccagcaaggagggtcatgggccctgagctggcccaggagaccctggccctgccctgtgccctgggatgcctaccctgcccacctccggaggtggaaccgggctgcccctgggggcctggacttgtcccattcccctgtccctggaaaggccttcccgggggctttttgcctgaggctgcactcttggaaggcgtggggagagttctgcctggagggggactggacccagtgccctctgcagacccctcccagccgcagcaccaagggcttgctgccttgtttcctgccaggagcgccctgacatcccaaaaccatcttcccacatgtgggttgttggaatcccacccactcccccggaccctgcccctccaagttggggacggagatggggagcaggtcaggccctccctaggcctgtttgtgtgtgatccttctcctggccccaggtcgacctggaaggcgtttctgagtcttgtactgggaccttcccagggaaggtgccttggggtgcagaatcctgggaatgttaggaaagggctgcgtgaaaaacccagctgggcctggggtggaggtgcacacgggctggggctcagctccttggagagggcctgcctgggactgagggggccagggctgggtcaggattcaccagcttgtgttgcagacactggagcaattgcctggccctccctaagccctatatgcctcactcataatgaggctgtctctgaaccccggagggcgggacctacaagtccttcctcttggcgcattcccacactccagtctggatccaggtctgcaaggccagcccgaccctgacactgcacgtgggcgtagtggggagcaccctggagtggagatgattgtcagcgggctcacatgttatggttcatccacatgcgtgttgtgtgctctgcggtgcctcctggcaaagggtcctggctcgggtcagaagctcactcccgtgccctcgtccccaaacaagcagtggcaagcactggggttggccctcgttgggagcagtgcccaccttccttggcccacagcagataggtcccgagcagcaggactggaggcctgtggcggtcagggcaggggtctgtgtctccaccccaagggctgatggtccctcccctgtgcgccttcctctcaggcaggcttgctctgtcccttcctctctgcttccctcccaggcctcgccagggctcccttctcctctgcctggttagactcgggcacccaggaaagcctggccagggctcctttgggcctgggccccctgcactgcctggtccagaaggggtggtgctgtccgtggccagcaccccggggcccgggaggggtgggctactagagtcagagcgggtttggggctgaccagtttgggagaggagaaaagatctgagaatgtccttcttggtttgtcagtcatctctgccaaaagtggtgatggtggtgtccgtatgtttggcgtctttgggctgggtttggtttttgctgctggtagaatcagggtcctcgggcatgaacgcgagcccaaagtgccagtctgcgattggaaatttccagccactttaagccagtgctgagtagggcttctgcagagccatgtttgagccaaggtcttggaaggcattgccccatgggctcaggtgactcggggtggagtgagcacgtctgcagggccctctcatacacgcctgaggcagaagcagcgtcccccgtgaaagccaccttccgaagctcctgcgttttttgcaaacttggcttcccccaggggcaggctggactttccctgccccctatgattgaagtcctcctgcttttgggggctgccttcccagagtcccccgggtgctcccctgccgaggtcaggagctgaccaagcctttggcccggtgacacctgcagccctcactcctgtcatcccaggacacttgaggcccaaggaggtggagtggagagtgggctcgggtacatgggagccagaagccagatggacttggtcaagtgtcggtcacttggagcctccagtgtgcgtcagggtctgtgggcaggggacagggcgtgggtgggggccgaggctggcacgcccctctgccctcaccgtcttggtgacctggcctcggcccctcccccaagtctcttctgtgcaaggcccgcctcggcctcggcagctggttcctgtcctgttttctgtgtctgaaagtttacaggttgtggtgcatcagcccaaactcactggcgttgtgttttttttttctttaattttcagattttttttttaaacaaagtatttttttaggtgcgataacccagaaagggcccgttgggtgtgtgtgtgtgtcctgaactcctcaagcagcgattggagcccaagcacccctggagaggaagggagggtccccactggcccgtggggtctgagttcaggggtgtggagggagcagactccaccggcccaggcccagctaagagggggccgacccctttccccaggcacagccccaggctggcaaagggagggccctgggctgggtgcagggcgcgccaggagtcccagccagggtggccccggcgggggcgggtccagctttggaagccaggctcccctgtgagccgtggcttgtctggtcttcgcccacgggaggctggacagaggctgtagccaacacaatcacctttactttgtactctgtgtgtatgttttggttttctgtgttttaataaatcctttgggaaaggaataaaaaa

SEQ ID NO: 446150 - DNA, 8063 bp, Homo sapiens
  misc_feature (4994)..(4994): n is a, c, g, or t
  misc_feature (5227)..(5227): n is a, c, g, or t
ccgctccatgagcagctggagctgtaccacacggtgatgtatcgcaactaccaaagaaagaacgacatggatgagccgcccccctttgactacggctctggggatgaagacggcaagagcgagaagaggaagaacaaggaccccctctatgccaagatggaggagcgcttctaccgctatggcatcaagccagagtggatgatgattcaccgaatcctgaaccatagctttgacaagaagggggatgtgcactacctgatcaagtggaaagacctgccctacgaccagtgcacctgggagatcgatgacatcgacatcccctactacgacaacctcaagcaggcctactggggccacagggagctgatgctgggagaagacaccaggctgcccaagaggctgctcaagaagggcaagaagctgagggacgacaagcaggagaagccgccggacacgcccattgtggaccccacggtcaagttcgacaagcagccatggtacatcgactccacaggcggcacactgcacccgtaccagctggagggcctcaactggctgcgcttctcttgggcccagggcactgacaccatcctggccgatgagatgggtctgggcaagacggtgcagaccatcgtgttcctttactccctctacaaggagggccactccaaagggccctacctggttagcgcgcccctctccaccatcatcaactgggaacgcgagtttgagatgtgggcgcccgacttctacgtggtcacctacacgggggacaaggagagccgctcggtgattcgggagaacgagttttcctttgaggacaacgccattcggagtgggaagaaggtattccgtatgaagaaagaagtgcagatcaaattccacgtgctgctcacctcctatgagctcatcaccatcgaccaggccatcctgggctccatcgagtgggcctgcctggtggtagatgaggcccaccgcctcaagaacaaccagtccaagttttttagggtcttaaacagctacaagattgattacaagctgctgctgacagggaccccccttcagaacaacctggaggagctgttccatctcctcaacttcctgactccagagaggttcaacaacctggagggcttcctggaggagtttgctgacatctccaaggaagaccagatcaagaagctgcatgacctgctggggccgcacatgctcaggcggctcaaggctgacgtgttcaagaacatgccggccaagaccgagctcattgtccgggtggagctgagccagatgcagaagaagtactacaagttcatcctcacacggaactttgaggcactgaactccaaggggggcgggaaccaagtatcgctgctcaacatcatgatggacctgaaaaagtgctgcaaccacccctacctcttccctgtggctgccgtggaggcccctgtcttgcccaatggctcctacgatggaagctccctggtcaagtcttcagggaagctcatgctgctacagaagatgctgaagaaactgcgggatgaggggcaccgtgtgctcatcttctcccagatgaccaagatgctggacctcctggaggacttcctggagtacgaaggctacaagtatgagcggattgatggtggcatcaccgggggcctccggcaggaggcaatcgacagattcaatgcccccggggcccagcagttctgcttcctcctctcaacccgggcaggtggtctgggcatcaacctggccacggcggacactgtcatcatctacgactcggactggaacccgcacaatgacatccaggccttcagccgcgcccaccgcatcggccagaacaagaaggtgatgatctaccgcttcgtgactcgggcctcggtggaggagcgcatcacgcaggtggccaagcgcaagatgatgctcacccacctggtggtgcggcccggcctcggctccaagtcggggtccatgaccaagcaggagctggacgacatcctcaagttcggcacggaggaactcttcaaggacgacgtggagggcatgatgtctcagggccagaggccggtcacacccatccctgatgtccagtcctccaaaggggggaacttggccgccagtgcaaagaagaagcacggtagcaccccgccaggtgacaacaaggacgtggaggacagcagtgtgatccactatgacgatgcggccatctccaagctgctggaccggaaccaggacgctacagatgacacggagctacagaacatgaacgagtacctgagctccttcaaggtggcgcagtacgtggtgcgcgaggaggacggcgtgctgtccccgaagagctccttgtgggtctctcctggaggcctttccgtttcctcctctgctccccaccctccgtgcagacctggaggaggtggagcgggaaatcatcaagcaggaggagaacgtggaccccgactactgggagaagctgctgcggcaccactatgagcagcagcaggaggacctggcccgcaacctgggcaagggcaagcgcatccgcaagcaggtcaactacaacgatgcctcccaggaggaccaggagtggcaggatgagctctctgataaccagtcagaatattccattggctctgaggatgaggatgaggactttgaagagaggccggaagggcagagtggacgacgacaatcccggaggcagctgaagagtgacagggacaagcccctgcccccgcttctcgcccgagttggtggcaacatcgaggtgctgggcttcaatgcccgacagcggaaggcctttctgaacgccatcatgcgctggggcatgcccccgcaggacgccttcaactcccactggctggtgcgggaccttcgagggaagagcgagaaggagtttagagcctatgtgtccctcttcatgcggcacctgtgtgagccgggggcggatggtgcagagaccttcgcagacggcgtgccccgggagggcctctccaggcagcacgtgctgacccgcatcggggtcatgtcactagttaggaagaaggttcaggagtttgagcatgtcaacgggaagtacagcaccccagacttgatccctgaggggcccgaggggaagaagccgggcgaggtgatctcctcggaccccaacacaccagtgcccgccagccctgcccacctcctgccagccccgctgggcctgccagacaaaatggaagcccagctgggctacatggatgagaaagaccccggggcacagaagccaaggcagcccctggaagtccaggcccttccagccgccttggatagagtggagagtgaggacaagcacgagagcccagccagcaaggagagagcccgagaggagcggccagaggagacggagaaggccccgccctccccggagcagctgccgagagaggaggtgcttcctgagaaggagaagatcctggacaagctggagctgagcttgatccacagcagaggggacagttccgaactcaggccagatgacaccaaggctgaggagaaggagcccattgaaacacagcaaaatggtgacaaagaggaagatgacgaggggaagaaggaggacaagaaggggaaattcaagttcatgttcaacatcgcggacgggggcttcacggagttgcacacgctgtggcagaacgaggagcgggctgctgtatcctctgggaaaatctacgacatctggcaccggcgccatgactactggctgctggcgggcatcgtgacgcacggctacgcccgctggcaggacatccagaatgacccacggtacatgatcctcaacgagcccttcaagtctgaggtccacaagggcaactacctggagatgaagaacaagttcctggcccgcaggtttaagctgctggagcaggcgttggtcattgaggagcagctccggagggccgcgtacctgaacatgacgcaggaccccaaccaccccgccatggccctcaacgcccgcctggctgaagtggagtgcctcgccgagagccaccagcacctgtccaaggagtcccttgctgggaacaagcctgccaatgccgtcctgcacaaggtcctgaaccagctggaggagctgctgagcgacatgaaggccgacgtgacccggctgccatccatgctgtcccgcatccccccggtggccgcccggctgcagatgtcggagcgcagcatcctgagccgcctgaccaaccgcgccggggaccccaccatccagcagggcgctttcggctcctcccagatgtacagcaacaactttgggcccaacttccggggccctggaccgggagggattgtcaactacaaccagatgcccctggggccctatgtgaccgatatctagccgtcctcgagacttccctgtgttgcagcgctcatttccagctgagccacgcctgccgggccacctgcccgacccacatgggagagaaaagctgccacctttttaggagccagcgccaccttgggacaaaaagggaaacctagtaatgccatcacatggaggacgaggcccagctcagctgggccagagcccagaagtgccacctcatcataattcaagtgttcttccacacagcgttgcccccacaaccacgccggacgtgccccctcgccaccttttccagacgacttcttagaagagatttcatttatttgtacatcttttgcactttcctattgaagacttgaacacgtttgtcttgataaaagttggatgacgtatggaagattcgaacctgcagcactgatgtctctttaccgatgggttccagacccaaggtagtcctggcactgccctgtggactcagcccagctggggaggacatggcgcccggtgccctaggagccctcagtgtcccctacctgacctgtctgcacctgtgtgacagccccttctgatttggccccctgcccgcttggagcctcccagcaccagacagggcaggtttggggagccgctgtcnagccctatggtgagaccctggctgacatttcccctccttcctgccaaggctggaggccgccaggtgtttgctctctccttgtggggaggtggatcctctgccagcaggtgtctgtccccggcccagcgcatcttgaaggccctggactctgttaccagtggggggcctgtggccccggctcttcacagcaggcagaagcgtatgatcccagggagggtgggctgggggggggncagcacttgcctcggagccactgctgcgttgggtttgccttctgccagaggtgtggttaagggcagtgatagctgcgccccagcaaggagggtcatgggccctgagctggcccaggagaccctggccctgccctgtgccctgggatgcctaccctgcccacctccggaggtggaaccgggctgcccctgggggcctggacttgtcccattcccctgtccctggaaaggccttcccgggggctttttgcctgaggctgcactcttggaaggcgtggggagagttctgcctggagggggactggacccagtgccctctgcagacccctcccagccgcagcaccaagggcttgctgccttgtttcctgccaggagcgccctgacatcccaaaaccatcttcccacatgtgggttgttggaatcccacccactcccccggaccctgcccctccaagttggggacggagatggggagcaggtcaggccctccctaggcctgtttgtgtgtgatccttctcctggccccaggtcgacctggaaggcgtttctgagtcttgtactgggaccttcccagggaaggtgccttggggtgcagaatcctgggaatgttaggaaagggctgcgtgaaaaacccagctgggcctggggtggaggtgcacacgggctggggctcagctccttggagagggcctgcctgggactgagggggccagggctgggtcaggattcaccagcttgtgttgcagacactggagcaattgcctggccctccctaagccctatatgcctcactcataatgaggctgtctctgaaccccggagggcgggacctacaagtccttcctcttggcgcattcccacactccagtctggatccaggtctgcaaggccagcccgaccctgacactgcacgtgggcgtagtggggagcaccctggagtggagatgattgtcagcgggctcacatgttatggttcatccacatgcgtgttgtgtgctctgcggtgcctcctggcaaagggtcctggctcgggtcagaagctcactcccgtgccctcgtccccaaacaagcagtggcaagcactggggttggccctcgttgggagcagtgcccaccttccttggcccacagcagataggtcccgagcagcaggactggaggcctgtggcggtcagggcaggggtctgtgtctccaccccaagggctgatggtccctcccctgtgcgccttcctctcaggcaggcttgctctgtcccttcctctctgcttccctcccaggcctcgccagggctcccttctcctctgcctggttagactcgggcacccaggaaagcctggccagggctcctttgggcctgggccccctgcactgcctggtccagaaggggtggtgctgtccgtggccagcaccccggggcccgggaggggtgggctactagagtcagagcgggtttggggctgaccagtttgggagaggagaaaagatctgagaatgtccttcttggtttgtcagtcatctctgccaaaagtggtgatggtggtgtccgtatgtttggcgtctttgggctgggtttggtttttgctgctggtagaatcagggtcctcgggcatgaacgcgagcccaaagtgccagtctgcgattggaaatttccagccactttaagccagtgctgagtagggcttctgcagagccatgtttgagccaaggtcttggaaggcattgccccatgggctcaggtgactcggggtggagtgagcacgtctgcagggccctctcatacacgcctgaggcagaagcagcgtcccccgtgaaagccaccttccgaagctcctgcgttttttgcaaacttggcttcccccaggggcaggctggactttccctgccccctatgattgaagtcctcctgcttttgggggctgccttcccagagtcccccgggtgctcccctgccgaggtcaggagctgaccaagcctttggcccggtgacacctgcagccctcactcctgtcatcccaggacacttgaggcccaaggaggtggagtggagagtgggctcgggtacatgggagccagaagccagatggacttggtcaagtgtcggtcacttggagcctccagtgtgcgtcagggtctgtgggcaggggacagggcgtgggtgggggccgaggctggcacgcccctctgccctcaccgtcttggtgacctggcctcggcccctcccccaagtctcttctgtgcaaggcccgcctcggcctcggcagctggttcctgtcctgttttctgtgtctgaaagtttacaggttgtggtgcatcagcccaaactcactggcgttgtgttttttttttctttaattttcagattttttttttaaacaaagtatttttttaggtgcgataacccagaaagggcccgttgggtgtgtgtgtgtgtcctgaactcctcaagcagcgattggagcccaagcacccctggagaggaagggagggtccccactggcccgtggggtctgagttcaggggtgtggagggagcagactccaccggcccaggcccagctaagagggggccgacccctttccccaggcacagccccaggctggcaaagggagggccctgggctgggtgcagggcgcgccaggagtcccagccagggtggccccggcgggggcgggtccagctttggaagccaggctcccctgtgagccgtggcttgtctggtcttcgcccacgggaggctggacagaggctgtagccaacacaatcacctttactttgtactctgtgtgtatgttttggttttctgtgttttaataaatcctttgggaaaggaataaaaaa

SEQ ID NO: 446151 - DNA, 385 bp, Homo sapiens
  misc_feature (62)..(62): n is a, c, g, or t
tgcgagattatgaatgtaattttgtatgttacattttatagccaaacgcgacgaaaacttantattatgacctttcaaagatgagagacttcatcaataaacaagctgatgcttatgtggagaaaggcatccttgacaaggaagaagccgaggccatcaagcgcatttatagcagcctgtaaaaatggcaaaagatccaggagtctttcaactgtttcagaaaacataatatagcttaaaacacttctaattctgtgattaaaattttttgacccaagggttattagaaagtgctgaatttacagtagttaaccttttacaagtggttaaaacatagctttcttcccgtaaaaactatctgaaagtaaagttgtatgtaagctga

SEQ ID NO: 446152 - DNA, 270 bp, Homo sapiens
caggtgtagtagcgcgccacgagaggtatttgtattaaaattattttttctggtattatgacctttcaaagatgagagacttcatcaataaacaagctgatgcttatgtggagaaaggcatccttgacaaggaagaagccgaggccatcaagcgcatttatagcagcctgtaaaaatggcaaaagatccaggagtctttcaactgtttcagaaaacataatatagcttaaaacacttctaattctgtgattaaaattttttgacccaagg

SEQ ID NO: 446153 - DNA, 3325 bp, Homo sapiens
tcctttgttccattcccgggggattggagtagcgttggagtcaccgacgccatcccctcccgcctctggcgtgcatggagcatgcgcttccttcctcacttcctctccaggagggagcgagagtaaagctacgccctggcgcgcagtctccgcgtcacaggaacttcagcacccacagggcggacagcgctcccctctacctggagacttgactcccgcgcgccccaaccctgcttatcccttgaccgtcgagtgtcagagatcctgcagccgcccagtcccggcccctctcccgccccacacccaccctcctggctcttcctgtttttactcctccttttcattcataacaaaagctacagctccaggagcccagcgccgggctgtgacccaagccgagcgtggaagaatggggttcctcgggaccggcacttggattctggtgttagtgctcccgattcaagctttccccaaacctggaggaagccaagacaaatctctacataatagagaattaagtgcagaaagacctttgaatgaacagattgctgaagcagaagaagacaagattaaaaaaacatatcctccagaaaacaagccaggtcagagcaactattcttttgttgataacttgaacctgctaaaggcaataacagaaaaggaaaaaattgagaaagaaagacaatctataagaagctccccacttgataataagttgaatgtggaagatgttgattcaaccaagaatcgaaaactgatcgatgattatgactctactaagagtggattggatcataaatttcaagatgatccagatggtcttcatcaactagacgggactcctttaaccgctgaagacattgtccataaaatcgctgccaggatttatgaagaaaatgacagagccgtgtttgacaagattgtttctaaactacttaatctcggccttatcacagaaagccaagcacatacactggaagatgaagtagcagaggttttacaaaaattaatctcaaaggaagccaacaattatgaggaggatcccaataagcccacaagctggactgagaatcaggctggaaaaataccagagaaagtgactccaatggcagcaattcaagatggtcttgctaagggagaaaacgatgaaacagtatctaacacattaaccttgacaaatggcttggaaaggagaactaaaacctacagtgaagacaactttgaggaactccaatatttcccaaatttctatgcgctactgaaaagtattgattcagaaaaagaagcaaaagagaaagaaacactgattactatcatgaaaacactgattgactttgtgaagatgatggtgaaatatggaacaatatctccagaagaaggtgtttcctaccttgaaaacttggatgaaatgattgctcttcagaccaaaaacaagctagaaaaaaatgctactgacaatataagcaagcttttcccagcaccatcagagaagagtcatgaagaaacagacagtaccaaggaagaagcagctaagatggaaaaggaatatggaagcttgaaggattccacaaaagatgataactccaacccaggaggaaagacagatgaacccaaaggaaaaacagaagcctatttggaagccatcagaaaaaatattgaatggttgaagaaacatgacaaaaagggaaataaagaagattatgacctttcaaagatgagagacttcatcaataaacaagctgatgcttatgtggagaaaggcatccttgacaaggaagaagccgaggccatcaagcgcatttatagcagcctgtaaaaatggcaaaagatccaggagtctttcaactgtttcagaaaacataatatagcttaaaacacttctaattctgtgattaaaattttttgacccaagggttattagaaagtgctgaatttacagtagttaaccttttacaagtggttaaaacatagctttcttcccgtaaaaactatctgaaagtaaagttgtatgtaagctgagattttgtatacagaatccttatttcctcatagacttatattttataatcagaatatgttgctttgaaaaagcctctaatggactgaccttaaaactcatccttcttccactgtctcatccacataagcactccccgaagaattaagggggttctgttttcaaggcatgccaagtactaaagcaccttgcagagcgtgtctattacaagatgtcatttccaccagcagttcccttaggggagctgaaataaattcacattttctcaaagtctcatagctttggaggagccatctgcttttttggctgctctttttagctggctttttattaggctcagtgacataaaaaggatccaggtaaatgggtataggatttgctggatttactaacaatttccccctgttcttaacacttcctattagtgacttttcagacattgagtttacttataaagagagatatttatgtactctctaagaagacaaatgaggtcataaacactgcataaagcaaggcaaaaatgtatgccacatctcagttatctaaactagattagatccaagccaagttttctcaacagagagcaaagggccaggcagtaaggtagaaatagagataaaaatcattccttccttgtgatccaaagctggtcgagcagctttcctggaggaaaaggttaatgaacttcaggtccctgcaactcagcccccaccacaaacacagccctggaaacatacagtggcgcaaggtcctcttgaaatgttaatggttaatgttcccaaaccagagaatgctttgaaaatgtatcattcagtgtaaattaattacatacatatttttctatatatttgtttcaaactgtaaaaataacataatatgtaatttgtgtattagtgagaggtgaagccagctggacttcctgggtcgagtggggccttggagaacttttctgtcttacaagaggattgtaaaatgcacccatcagtgctctgtaaaacacaccaatcagcgctctgtagctagcaataggtttgtaaaatgcacccatcagcactctgtaaaacgcaccaatcagcactctgtaaaatgcaccaatcagcaggattctaaaagtagacaatcacagggaggattgaaaaaaagggcactctgatagggcaaaaacggaacatgggaggggacaaataagggaataaaatctggccaccccagccagcagcagcaacctgttcaggtcgcctgccgctgtggaagctttgtccttttgctcttcataataaaccttgctactgttcaaaaattggg

SEQ ID NO: 446154 - DNA, 2019 bp, Homo sapiens
tcctttgttccattcccgggggattggagtagcgttggagtcaccgacgccatcccctcccgcctctggcgtgcatggagcatgcgcttccttcctcacttcctctccaggagggagcgagagtaaagctacgccctggcgcgcagtctccgcgtcacaggaacttcagcacccacagggcggacagcgctcccctctacctggagacttgactcccgcgcgccccaaccctgcttatcccttgaccgtcgagtgtcagagatcctgcagccgcccagtcccggcccctctcccgccccacacccaccctcctggctcttcctgtttttactcctccttttcattcataacaaaagctacagctccaggagcccagcgccgggctgtgacccaagccgagcgtggaagaatggggttcctcgggaccggcacttggattctggtgttagtgctcccgattcaagctttccccaaacctggaggaagccaagacaaatctctacataatagagaattaagtgcagaaagacctttgaatgaacagattgctgaagcagaagaagacaagattaaaaaaacatatcctccagaaaacaagccaggtcagagcaactattcttttgttgataacttgaacctgctaaaggcaataacagaaaaggaaaaaattgagaaagaaagacaatctataagaagctccccacttgataataagttgaatgtggaagatgttgattcaaccaagaatcgaaaactgatcgatgattatgactctactaagagtggattggatcataaatttcaagatgatccagatggtcttcatcaactagacgggactcctttaaccgctgaagacattgtccataaaatcgctgccaggatttatgaagaaaatgacagagccgtgtttgacaagattgtttctaaactacttaatctcggccttatcacagaaagccaagcacatacactggaagatgaagtagcagaggttttacaaaaattaatctcaaaggaagccaacaattatgaggaggatcccaataagcccacaagctggactgagaatcaggctggaaaaataccagagaaagtgactccaatggcagcaattcaagatggtcttgctaagggagaaaacgatgaaacagtatctaacacattaaccttgacaaatggcttggaaaggagaactaaaacctacagtgaagacaactttgaggaactccaatatttcccaaatttctatgcgctactgaaaagtattgattcagaaaaagaagcaaaagagaaagaaacactgattactatcatgaaaacactgattgactttgtgaagatgatggtgaaatatggaacaatatctccagaagaaggtgtttcctaccttgaaaacttggatgaaatgattgctcttcagaccaaaaacaagctagaaaaaaatgctactgacaatataagcaagcttttcccagcaccatcagagaagagtcatgaagaaacagacagtaccaaggaagaagcagctaagatggaaaaggaatatggaagcttgaaggattccacaaaagatgataactccaacccaggaggaaagacagatgaacccaaaggaaaaacagaagcctatttggaagccatcagaaaaaatattgaatggttgaagaaacatgacaaaaagggaaataaagaagattatgacctttcaaagatgagagacttcatcaataaacaagctgatgcttatgtggagaaaggcatccttgacaaggaagaagccgaggccatcaagcgcatttatagcagcctgtaaaaatggcaaaagatccaggagtctttcaactgtttcagaaaacataatatagcttaaaacacttctaattctgtgattaaaattttttgacccaagggttattagaaagtgctgaatttacagtagttaaccttttacaagtggttaaaacatagctttcttcccgtaaaaactatctgaaagtaaagttgtatgtaagctga

SEQ ID NO: 446155 - DNA, 1780 bp, Homo sapiens
tgtcttcttctgtcttcttctgcttcagcaatctgttcattcaaaggtctttctgcacttaattctctattatgtagagatttgtcttggcttcctccttttcattcataacaaaagctacagctccaggagcccagcgccgggctgtgacccaagccgagcgtggaagaatggggttcctcgggaccggcacttggattctggtgttagtgctcccgattcaagctttccccaaacctggaggaagccaagacaaatctctacataatagagaattaagtgcagaaagacctttgaatgaacagattgctgaagcagaagaagacaagattaaaaaaacatatcctccagaaaacaagccaggtcagagcaactattcttttgttgataacttgaacctgctaaaggcaataacagaaaaggaaaaaattgagaaagaaagacaatctataagaagctccccacttgataataagttgaatgtggaagatgttgattcaaccaagaatcgaaaactgatcgatgattatgactctactaagagtggattggatcataaatttcaagatgatccagatggtcttcatcaactagacgggactcctttaaccgctgaagacattgtccataaaatcgctgccaggatttatgaagaaaatgacagagccgtgtttgacaagattgtttctaaactacttaatctcggccttatcacagaaagccaagcacatacactggaagatgaagtagcagaggttttacaaaaattaatctcaaaggaagccaacaattatgaggaggatcccaataagcccacaagctggactgagaatcaggctggaaaaataccagagaaagtgactccaatggcagcaattcaagatggtcttgctaagggagaaaacgatgaaacagtatctaacacattaaccttgacaaatggcttggaaaggagaactaaaacctacagtgaagacaactttgaggaactccaatatttcccaaatttctatgcgctactgaaaagtattgattcagaaaaagaagcaaaagagaaagaaacactgattactatcatgaaaacactgattgactttgtgaagatgatggtgaaatatggaacaatatctccagaagaaggtgtttcctaccttgaaaacttggatgaaatgattgctcttcagaccaaaaacaagctagaaaaaaatgctactgacaatataagcaagcttttcccagcaccatcagagaagagtcatgaagaaacagacagtaccaaggaagaagcagctaagatggaaaaggaatatggaagcttgaaggattccacaaaagatgataactccaacccaggaggaaagacagatgaacccaaaggaaaaacagaagcctatttggaagccatcagaaaaaatattgaatggttgaagaaacatgacaaaaagggaaataaagaagattatgacctttcaaagatgagagacttcatcaataaacaagctgatgcttatgtggagaaaggcatccttgacaaggaagaagccgaggccatcaagcgcatttatagcagcctgtaaaaatggcaaaagatccaggagtctttcaactgtttcagaaaacataatatagcttaaaacacttctaattctgtgattaaaattttttgacccaagggttattagaaagtgctgaatttacagtagttaaccttttacaagtggttaaaacatagctttcttcccgtaaaaactatctgaaagtaaagttgtatgtaagctga

SEQ ID NO: 446156 - DNA, 1683 bp, Homo sapiens
  misc_feature (78)..(78): n is a, c, g, or t
taaataaaattagaaataaatgacatattaaatgtaacaacacccccacccttgacggaaacacctgcaaggtgtagnatattcatcaataaacaagctgatgcttatgtggagaaaggcatccttgacaaggaagaagccgaggccatcaagcgcatttatagcagcctgtaaaaatggcaaaagatccaggagtctttcaactgtttcagaaaacataatatagcttaaaacacttctaattctgtgattaaaattttttgacccaagggttattagaaagtgctgaatttacagtagttaaccttttacaagtggttaaaacatagctttcttcccgtaaaaactatctgaaagtaaagttgtatgtaagctgagattttgtatacagaatccttatttcctcatagacttatattttataatcagaatatgttgctttgaaaaagcctctaatggactgaccttaaaactcatccttcttccactgtctcatccacataagcactccccgaagaattaagggggttctgttttcaaggcatgccaagtactaaagcaccttgcagagcgtgtctattacaagatgtcatttccaccagcagttcccttaggggagctgaaataaattcacattttctcaaagtctcatagctttggaggagccatctgcttttttggctgctctttttagctggctttttattaggctcagtgacataaaaaggatccaggtaaatgggtataggatttgctggatttactaacaatttccccctgttcttaacacttcctattagtgacttttcagacattgagtttacttataaagagagatatttatgtactctctaagaagacaaatgaggtcataaacactgcataaagcaaggcaaaaatgtatgccacatctcagttatctaaactagattagatccaagccaagttttctcaacagagagcaaagggccaggcagtaaggtagaaatagagataaaaatcattccttccttgtgatccaaagctggtcgagcagctttcctggaggaaaaggttaatgaacttcaggtccctgcaactcagcccccaccacaaacacagccctggaaacatacagtggcgcaaggtcctcttgaaatgttaatggttaatgttcccaaaccagagaatgctttgaaaatgtatcattcagtgtaaattaattacatacatatttttctatatatttgtttcaaactgtaaaaataacataatatgtaatttgtgtattagtgagaggtgaagccagctggacttcctgggtcgagtggggccttggagaacttttctgtcttacaagaggattgtaaaatgcacccatcagtgctctgtaaaacacaccaatcagcgctctgtagctagcaataggtttgtaaaatgcacccatcagcactctgtaaaacgcaccaatcagcactctgtaaaatgcaccaatcagcaggattctaaaagtagacaatcacagggaggattgaaaaaaagggcactctgatagggcaaaaacggaacatgggaggggacaaataagggaataaaatctggccaccccagccagcagcagcaacctgttcaggtcgcctgccgctgtggaagctttgtccttttgctcttcataataaaccttgctactgttcaaaaattggg

SEQ ID NO: 446157 - DNA, 2268 bp, Homo sapiens
  misc_feature (2243)..(2243): n is a, c, g, or t
  misc_feature (2262)..(2262): n is a, c, g, or t
tcctttgttccattcccgggggattggagtagcgttggagtcaccgacgccatcccctcccgcctctggcgtgcatggagcatgcgcttccttcctcacttcctctccaggagggagcgagagtaaagctacgccctggcgcgcagtctccgcgtcacaggaacttcagcacccacagggcggacagcgctcccctctacctggagacttgactcccgcgcgccccaaccctgcttatcccttgaccgtcgagtgtcagagatcctgcagccgcccagtcccggcccctctcccgccccacacccaccctcctggctcttcctgtttttactcctccttttcattcataacaaaagctacagctccaggagcccagcgccgggctgtgacccaagccgagcgtggaagaatggggttcctcgggaccggcacttggattctggtgttagtgctcccgattcaagctttccccaaacctggaggaagccaagacaaatctctacataatagagaattaagtgcagaaagacctttgaatgaacagattgctgaagcagaagaagacaagattaaaaaaacatatcctccagaaaacaagccaggtcagagcaactattcttttgttgataacttgaacctgctaaaggcaataacagaaaaggaaaaaattgagaaagaaagacaatctataagaagctccccacttgataataagttgaatgtggaagatgttgattcaaccaagaatcgaaaactgatcgatgattatgactctactaagagtggattggatcataaatttcaagatgatccagatggtcttcatcaactagacgggactcctttaaccgctgaagacattgtccataaaatcgctgccaggatttatgaagaaaatgacagagccgtgtttgacaagattgtttctaaactacttaatctcggccttatcacagaaagccaagcacatacactggaagatgaagtagcagaggttttacaaaaattaatctcaaaggaagccaacaattatgaggaggatcccaataagcccacaagctggactgagaatcaggctggaaaaataccagagaaagtgactccaatggcagcaattcaagatggtcttgctaagggagaaaacgatgaaacagtatctaacacattaaccttgacaaatggcttggaaaggagaactaaaacctacagtgaagacaactttgaggaactccaatatttcccaaatttctatgcgctactgaaaagtattgattcagaaaaagaagcaaaagagaaagaaacactgattactatcatgaaaacactgattgactttgtgaagatgatggtgaaatatggaacaatatctccagaagaaggtgtttcctaccttgaaaacttggatgaaatgattgctcttcagaccaaaaacaagctagaaaaaaatgctactgacaatataagcaagcttttcccagcaccatcagagaagagtcatgaagaaacagacagtaccaaggaagaagcagctaagatggaaaaggaatatggaagcttgaaggattccacaaaagatgataactccaacccaggaggaaagacagatgaacccaaaggaaaaacagaagcctatttggaagccatcagaaaaaatattgaatggttgaagaaacatgacaaaaagggaaataaagaagattatgacctttcaaagatgagagacttcatcaataaacaagctgatgcttatgtggagaaaggcatccttgacaaggaagaagccgaggccatcaagcgcatttatagcagcctgtaaaaatggcaaaagatccaggagtctttcaactgtttcagaaaacataatatagcttaaaacacttctaattctgtgattaaaattttttgacccaagggttattagaaagtgctgaatttacagtagttaaccttttacaagtggttaaaacatagctttcttcccgtaaaaactatctgaaagtaaagttgtatgtaagctgagattttgtatacagaatccttatttcctcatagacttatattttataatcagaatatgttgctttgaaaaagcctctaatggactgaccttaaaactcatccttcttccactgtctcatccacataagcactccccgaagaattaagggggttctgttttcaaggcatgccaagtactaaagcaccttgcagagcgtgtctattacaagatagaagattaatcnatgctgtaatagatgtctnataggg

SEQ ID NO: 446158 - DNA, 1913 bp, Homo sapiens
tcctttgttccattcccgggggattggagtagcgttggagtcaccgacgccatcccctcccgcctctggcgtgcatggagcatgcgcttccttcctcacttcctctccaggagggagcgagagtaaagctacgccctggcgcgcagtctccgcgtcacaggaacttcagcacccacagggcggacagcgctcccctctacctggagacttgactcccgcgcgccccaaccctgcttatcccttgaccgtcgagtgtcagagatcctgcagccgcccagtcccggcccctctcccgccccacacccaccctcctggctcttcctgtttttactcctccttttcattcataacaaaagctacagctccaggagcccagcgccgggctgtgacccaagccgagcgtggaagaatggggttcctcgggaccggcacttggattctggtgttagtgctcccgattcaagctttccccaaacctggaggaagccaagacaaatctctacataatagagaattaagtgcagaaagacctttgaatgaacagattgctgaagcagaagaagacaagattaaaaaaacatatcctccagaaaacaagccaggtcagagcaactattcttttgttgataacttgaacctgctaaaggcaataacagaaaaggaaaaaattgagaaagaaagacaatctataagaagctccccacttgataataagttgaatgtggaagatgttgattcaaccaagaatcgaaaactgatcgatgattatgactctactaagagtggattggatcataaatttcaagatgatccagatggtcttcatcaactagacgggactcctttaaccgctgaagacattgtccataaaatcgctgccaggatttatgaagaaaatgacagagccgtgtttgacaagattgtttctaaactacttaatctcggccttatcacagaaagccaagcacatacactggaagatgaagtagcagaggttttacaaaaattaatctcaaaggaagccaacaattatgaggaggatcccaataagcccacaagctggactgagaatcaggctggaaaaataccagagaaagtgactccaatggcagcaattcaagatggtcttgctaagggagaaaacgatgaaacagtatctaacacattaaccttgacaaatggcttggaaaggagaactaaaacctacagtgaagacaactttgaggaactccaatatttcccaaatttctatgcgctactgaaaagtattgattcagaaaaagaagcaaaagagaaagaaacactgattactatcatgaaaacactgattgactttgtgaagatgatggtgaaatatggaacaatatctccagaagaaggtgtttcctaccttgaaaacttggatgaaatgattgctcttcagaccaaaaacaagctagaaaaaaatgctactgacaatataagcaagcttttcccagcaccatcagagaagagtcatgaagaaacagacagtaccaaggaagaagcagctaagatggaaaaggaatatggaagcttgaaggattccacaaaagatgataactccaacccaggaggaaagacagatgaacccaaaggaaaaacagaagcctatttggaagccatcagaaaaaatattgaatggttgaagaaacatgacaaaaagggaaataaagaagattatgacctttcaaagatgagagacttcatcaataaacaagctgatgcttatgtggagaaaggcatccttgacaaggaagaagccgaggccatcaagcgcatttatagcagcctgtaaaaatggcaaaagatccaggagtctttcaactgtttcagaaaacataatatagcttaaaacacttctaattctgtgattaaaattttttgacccaagg

SEQ ID NO: 446159 - DNA, 507 bp, Homo sapiens
aaaaaaaaaaaaaaaaaaaaaaaaaaaaaaaaaaaaaaaaaaaacccacatttttttttattggcaagcatgtggtgtttggcaaagttctagagggcatggaggtggtgcggaaggtggagagcaccaagacagacagccgggataaacccctgaaggatgtgatcatcgcagactgcggcaagatcgaggtggagaagccctttgccatcgccaaggagtagggcacagggacatctttctttgagtgaccgtctgtgcaggccctgtagtccgccacagggctctgagctgcactggccccggtgctggcatctggtggagcggacccactcccctcacattccacaggcccatggactcacttttgtaacaaactcctaccaacactgaccaataaaaaaaaatgtgggtttttttttttttttttttttttttttttttttttttttttttttgggggggccccaaaaaaaaatttgttgttgggcgcaaccaacagggggg

SEQ ID NO: 446160 - DNA, 292 bp, Homo sapiens
  misc_feature (24)..(24): n is a, c, g, or t
  misc_feature (29)..(29): n is a, c, g, or t
atgatctagagtcatccccatcgnaggtngtcatcgcagactgcggcaagatcgaggtggagaagccctttgccatcgccaaggagtagggcacagggacatctttctttgagtgaccgtctgtgcaggccctgtagtccgccacagggctctgagctgcactggccccggtgctggcatctggtggagcggacccactcccctcacattccacaggcccatggactcacttttgtaacaaactcctaccaacactgaccaataaaaaaaaatgtgggtttttttttttttt

SEQ ID NO: 446161 - DNA, 279 bp, Homo sapiens
  misc_feature (205)..(205): n is a, c, g, or t
ggcacattgtgctggcaccatgtgctggcatctggtggagcggacccactcccctcacattccacaggcccatggactcacttttgtaacaaactcctaccaacactgaccaataaaaaaaaatgtgggttttttttttttttttttttttttttttttttttttttttttttttttttttttttttttttttttttttttgttntttttttttttttgtttttttttttttttttttttttttataagaaaacagagagagagactatagggggggga

SEQ ID NO: 446162 - DNA, 347 bp, Homo sapiens
ttgtgatggcaagggcttctccacctcgatcttgccgcagtctgcgatgatcacatccttcaggcgtttatcccggctgtctgtcttggtgctggcatctggtggagcggacccactcccctcacattccacaggcccatggactcacttttgtaacaaactcctaccaacactgaccaataaaaaaaaatgtgggttttttttttttttttttttttttttttttttttttttttttttttttttttttttttttttttttttttttttttttttttttttttttttttttttgtgtggggggggggggagcctcctcaccccccccacacaccccccccccctga

SEQ ID NO: 446163 - DNA, 369 bp, Homo sapiens
atccagtctacatcacaacagtcaagacagcctgactagaatgcaagcatgtggtgtttggcaaagttctagagggcatggagatggtgcggacggtggagagcaccaagacagacagccgggataattttggggtctttgctacaggagagaaaggatttggctacaaaaacagcaaattccatcgtgtaatcaaggacttcatgatccagggcggagacttcaccaggggagatggcacaggaggaaagagcatctacggtgagcgcttccccgatgagaacttcaaactgaagcactacgggcctggctgggtgagcatggccaacgcaggcaaagacacagcaaagaccccaaaaggggtaccga

SEQ ID NO: 446164 - DNA, 238 bp, Homo sapiens
gacggagtgatgctgcggtgttctagaggatcccggcaccattgtgctggcatctggtggagcggacccactcccctcacattccacaggcccatggactcacttttgtaacaaactcctaccaacactgaccaataaaaaaaaatgtgggtttttttttttttttttttttttttttttttttttttaaaaaccccccccaaaaattcccccgggacaagggtccaccggccacaaa

SEQ ID NO: 446165 - DNA, 1000 bp, Homo sapiens
  misc_feature (3)..(5): n is a, c, g, or t
  misc_feature (8)..(8): n is a, c, g, or t
ggnnnganacggcccgccgcccgcccggagcccgcgagcaaccccagtcccccccacccgcgcgtggcggcgccggctccctagccaccgcggccccaccctcttccggcctcagctgtccgggctgctttcgcctccgcctgtggatgctgcgcctctccgaacgcaacatgaaggtgctccttgccgccgccctcatcgcggggtccgtcttcttcctgctgctgccgggaccttctgcggccgatgagaagaagaaggggcccaaagtcaccgtcaaggtgtattttgacctacgaattggagatgaagatgtaggccgggtgatctttggtctcttcggaaagactgttccaaaaacagtggataattttgtggccttagctacaggagagaaaggatttggctacaaaaacagcaaattccatcgtgtaatcaaggacttcatgatccagggcggagacttcaccaggggagatggcacaggaggaaagagcatctacggtgagcgcttccccgatgagaacttcaaactgaagcactacgggcctggctgggtgagcatggccaacgcaggcaaagacaccaacggctcccagttcttcatcacgacagtcaagacagcctggctagatggcaagcatgtggtgtttggcaaagttctagagggcatggaggtggtgcggaaggtggagagcaccaagacagacagccgggataaacccctgaaggatgtgatcatcgcagactgcggcaagatcgaggtggagaagccctttgccatcgccaaggagtagggcacagggacatctttctttgagtgaccgtctgtgcaggccctgtagtccgccacagggctctgagctgcactggccccggtgctggcatctggtggagcggacccactcccctcacattccacaggcccatggactcacttttgtaacaaactcctaccaacactgaccaataaaaaaaaatgtgggtttttttttttttt

SEQ ID NO: 446166 - DNA, 414 bp, Homo sapiens
cgagaggatcccggcggttgtgctggagagggcatggaggtggtgcggaaggtggagagcaccaagacagacagccgggataaacccctgaaggatgtgatcatcgcagactgcggcaagatcgaggtggagaagccctttgccatcgccaaggagtagggcacagggacatctttctttgagtgaccgtctgtgcaggccctgtagtccgccacagggctctgagctgcactggccccggtgctggcatctggtggagcggacccactcccctcacattccacaggcccatggactcacttttgtaacaaactcctaccaacactgaccaataaaaaaaaatgtgggttttttttttttttttttttttttttttttttttttttttatgggaatttttccattttttttaaa

SEQ ID NO: 446167 - DNA, 491 bp, Homo sapiens
tcaggatgctgcggtgatctagaggatcccagtgtctgagaaggtggagagcaccaagacagacagccgggataaacccctgaaggatgtgatcatcgcagactgcggcaagatcgaggtggagaagccctttgccatcgccaaggagtagggcacagggacatctttctttgagtgaccgtctgtgcaggccctgtagtccgccacagggctctgagctgcactggccccggtgctggcatctggtggagcggacccactcccctcacattccacaggcccatggactcacttttgtaacaaactcctaccaacactgaccaataaaaaaaaatgtgggttttttttttttttttttttttttttttttttttttttttttttttttttttttttggggggggggaaaaaaaaacaaaggggggggcaaaaaaaagaacagggaaaagggcgggggggggcacggggggcccacgggggggggaaaaaaa

SEQ ID NO: 446168 - DNA, 205 bp, Homo sapiens
  misc_feature (17)..(17): n is a, c, g, or t
tagtgtctagaggatcngtgcgtgccggtgctggcatctggtggagcggacccactcccctcacattccacaggcccatggactcacttttgtaacaaactcctaccaacactgaccaataaaaaaaaatgtgggtttttttttttttttttttttttttttttttttttttttttttttttggggggcccgggggcccattcga

SEQ ID NO: 446169 - DNA, 164 bp, Homo sapiens
gatgtgctgctgcggtactctcgacgactcccggcaccacttgtgctggcatctggtggagcggacccactcccctcacattccacaggcccatggactcacttttgtaacaaactcctaccaacactgaccaataaaaaaaaatgtgggtttttttttttttt

SEQ ID NO: 446170 - DNA, 834 bp, Homo sapiens
gagggtgagaaagccccttggcattgccaagggtttgtggcacacgggacatctcttcttggaagtgacccttttggggcagggcccctggtatgcgcgccaacaaggggttctgagacttcactttggcccccggtttctgggactttttggttgtaaccggacgccaatggcccgtcagcagtggccacccagcccctggatgtcaactttttgtgaccaactcctgtccgcacccgtgtgcacattaaagaaaaattttggggttattttttatttctgttaagtaatatataatgtgtgggcctggttcttgagcctgcagcacctcccctaggcctacatcccaacatgcctgcaactctcctgtggcaatgggtgcctgccccttccctgggatcctgcctgaaattttgacccaggagctacccaggaaaagtcaggcaggagcttttgccccctgcttctaaactttgccagctactgggcctccacatttgctccccttgccaccaccctccagtctatgttaagggatgtatctgtactttttcatagcctacctctaaattgatttttttttttttttttggtagagacaggtctcactatgttgcgctggctggtctcaaacttccagacccaagcatcctcctgccttggcctcctaaagtattgggattacaggcatgagctctgcacccagctgacttcttcctttattatttatttattttgagacggagtttcactcttgttgcccaggctggagtgcagtggcgcgatctcggctcaccacaacttccgcctcctggcttcaagagattctcctgc

SEQ ID NO: 446171 - DNA, 768 bp, Homo sapiens
  misc_feature (1)..(1): n is a, c, g, or t
ntctttaactagtggatcccccttctgcaggaattcggcacgaggtttatattaactttccattgagccagcaggtgacctttcttctcagttttcttgtatctgttcttatgattggaagaaatgaggggaaaagcattatgtgatgtagaattgtataaagcttgggaattgtatggaggcagagggatttccacatctgtgtgtaccatgcctgtcctgtggcgcctgcccgctcacttagtagcacactgaacagtgaaagtggtcagcagtggtgtctcttctgcgagcaggagttgtggacttgttcctgtgaggcctatttaatgtaatgtcttcctgctgccccataccacctccttaccttctcttccctttttctagaaaggatttggctacaaaaggatttggctacaaaaacagcaaattccatcgtgtaatcaaggacttcatgatccagggcggagacttcaccaggggagatggcacaggaggtaaccacaggtcctctgggccaaggagtatgtcagtgtagcctccacagtgggagggccaggttctgctggggagaccaggcctctttcttccccagctctagaggcaggcctacttattacttacctactttgagaccagcggcacccttctttgaagagggaacccagtaccaggtgaccgtccttgctgatccaggcctatagcctggtgaccctttcctgataccttttaagaatggggattggggagagaggcctctggaagcaa

SEQ ID NO: 446172 - DNA, 912 bp, Homo sapiens
ccacgcgtcggagcatctacggtgaaggcgcttcccctgctttcgcctccgcctgtggatgctgcgcctctccgaacgcaacatgaaggtgctccttgccgccgccctcatcgcggggtccgtcttcttcctgctgctgccgggaccttctgcggccgatgagaagaagaaggggcccaaagtcaccgtcaaggtgtattttgacctacgaattggagatgaagatgtaggccgggtgatctttggtctcttcggaaagactgttccaaaaacagtggataattttgtggccttagctacaggagagaaaggatttggctacaaaaacagcaaattccatcgtgtaatcaaggacttcatgatccagggcggagacttcaccaggggagatggcacaggaggaaagagcatctacggtgagcgcttccccgatgagaacttcaaactgaagcactacgggcctggctgggtgagcatggccaacgcaggcaaagacaccaacggctcccagttcttcatcacgacagtcaagacagcctggctagatggcaagcatgtggtgtttggcaaagttctagagggcatggaggtggtgcggaaggtggagagcaccaagacagacagccgggataaacccctgaaggatgtgatcatcgcagactgcggcaagatcgaggtggagaagccctttgccatcgccaaggagtagggcacagggacatctttctttgagtgaccgtctgtgcaggccctgtagtccgccacagggctctgagctgcactggccccggtgctggcatctggtggagcggacccactcccctcacattccacaggcccatggactcacttttgtaacaaactcctaccaacactgaccaataaaaaaaaatgtgggtttttttttttttt

SEQ ID NO: 446173 - DNA, 1407 bp, Homo sapiens
cccacgcgtccggctgtccgggctgctttcgcctccgcctgtggatgctgcgcctctccgaacgcaacatgaaggtgctccttgccgccgccctcatcgcggggtccgtcttcttcctgctgctgccgggaccttctgcggccgatgagaagaagaaggggcccaaagtcaccgtcaaggtgtattttgacctacgaattggagatgaagatgtaggccgggtgatctttggtctcttcggaaagactgttccaaaaacagtggataattttgtggccttagctacaggagagaaaggatttggctacaaaaacagcaaattccatcgtgtaatcaaggacttcatgatccagggcggagacttcaccaggggagatggcacaggaggaaagagcatctacggtgagcgcttccccgatgagaacttcaaactgaagcactacgggcctggctgggtgagcatggccaacgcaggcaaagacaccaacggctcccagttcttcatcacgacagtcaagacagcctggctagatggcaagcatgtggtgtttggcaaagttctagagggcatggaggtggtgcggaaggtggagagcaccaagacagacagccgggataaacccctgaaggatgtgatcatcgcagactgcggcaagatcgaggtggagaagccctttgccatcgccaaggagtagggcacagggacatctttctttgagtgaccgtctgtgcaggccctgtagtccgccacagggctctgagctgcactggccccggtgctggcatctggtggagcggacccactcccctcacattccacaggcccatggactcacttttgtaacaaactcctaccaacactgaccaataaaaaaaaatgtgggttttttttttttttaaaaaaaaaaaaaaaaaaaaaaaaaaaaaaaagggggggggggacaaaaaaatatccacagagggggcacaagttaaaggataccaagttttttggaaaagggtgggcccctaatgagggacgacgaataataaagacagagacaagggggcgagggtttaaacaacggtcgagaacggtggcaaaactgggagcgggggacacctggggaagggaccttacaacggggggggaccatattggggagaaaaagtgcctaaagagagtttttaaggccacgagggaaagttaacatttaagaggagtaaagggggtcaaaaacgaggagaaaggtgtggggggagtgagaagtttgggatacgggaatgtttatgtgacatttaggggggtgtaagtaaagacagagagaggtataatgatagagacgagaggaagaagagagagagagtaaaacgaagatgaaggaagagagcgtaggagaggatagcagacgaaaacgtacagctaag

SEQ ID NO: 446174 - DNA, 1033 bp, Homo sapiens
cccacgcgtccggctgtccgggctgctttcgcctccgcctgtggatgctgcgcctctccgaacgcaacatgaaggtgctccttgccgccgccctcatcgcggggtccgtcttcttcctgctgctgccgggaccttctgcggccgatgagaagaagaaggggcccaaagtcaccgtcaaggtgtattttgacctacgaattggagatgaagatgtaggccgggtgatctttggtctcttcggaaagactgttccaaaaacagtggataattttgtggccttagctacaggagagaaaggatttggctacaaaaacagcaaattccatcgtgtaatcaaggacttcatgatccagggcggagacttcaccaggggagatggcacaggaggaaagagcatctacggtgagcgcttccccgatgagaacttcaaactgaagcactacgggcctggctgggtgagcatggccaacgcaggcaaagacaccaacggctcccagttcttcatcacgacagtcaagacagcctggctagatggcaagcatgtggtgtttggcaaagttctagagggcatggaggtggtgcggaaggtggagagcaccaagacagacagccgggataaacccctgaaggatgtgatcatcgcagactgcggcaagatcgaggtggagaagccctttgccatcgccaaggagtagggcacagggacatctttctttgagtgaccgtctgtgcaggccctgtagtccgccacagggctctgagctgcactggccccggtgctggcatctggtggagcggacccactcccctcacattccacaggcccatggactcacttttgtaacaaactcctaccaacactgaccaataaaaaaaaatgtgggttttttttttttttaaaaaaaaaaaaaaaaaaaaaaaaaaaaaaaggcccgaactacaacgacagaaagaactggaaagaaacacaggggggggggcccggaaaccagaacgggcccaaaggggcccacaacccgccgtgagcccgacg

SEQ ID NO: 446175 - DNA, 1066 bp, Homo sapiens
cccacgcgtccggctgtccgggctgctttcgcctccgcctgtggatgctgcgcctctccgaacgcaacatgaaggtgctccttgccgccgccctcatcgcggggtccgtcttcttcctgctgctgccgggaccttctgcggccgatgagaagaagaaggggcccaaagtcaccgtcaaggtgtattttgacctacgaattggagatgaagatgtaggccgggtgatctttggtctcttcggaaagactgttccaaaaacagtggataattttgtggccttagctacaggagagaaaggatttggctacaaaaacagcaaattccatcgtgtaatcaaggacttcatgatccagggcggagacttcaccaggggagatggcacaggaggaaagagcatctacggtgagcgcttccccgatgagaacttcaaactgaagcactacgggcctggctgggtgagcatggccaacgcaggcaaagacaccaacggctcccagttcttcatcacgacagtcaagacagcctggctagatggcaagcatgtggtgtttggcaaagttctagagggcatggaggtggtgcggaaggtggagagcaccaagacagacagccgggataaacccctgaaggatgtgatcatcgcagactgcggcaagatcgaggtggagaagccctttgccatcgccaaggagtagggcacagggacatctttctttgagtgaccgtctgtgcaggccctgtagtccgccacagggctctgagctgcactggccccggtgctggcatctggtggagcggacccactcccctcacattccacaggcccatggactcacttttgtaacaaactcctaccaacactgaccaataaaaaaaaatgtgggttttttttttttttttttttttttttttttttttttttttttttttttttttttttttttttttttttttttttttttttttttttttttttttttttttttttttttttttttttttttcggggggcaggccttttgttccatcttggggggggggcacacccgcccccacttttctctcc

SEQ ID NO: 446176 - DNA, 1438 bp, Homo sapiens
cccacgcgtccggctgtccgggctgctttcgcctccgcctgtggatgctgcgcctctccgaacgcaacatgaaggtgctccttgccgccgccctcatcgcggggtccgtcttcttcctgctgctgccgggaccttctgcggccgatgagaagaagaaggggcccaaagtcaccgtcaaggtgtattttgacctacgaattggagatgaagatgtaggccgggtgatctttggtctcttcggaaagactgttccaaaaacagtggataattttgtggccttagctacaggagagaaaggatttggctacaaaaacagcaaattccatcgtgtaatcaaggacttcatgatccagggcggagacttcaccaggggagatggcacaggaggaaagagcatctacggtgagcgcttccccgatgagaacttcaaactgaagcactacgggcctggctgggtgagcatggccaacgcaggcaaagacaccaacggctcccagttcttcatcacgacagtcaagacagcctggctagatggcaagcatgtggtgtttggcaaagttctagagggcatggaggtggtgcggaaggtggagagcaccaagacagacagccgggataaacccctgaaggatgtgatcatcgcagactgcggcaagatcgaggtggagaagccctttgccatcgccaaggagtagggcacagggacatctttctttgagtgaccgtctgtgcaggccctgtagtccgccacagggctctgagctgcactggccccggtgctggcatctggtggagcggacccactcccctcacattccacaggcccatggactcacttttgtaacaaactcctaccaacactgaccaataaaaaaaaatgtgggtttttttttttttttaatgtgtgggcctggttcttgagcctgcagcacctcccctaggcctacatcccaacatgcctgcaactctcctgtggcaatgggtgcctgccccttccctgggatcctgcctgaaattttgacccaggagctacccaggaaaagtcaggcaggagcttttgccccctgcttctaaactttgccagctactgggcctccacatttgctccccttgccaccaccctccagtctatgttaagggatgtatctgtactttttcatagcctacctctaaattgatttttttttttttttttggtagagacaggtctcactatgttgcgctggctggtctcaaacttccagacccaagcatcctcctgccttggcctcctaaagtattgggattacaggcatgagctctgcacccagctgacttcttcctttattatttatttattttgagacggagtttcactcttgttgcccaggctggagtgcagtggcgcgatctcggctcaccacaacttccgcctcctggcttcaagagattctcctgc

SEQ ID NO: 446177 - DNA, 1118 bp, Homo sapiens
cccacgcgtccggctgtccgggctgctttcgcctccgcctgtggatgctgcgcctctccgaacgcaacatgaaggtgctccttgccgccgccctcatcgcggggtccgtcttcttcctgctgctgccgggaccttctgcggccgatgagaagaagaaggggcccaaagtcaccgtcaaggtgtattttgacctacgaattggagatgaagatgtaggccgggtgatctttggtctcttcggaaagactgttccaaaaacagtggataattttgtggccttagctacaggagagaaaggatttggctacaaaaacagcaaattccatcgtgtaatcaaggacttcatgatccagggcggagacttcaccaggggagatggcacaggaggaaagagcatctacggtgagcgcttccccgatgagaacttcaaactgaagcactacgggcctggctgggtgagcatggccaacgcaggcaaagacaccaacggctcccagttcttcatcacgacagtcaagacagcctggctagatggcaagcatgtggtgtttggcaaagttctagagggcatggaggtggtgcggaaggtggagagcaccaagacagacagccgggataaacccctgaaggatgtgatcatcgcagactgcggcaagatcgaggtggagaagccctttgccatcgccaaggagtagggcacagggacatctttctttgagtgaccgtctgtgcaggccctgtagtccgccacagggctctgagctgcactggccccggtgctggcatctggtggagcggacccactcccctcacattccacaggcccatggactcacttttgtaacaaactcctaccaacactgaccaataaaaaaaaatgtgggttttttttttttttttttttttttttttttttttttttttttttttttttttttttttttttttttttattttttttttaaacgcgcacttattgtatcgggggggaggggcgccgcgtggtcgcccccacggggggggaaaggggggggctcaacacaccaccctgtgcccccccccccgcggggggcgagaaaatcccccccgcgccgtggccccacaaaggagggcggacc

SEQ ID NO: 446178 - DNA, 1000 bp, Homo sapiens
cccacgcgtccggctgtccgggctgctttcgcctccgcctgtggatgctgcgcctctccgaacgcaacatgaaggtgctccttgccgccgccctcatcgcggggtccgtcttcttcctgctgctgccgggaccttctgcggccgatgagaagaagaaggggcccaaagtcaccgtcaaggtgtattttgacctacgaattggagatgaagatgtaggccgggtgatctttggtctcttcggaaagactgttccaaaaacagtggataattttgtggccttagctacaggagagaaaggatttggctacaaaaacagcaaattccatcgtgtaatcaaggacttcatgatccagggcggagacttcaccaggggagatggcacaggaggaaagagcatctacggtgagcgcttccccgatgagaacttcaaactgaagcactacgggcctggctgggtgagcatggccaacgcaggcaaagacaccaacggctcccagttcttcatcacgacagtcaagacagcctggctagatggcaagcatgtggtgtttggcaaagttctagagggcatggaggtggtgcggaaggtggagagcaccaagacagacagccgggataaacccctgaaggatgtgatcatcgcagactgcggcaagatcgaggtggagaagccctttgccatcgccaaggagtagggcacagggacatctttctttgagtgaccgtctgtgcaggccctgtagtccgccacagggctctgagctgcactggccccggtgctggcatctggtggagcggacccactcccctcacattccacaggcccatggactcacttttgtaacaaactcctaccaacactgaccaataaaaaaaaatgtgggttttttttttttttttttttttttttttttttttttttttttttgttttagggggttcatctgggagggaagaggggcagggcacccacgatgctgcaggtgaaacccaaaagtgg

SEQ ID NO: 446179 - DNA, 957 bp, Homo sapiens
cccacgcgtccggctgtccgggctgctttcgcctccgcctgtggatgctgcgcctctccgaacgcaacatgaaggtgctccttgccgccgccctcatcgcggggtccgtcttcttcctgctgctgccgggaccttctgcggccgatgagaagaagaaggggcccaaagtcaccgtcaaggtgtattttgacctacgaattggagatgaagatgtaggccgggtgatctttggtctcttcggaaagactgttccaaaaacagtggataattttgtggccttagctacaggagagaaaggatttggctacaaaaacagcaaattccatcgtgtaatcaaggacttcatgatccagggcggagacttcaccaggggagatggcacaggaggaaagagcatctacggtgagcgcttccccgatgagaacttcaaactgaagcactacgggcctggctgggtgagcatggccaacgcaggcaaagacaccaacggctcccagttcttcatcacgacagtcaagacagcctggctagatggcaagcatgtggtgtttggcaaagttctagagggcatggaggtggtgcggaaggtggagagcaccaagacagacagccgggataaacccctgaaggatgtgatcatcgcagactgcggcaagatcgaggtggagaagccctttgccatcgccaaggagtagggcacagggacatctttctttgagtgaccgtctgtgcaggccctgtagtccgccacagggctctgagctgcactggccccggtgctggcatctggtggagcggacccactcccctcacattccacaggcccatggactcacttttgtaacaaactcctaccaacactgaccaataaaaaaaaatgtgggtttttttttttttttttttttttttttttttttttttttttttgggggggggggggggggggggggggggggg

SEQ ID NO: 446180 - DNA, 973 bp, Homo sapiens
cccacgcgtccggctgtccgggctgctttcgcctccgcctgtggatgctgcgcctctccgaacgcaacatgaaggtgctccttgccgccgccctcatcgcggggtccgtcttcttcctgctgctgccgggaccttctgcggccgatgagaagaagaaggggcccaaagtcaccgtcaaggtgtattttgacctacgaattggagatgaagatgtaggccgggtgatctttggtctcttcggaaagactgttccaaaaacagtggataattttgtggccttagctacaggagagaaaggatttggctacaaaaacagcaaattccatcgtgtaatcaaggacttcatgatccagggcggagacttcaccaggggagatggcacaggaggaaagagcatctacggtgagcgcttccccgatgagaacttcaaactgaagcactacgggcctggctgggtgagcatggccaacgcaggcaaagacaccaacggctcccagttcttcatcacgacagtcaagacagcctggctagatggcaagcatgtggtgtttggcaaagttctagagggcatggaggtggtgcggaaggtggagagcaccaagacagacagccgggataaacccctgaaggatgtgatcatcgcagactgcggcaagatcgaggtggagaagccctttgccatcgccaaggagtagggcacagggacatctttctttgagtgaccgtctgtgcaggccctgtagtccgccacagggctctgagctgcactggccccggtgctggcatctggtggagcggacccactcccctcacattccacaggcccatggactcacttttgtaacaaactcctaccaacactgaccaataaaaaaaaatgtgggtttttttttttttttttttttttttttttttttttttttttttccccccaaaacccttttttttccgcgggtaaaaaaaaaactttata

SEQ ID NO: 446181 - DNA, 1033 bp, Homo sapiens
  misc_feature (910)..(910): n is a, c, g, or t
cccacgcgtccggctgtccgggctgctttcgcctccgcctgtggatgctgcgcctctccgaacgcaacatgaaggtgctccttgccgccgccctcatcgcggggtccgtcttcttcctgctgctgccgggaccttctgcggccgatgagaagaagaaggggcccaaagtcaccgtcaaggtgtattttgacctacgaattggagatgaagatgtaggccgggtgatctttggtctcttcggaaagactgttccaaaaacagtggataattttgtggccttagctacaggagagaaaggatttggctacaaaaacagcaaattccatcgtgtaatcaaggacttcatgatccagggcggagacttcaccaggggagatggcacaggaggaaagagcatctacggtgagcgcttccccgatgagaacttcaaactgaagcactacgggcctggctgggtgagcatggccaacgcaggcaaagacaccaacggctcccagttcttcatcacgacagtcaagacagcctggctagatggcaagcatgtggtgtttggcaaagttctagagggcatggaggtggtgcggaaggtggagagcaccaagacagacagccgggataaacccctgaaggatgtgatcatcgcagactgcggcaagatcgaggtggagaagccctttgccatcgccaaggagtagggcacagggacatctttctttgagtgaccgtctgtgcaggccctgtagtccgccacagggctctgagctgcactggccccggtgctggcatctggtggagcggacccactcccctcacattccacaggcccatggactcacttttgtaacaaactcctaccaacactgaccaataaaaaaaaatgtgggtttttttttttttttttttttttttntttttttttttttttggtgggtgggttttgtttgtttttttgggggtagggaaggggcttgtcttaactcagggtttccacaccctcgggggcagaaatgatcctccacccacgggtgccgag

SEQ ID NO: 446182 - DNA, 978 bp, Homo sapiens
cccacgcgtccggctgtccgggctgctttcgcctccgcctgtggatgctgcgcctctccgaacgcaacatgaaggtgctccttgccgccgccctcatcgcggggtccgtcttcttcctgctgctgccgggaccttctgcggccgatgagaagaagaaggggcccaaagtcaccgtcaaggtgtattttgacctacgaattggagatgaagatgtaggccgggtgatctttggtctcttcggaaagactgttccaaaaacagtggataattttgtggccttagctacaggagagaaaggatttggctacaaaaacagcaaattccatcgtgtaatcaaggacttcatgatccagggcggagacttcaccaggggagatggcacaggaggaaagagcatctacggtgagcgcttccccgatgagaacttcaaactgaagcactacgggcctggctgggtgagcatggccaacgcaggcaaagacaccaacggctcccagttcttcatcacgacagtcaagacagcctggctagatggcaagcatgtggtgtttggcaaagttctagagggcatggaggtggtgcggaaggtggagagcaccaagacagacagccgggataaacccctgaaggatgtgatcatcgcagactgcggcaagatcgaggtggagaagccctttgccatcgccaaggagtagggcacagggacatctttctttgagtgaccgtctgtgcaggccctgtagtccgccacagggctctgagctgcactggccccggtgctggcatctggtggagcggacccactcccctcacattccacaggcccatggactcacttttgtaacaaactcctaccaacactgaccaataaaaaaaaatgtgggtttttttttttttttttttttttttttttttttttttttttttttgggggggccccaaaaaaaaatttgttgttgggcgcaaccaacagggggg

SEQ ID NO: 446183 - DNA, 950 bp, Homo sapiens
cccacgcgtccggctgtccgggctgctttcgcctccgcctgtggatgctgcgcctctccgaacgcaacatgaaggtgctccttgccgccgccctcatcgcggggtccgtcttcttcctgctgctgccgggaccttctgcggccgatgagaagaagaaggggcccaaagtcaccgtcaaggtgtattttgacctacgaattggagatgaagatgtaggccgggtgatctttggtctcttcggaaagactgttccaaaaacagtggataattttgtggccttagctacaggagagaaaggatttggctacaaaaacagcaaattccatcgtgtaatcaaggacttcatgatccagggcggagacttcaccaggggagatggcacaggaggaaagagcatctacggtgagcgcttccccgatgagaacttcaaactgaagcactacgggcctggctgggtgagcatggccaacgcaggcaaagacaccaacggctcccagttcttcatcacgacagtcaagacagcctggctagatggcaagcatgtggtgtttggcaaagttctagagggcatggaggtggtgcggaaggtggagagcaccaagacagacagccgggataaacccctgaaggatgtgatcatcgcagactgcggcaagatcgaggtggagaagccctttgccatcgccaaggagtagggcacagggacatctttctttgagtgaccgtctgtgcaggccctgtagtccgccacagggctctgagctgcactggccccggtgctggcatctggtggagcggacccactcccctcacattccacaggcccatggactcacttttgtaacaaactcctaccaacactgaccaataaaaaaaaatgtgggttttttttttttttttttttttttttttttttttttttttatgggaatttttccattttttttaaa

SEQ ID NO: 446184 - DNA, 971 bp, Homo sapiens
cccacgcgtccggctgtccgggctgctttcgcctccgcctgtggatgctgcgcctctccgaacgcaacatgaaggtgctccttgccgccgccctcatcgcggggtccgtcttcttcctgctgctgccgggaccttctgcggccgatgagaagaagaaggggcccaaagtcaccgtcaaggtgtattttgacctacgaattggagatgaagatgtaggccgggtgatctttggtctcttcggaaagactgttccaaaaacagtggataattttgtggccttagctacaggagagaaaggatttggctacaaaaacagcaaattccatcgtgtaatcaaggacttcatgatccagggcggagacttcaccaggggagatggcacaggaggaaagagcatctacggtgagcgcttccccgatgagaacttcaaactgaagcactacgggcctggctgggtgagcatggccaacgcaggcaaagacaccaacggctcccagttcttcatcacgacagtcaagacagcctggctagatggcaagcatgtggtgtttggcaaagttctagagggcatggaggtggtgcggaaggtggagagcaccaagacagacagccgggataaacccctgaaggatgtgatcatcgcagactgcggcaagatcgaggtggagaagccctttgccatcgccaaggagtagggcacagggacatctttctttgagtgaccgtctgtgcaggccctgtagtccgccacagggctctgagctgcactggccccggtgctggcatctggtggagcggacccactcccctcacattccacaggcccatggactcacttttgtaacaaactcctaccaacactgaccaataaaaaaaaatgtgggtttttttttttttttttttttttttttttttttttttaaaaaccccccccaaaaattcccccgggacaagggtccaccggccacaaa

SEQ ID NO: 446185 - DNA, 1311 bp, Homo sapiens
ccacgcgtcggagcatctacggtgaaggcgcttcccctgctttcgcctccgcctgtggatgctgcgcctctccgaacgcaacatgaaggtgctccttgccgccgccctcatcgcggggtccgtcttcttcctgctgctgccgggaccttctgcggccgatgagaagaagaaggggcccaaagtcaccgtcaaggtgtattttgacctacgaattggagatgaagatgtaggccgggtgatctttggtctcttcggaaagactgttccaaaaacagtggataattttgtggccttagctacaggagagaaaggatttggctacaaaaacagcaaattccatcgtgtaatcaaggacttcatgatccagggcggagacttcaccaggggagatggcacaggaggaaagagcatctacggtgagcgcttccccgatgagaacttcaaactgaagcactacgggcctggctgggtgagcatggccaacgcaggcaaagacaccaacggctcccagttcttcatcacgacagtcaagacagcctggctagatggcaagcatgtggtgtttggcaaagttctagagggcatggaggtggtgcggaaggtggagagcaccaagacagacagccgggataaacccctgaaggatgtgatcatcgcagactgcggcaagatcgaggtggagaagccctttgccatcgccaaggagtagggcacagggacatctttctttgagtgaccgtctgtgcaggccctgtagtccgccacagggctctgagctgcactggccccggtgctggcatctggtggagcggacccactcccctcacattccacaggcccatggactcacttttgtaacaaacttctacaaactgaccaaaaaaaaaaaaaaaaaaaaaaaaaaaaaaacttgggggcgcgcgcgccactgcggcccccgcgaaaaacgtttcagaaaacaccacgcgcggggggcgcgcgcgcgggcccaggtcgggaaagcacaacggggcccaaacggcggctccaaggaaaaccggggccaagaaaaaggcgggaggaagattatcccaccacccactataaaaaacgcgcccgccgggggggcggcccacacgcgcgagagggtctctgcaggagaacaacacaaacttccccagagagagtgggagagttccgcgggaggggggcccacaacaccagcggggggacactctcattaaccaagagaggggggacgcccacacaaagaggagaagccccgcacataccccaaacatttagaggccccgccgcgagggcggggggcaa

SEQ ID NO: 446186 - DNA, 824 bp, Homo sapiens
tcctcctcctgctgctgtcctcctcctgctgctgtcctcctcctgctgctgccgggaccttctgcggccgatgagaagaagaaggggcccaaagtcaccgtcaaggtgtattttgacctacgaattggagatgaagatgtaggccgggtgatctttggtctcttcggaaagactgttccaaaaacagtggataattttgtggccttagctacaggagagaaaggatttggctacaaaaacagcaaattccatcgtgtaatcaaggacttcatgatccagggcggagacttcaccaggggagatggcacaggaggaaagagcatctacggtgagcgcttccccgatgagaacttcaaactgaagcactacgggcctggctgggtgagcatggccaacgcaggcaaagacaccaacggctcccagttcttcatcacgacagtcaagacagcctggctagatggcaagcatgtggtgtttggcaaagttctagagggcatggaggtggtgcggaaggtggagagcaccaagacagacagccgggataaacccctgaaggatgtgatcatcgcagactgcggcaagatcgaggtggagaagccctttgccatcgccaaggagtagggcacagggacatctttctttgagtgaccgtctgtgcaggccctgtagtccgccacagggctctgagctgcactggccccggtgctggcatctggtggagcggacccactcccctcacattccacaggcccatggactcacttttgtaacaaactcctaccaacactgaccaataaaaaaaaatgtgggtttttttttttttt

SEQ ID NO: 446187 - DNA, 798 bp, Homo sapiens
ccacgcgtcggagcatctacggtgaaggcgcttcccctgctttcgcctccgcctgtggatgctgcgcctctccgaacgcaacatgaaggtgctccttgccgccgccctcatcgcggggtccgtcttcttcctgctgctgccgggaccttctgcggccgatgagaagaagaaggggcccaaagtcaccgtcaagaaaggatttggctacaaaaacagcaaattccatcgtgtaatcaaggacttcatgatccagggcggagacttcaccaggggagatggcacaggaggaaagagcatctacggtgagcgcttccccgatgagaacttcaaactgaagcactacgggcctggctgggtgagcatggccaacgcaggcaaagacaccaacggctcccagttcttcatcacgacagtcaagacagcctggctagatggcaagcatgtggtgtttggcaaagttctagagggcatggaggtggtgcggaaggtggagagcaccaagacagacagccgggataaacccctgaaggatgtgatcatcgcagactgcggcaagatcgaggtggagaagccctttgccatcgccaaggagtagggcacagggacatctttctttgagtgaccgtctgtgcaggccctgtagtccgccacagggctctgagctgcactggccccggtgctggcatctggtggagcggacccactcccctcacattccacaggcccatggactcacttttgtaacaaactcctaccaacactgaccaataaaaaaaaatgtgggtttttttttttttt

SEQ ID NO: 446188 - DNA, 842 bp, Homo sapiens
ccacgcgtcggagcatctacggtgaaggcgcttcccctgctttcgcctccgcctgtggatgctgcgcctctccgaacgcaacatgaaggtgctccttgccgccgccctcatcgcggggtccgtcttcttcctgctgctgccgggaccttctgcggccgatgagaagaagaaggggcccaaagtcaccgtcaaggtgtattttgacctacgaattggagatgaagatgtaggccgggtgatctttggtctcttcggaaagactgttccaaaaacagtggataattttgtggccttagctacaggagagtcaccaggggagatggcacaggaggaaagagcatctacggtgagcgcttccccgatgagaacttcaaactgaagcactacgggcctggctgggtgagcatggccaacgcaggcaaagacaccaacggctcccagttcttcatcacgacagtcaagacagcctggctagatggcaagcatgtggtgtttggcaaagttctagagggcatggaggtggtgcggaaggtggagagcaccaagacagacagccgggataaacccctgaaggatgtgatcatcgcagactgcggcaagatcgaggtggagaagccctttgccatcgccaaggagtagggcacagggacatctttctttgagtgaccgtctgtgcaggccctgtagtccgccacagggctctgagctgcactggccccggtgctggcatctggtggagcggacccactcccctcacattccacaggcccatggactcacttttgtaacaaactcctaccaacactgaccaataaaaaaaaatgtgggtttttttttttttt

SEQ ID NO: 446189 - DNA, 2080 bp, Homo sapiens
  misc_feature (982)..(982): n is a, c, g, or t
  misc_feature (986)..(986): n is a, c, g, or t
  misc_feature (988)..(988): n is a, c, g, or t
tccgctcgccttctcccgttgccctctgctttccttcctctccttcttgcctcctcttcctttgtcttcctctccctcgtggtcttctctcacttctcttctttcttctcctcttccttttctctctctcctcccctccctctccgtcttctctctctcctctctcctctctctttcctcccttctcttcttcctccctgtctcttctggtcgcttctgttctttcttctctctcgtttttcgctttggtttcttccgtgctgttgtcttgtctgtcgctcttcttctgtggtcggcttgttggtgctttgctgctcgctttcggcttcggttctgtgtctcccgtggtttttgttggctgcctcgcctcgccggtctcgctgtctatatctttttttttttttctttttgtttcttctcgttcttctccgtgtttatgtctccacacgtctcttttgtcttctggcggcgtgctgcggttctgctgattctcgcccctcgtttctgttttgttcaccccccgctgtttgtgtcgccccctctgcgccagtgttcttttgtctagttttcttccccctctcttctgaggccctcgttgtatgtttgtctcgttatctggggtatgctgtttgctgctgccctttcttgtgtgtcgctcctccctcgcccgcgtcgttttttgtgggtttccctccctgctcccgatgttgttgtccctcgtccgctgtggctcccactcggtttttcccccaccgtgcgtctgctacctctttgttgttgtactgcgcgcgccctcccgctccgcctctaccgtctttattattctctcgtgccctcccttatttggggcgctcccccgttgtgtcctacaaaatttcgctggtggctactccgcttatctcctttgggctcccccccttctctggggttggagatcctttttgtgcgcggcccccccccttttttgtttttttttttgttntttntntttttttttttcactcacagctgtcttttattcctgttcattccttgttaagaggctttgactctccagaatccaaggggcagcccctcttttctgcccctccccacacatctctggctgctttctcctctgcagctatgcctgtgtcttttgtgctcataggaaaacaggctggtcagccacagcagtcctccttttctggagagttccgaccctgttgactcccctgcatcctgcacggcacttccctccaccaaagtccctccgtggcaggcctgggccatagctaaggggagctgataacatgcgccttatttaaaagccacaaaactatcttctcaaagtaatccttctgtgagctgttcaccacatcagcctggcctgatgccccacttggcctcagtcagcatggcttggctctgaggccagaagataggaaggacgctgcttttatgtccttgtagtccactccagcctagcctggcacagaggacaggttaagccccctcagtcctggccccgaatgtctgcttggtttggcgcaatccagcgcccctgacctgctctgtcttttttcccaggaaagagcatctacggtgagcgcttccccgatgagaacttcaaactgaagcactacgggcctggctgggtgagcatggccaacgcaggcaaagacaccaacggctcccagttcttcatcacgacagtcaagacagcctggctagatggcaagcatgtggtgtttggcaaagttctagagggcatggaggtggtgcggaaggtggagagcaccaagacagacagccgggataaacccctgaaggatgtgatcatcgcagactgcggcaagatcgaggtggagaagccctttgccatcgccaaggagtagggcacagggacatctttctttgagtgaccgtctgtgcaggccctgtagtccgccacagggctctgagctgcactggccccggtgctggcatctggtggagcggacccactcccctcacattccacaggcccatggactcacttttgtaacaaactcctaccaacactgaccaataaaaaaaaatgtgggtttttttttttttt

SEQ ID NO: 446190 - DNA, 975 bp, Homo sapiens
  misc_feature (458)..(458): n is a, c, g, or t
  misc_feature (535)..(535): n is a, c, g, or t
ccacgcgtcggagcatctacggtgaaggcgcttcccctgctttcgcctccgcctgtggatgctgcgcctctccgaacgcaacatgaaggtgctccttgccgccgccctcatcgcggggtccgtcttcttcctgctgctgccgggaccttctgcggccgatgagaagaagaaggggcccaaagtcaccgtcaaggtgtattttgacctacgaattggagatgaagatgtaggccgggtgatctttggtctcttcggaaagactgttccaaaaacagtggataattttgtggccttagctacaggagagaaaggatttggctacaaaaacagcaaattccatcgtgtaatcaaggacttcatgatccagggcggagacttcaccaggggagatggcacaggaggaaagagcatctacggtgagcgcttccccgatgagaacttcaaactgaagcactacngggccccttggggcttggggggttggaaggccatttggggccccaaaacgggccaaggggccaaaaaaggaaacaanccaaaaacgggggcttcccccccaagcaacggctcccagttcttcatcacgacagtcaagacagcctggctagatggcaagcatgtggtgtttggcaaagttctagagggcatggaggtggtgcggaaggtggagagcaccaagacagacagccgggataaacccctgaaggatgtgatcatcgcagactgcggcaagatcgaggtggagaagccctttgccatcgccaaggagtagggcacagggacatctttctttgagtgaccgtctgtgcaggccctgtagtccgccacagggctctgagctgcactggccccggtgctggcatctggtggagcggacccactcccctcacattccacaggcccatggactcacttttgtaacaaactcctaccaacactgaccaataaaaaaaaatgtgggtttttttttttttt

SEQ ID NO: 446191 - DNA, 989 bp, Homo sapiens
  misc_feature (951)..(952): n is a, c, g, or t
  misc_feature (954)..(954): n is a, c, g, or t
  misc_feature (956)..(956): n is a, c, g, or t
ccacgcgtcggagcatctacggtgaaggcgcttcccctgctttcgcctccgcctgtggatgctgcgcctctccgaacgcaacatgaaggtgctccttgccgccgccctcatcgcggggtccgtcttcttcctgctgctgccgggaccttctgcggccgatgagaagaagaaggggcccaaagtcaccgtcaaggtgtattttgacctacgaattggagatgaagatgtaggccgggtgatctttggtctcttcggaaagactgttccaaaaacagtggataattttgtggccttagctacaggagagaaaggatttggctacaaaaacagcaaattccatcgtgtaatcaaggacttcatgatccagggcggagacttcaccaggggagatggcacaggaggaaagagcatctacggtgagcgcttccccgatgagaacttcaaactgaagcactacgggcctggctgggtgagcatggccaacgcaggcaaagacaccaacggctcccagttcttcatcacgacagtcaagacagcctggctagatggcaagcatgtggtgtttggcaaagttctagagggcatggaggtggtgcggaaggtggagagcaccaagacagacagccgggataaacccctgaaggatgtgatcatcgcagactgcggcaagatcgaggtggagaagccctttgccatcgccaaggagtagggcacagggacatctttctttgagtgaccgtctgtgcaggccctgtagtccgccacagggctctgagctgcactggccccggtgctggcatctggtggagcggacccactcccctcacattccacaggcccatggactcacttttgtaacaaactcctaccaacactgaccaataaaaaaaaatgtgggttttttttttttttttttttttttttttttttttttttttttttttttttgtnngngngggggggggggggggggagtgggaggggggggg

SEQ ID NO: 446192 - DNA, 912 bp, Homo sapiens; identical to SEQ ID NO: 446172

SEQ ID NO: 446193 - DNA, 2736 bp, Homo sapiens
  misc_feature (982)..(982): n is a, c, g, or t
  misc_feature (986)..(986): n is a, c, g, or t
  misc_feature (988)..(988): n is a, c, g, or t
  misc_feature (2698)..(2699): n is a, c, g, or t
  misc_feature (2701)..(2701): n is a, c, g, or t
  misc_feature (2703)..(2703): n is a, c, g, or t
tccgctcgccttctcccgttgccctctgctttccttcctctccttcttgcctcctcttcctttgtcttcctctccctcgtggtcttctctcacttctcttctttcttctcctcttccttttctctctctcctcccctccctctccgtcttctctctctcctctctcctctctctttcctcccttctcttcttcctccctgtctcttctggtcgcttctgttctttcttctctctcgtttttcgctttggtttcttccgtgctgttgtcttgtctgtcgctcttcttctgtggtcggcttgttggtgctttgctgctcgctttcggcttcggttctgtgtctcccgtggtttttgttggctgcctcgcctcgccggtctcgctgtctatatctttttttttttttctttttgtttcttctcgttcttctccgtgtttatgtctccacacgtctcttttgtcttctggcggcgtgctgcggttctgctgattctcgcccctcgtttctgttttgttcaccccccgctgtttgtgtcgccccctctgcgccagtgttcttttgtctagttttcttccccctctcttctgaggccctcgttgtatgtttgtctcgttatctggggtatgctgtttgctgctgccctttcttgtgtgtcgctcctccctcgcccgcgtcgttttttgtgggtttccctccctgctcccgatgttgttgtccctcgtccgctgtggctcccactcggtttttcccccaccgtgcgtctgctacctctttgttgttgtactgcgcgcgccctcccgctccgcctctaccgtctttattattctctcgtgccctcccttatttggggcgctcccccgttgtgtcctacaaaatttcgctggtggctactccgcttatctcctttgggctcccccccttctctggggttggagatcctttttgtgcgcggcccccccccttttttgtttttttttttgttntttntntttttttttttcactcacagctgtcttttattcctgttcattccttgttaagaggctttgactctccagaatccaaggggcagcccctcttttctgcccctccccacacatctctggctgctttctcctctgcagctatgcctgtgtcttttgtgctcataggaaaacaggctggtcagccacagcagtcctccttttctggagagttccgaccctgttgactcccctgcatcctgcacggcacttccctccaccaaagtccctccgtggcaggcctgggccatagctaaggggagctgataacatgcgccttatttaaaagccacaaaactatcttctcaaagtaatccttctgtgagctgttcaccacatcagcctggcctgatgccccacttggcctcagtcagcatggcttggctctgaggccagaagataggaaggacgctgcttttatgtccttgtagtccactccagcctagcctggcacagaggacaggttaagccccctcagtcctggccccgaatgtctgcttggtttggcgcaatccagcgcccctgacctgctctgtcttttttcccaggaaagagcatctacggtgagcgcttccccgatgagaacttcaaactgaagcactacgggcctggctgggtgagcatggccaacgcaggcaaagacaccaacggctcccagttcttcatcacgacagtcaagacagcctggctagatggcaagcatgtggtgtttggcaaagttctagagggcatggtgagttgtggaagcaagggctactactgggcaatcctcaccggggattcaacacagaccccagggcaggagctccatgtgtccatccctttcccaaaaggacccaacccacagatgcagcccagtgctcctgtccagaataaaccctgtacctccatgcctccaaggttctaaattcttccagccccctcagagcccagccaggaaggctgcacaactgccagagcctccctcccctccttcactcagtgacgtgctggtcccacccctgaggtatacagagtgcagctgaacgcaatgtccctgagaagccacatgccctggtcaccctcttcctcctcctcacccttggcccaacctgggtcttacttcaaaggaacaaaattcctgtaccccctcgtcaaatctgcattctccctgctctggccaggagtctgttagaattttggtgcctccagttttgagtgctgttgatcacttgtgggtcttagccctcctgagccatacgctggggcctttctcctgagcggtggacctcctgatccaccatgccctcctacttccacctttcttttccaggaggtggtgcggaaggtggagagcaccaagacagacagccgggataaacccctgaaggatgtgatcatcgcagactgcggcaagatcgaggtggagaagccctttgccatcgccaaggagtagggcacagggacatctttctttgagtgaccgtctgtgcaggccctgtagtccgccacagggctctgagctgcactggccccggtgctggcatctggtggagcggacccactcccctcacattccacaggcccatggactcacttttgtaacaaactcctaccaacactgaccaataaaaaaaaatgtgggttttttttttttttttttttttttttttttttttttttttttttttttttgtnngngngggggggggggggggggagtgggaggggggggg

SEQ ID NO: 446194 - DNA, 504 bp, Homo sapiens
  misc_feature (466)..(467): n is a, c, g, or t
  misc_feature (469)..(469): n is a, c, g, or t
  misc_feature (471)..(471): n is a, c, g, or t
aaaaaaaaaaaaaaaaaaaaaaaaaaaaaaaaaaaaaaaaaaaacccacatttttttttattggcaagcatgtggtgtttggcaaagttctagagggcatggaggtggtgcggaaggtggagagcaccaagacagacagccgggataaacccctgaaggatgtgatcatcgcagactgcggcaagatcgaggtggagaagccctttgccatcgccaaggagtagggcacagggacatctttctttgagtgaccgtctgtgcaggccctgtagtccgccacagggctctgagctgcactggccccggtgctggcatctggtggagcggacccactcccctcacattccacaggcccatggactcacttttgtaacaaactcctaccaacactgaccaataaaaaaaaatgtgggttttttttttttttttttttttttttttttttttttttttttttttttttgtnngngngggggggggggggggggagtgggaggggggggg

SEQ ID NO: 446195 - DNA, 1547 bp, Homo sapiens
ccacgcgtcggagcatctacggtgaaggcgcttcccctgctttcgcctccgcctgtggatgctgcgcctctccgaacgcaacatgaaggtgctccttgccgccgccctcatcgcggggtccgtcttcttcctgctgctgccgggaccttctgcggccgatgagaagaagaaggggcccaaagtcaccgtcaaggtgtattttgacctacgaattggagatgaagatgtaggccgggtgatctttggtctcttcggaaagactgttccaaaaacagtggataattttgtggccttagctacaggagagaaaggatttggctacaaaaacagcaaattccatcgtgtaatcaaggacttcatgatccagggcggagacttcaccaggggagatggcacaggaggaaagagcatctacggtgagcgcttccccgatgagaacttcaaactgaagcactacgggcctggctgggtgagcatggccaacgcaggcaaagacaccaacggctcccagttcttcatcacgacagtcaagacagcctggctagatggcaagcatgtggtgtttggcaaagttctagagggcatggtgagttgtggaagcaagggctactactgggcaatcctcaccggggattcaacacagaccccagggcaggagctccatgtgtccatccctttcccaaaaggacccaacccacagatgcagcccagtgctcctgtccagaataaaccctgtacctccatgcctccaaggttctaaattcttccagccccctcagagcccagccaggaaggctgcacaactgccagagcctccctcccctccttcactcagtgacgtgctggtcccacccctgaggtatacagagtgcagctgaacgcaatgtccctgagaagccacatgccctggtcaccctcttcctcctcctcacccttggcccaacctgggtcttacttcaaaggaacaaaattcctgtaccccctcgtcaaatctgcattctccctgctctggccaggagtctgttagaattttggtgcctccagttttgagtgctgttgatcacttgtgggtcttagccctcctgagccatacgctggggcctttctcctgagcggtggacctcctgatccaccatgccctcctacttccacctttcttttccaggaggtggtgcggaaggtggagagcaccaagacagacagccgggataaacccctgaaggatgtgatcatcgcagactgcggcaagatcgaggtggagaagccctttgccatcgccaaggagtagggcacagggacatctttctttgagtgaccgtctgtgcaggccctgtagtccgccacagggctctgagctgcactggccccggtgctggcatctggtggagcggacccactcccctcacattccacaggcccatggactcacttttgtaacaaactcctaccaacactgaccaataaaaaaaaatgtgggttttttttttttttttttttttttttttttggggtccggggccggatttgggtatcgggggcctaggggt

SEQ ID NO: 446196 - DNA, 369 bp, Homo sapiens
  misc_feature (24)..(24): n is a, c, g, or t
  misc_feature (29)..(29): n is a, c, g, or t
  misc_feature (331)..(332): n is a, c, g, or t
  misc_feature (334)..(334): n is a, c, g, or t
  misc_feature (336)..(336): n is a, c, g, or t
atgatctagagtcatccccatcgnaggtngtcatcgcagactgcggcaagatcgaggtggagaagccctttgccatcgccaaggagtagggcacagggacatctttctttgagtgaccgtctgtgcaggccctgtagtccgccacagggctctgagctgcactggccccggtgctggcatctggtggagcggacccactcccctcacattccacaggcccatggactcacttttgtaacaaactcctaccaacactgaccaataaaaaaaaatgtgggttttttttttttttttttttttttttttttttttttttttttttttttttgtnngngngggggggggggggggggagtgggaggggggggg

SEQ ID NO: 446197 - DNA, 888 bp, Homo sapiens
ccacgcgtcggagcatctacggtgaaggcgcttcccctgctttcgcctccgcctgtggatgctgcgcctctccgaacgcaacatgaaggtgctccttgccgccgccctcatcgcggggtccgtcttcttcctgctgctgccgggaccttctgcggccgatgagaagaagaaggggcccaaagtcaccgtcaaggtgtattttgacctacgaattggagatgaagatgtaggccgggtgatctttggtctcttcggaaagactgttccaaaaacagtggataattttgtggccttagctacaggagagaaaggatttggctacaaaaacagcaaattccatcgtgtaatcaaggacttcatgatccagggcggagacttcaccaggggagatggcacaggaggaaagagcatctacggtgagcgcttccccgatgagaacttcaaactgaagcactacgggcctggctgggtgagcatggccaacgcaggcaaagacaccaacggctcccagttcttcatcacgacagtcaagacagcctggctagatgaccattaacaacaactgtgggttcccttcttaccactactagaccaagcgcaccacacgatcacaaacaaccactttttcgcgggccgcgtggggctccggagaaaagtttcctttagaacactctcgttgggcggcggcggccccactgtggtatagcgacctggcgcacaaggtgtctccagaagcactcggggtcagaaacggggtgggcttccccccataaaaacggcgcgggacgccgggttggaaccaccgaggggctcgggcatggcttcacggggccgggtcaataccgcgcggcggttgaggatcaacaacacatataattcactcctacg

SEQ ID NO: 446198 - DNA, 302 bp, Homo sapiens
gacggagtgatgctgcggtgttctagaggatcccggcaccattgtgctggcatctggtggagcggacccactcccctcacattccacaggcccatggactcacttttgtaacaaactcctaccaacactgaccaataaaaaaaaatgtgggttttttttttttttttttttttttttttttttttttttttttttttttttttttttttttttttttttttttttttttttttttttttttttttttttgtgtggggggggggggagcctcctcaccccccccacacaccccccccccctga

SEQ ID NO: 446199 - DNA, 458 bp, Homo sapiens
ccacgcgtcggagcatctacggtgaaggcgcttcccctgctttcgcctccgcctgtggatgctgcgcctctccgaacgcaacatgaaggtgctccttgccgccgccctcatcgcggggtccgtcttcttcctgctgctgccgggaccttctgcggccgatgagaagaagaaggggcccaaagtcaccgtcaagcggggaaaacaacgggggggggcggggggggccccccccaaaaaacacgtcaccgtcaaggtgtattttgacctacgaattggagatgaagatgtaggccgggtgatctttggtctcttcggaaagactgttccaaaagttgttcctgtgaaagccaagaacgtggctgaggatggagatgaagatgaggaagctgagtcagctacggccaagcgggcagctgaagatgatgaggatgacgatgtcgataccaagaagcaggaag

SEQ ID NO: 446200 - DNA, 460 bp, Homo sapiens
ctcgggttgacaacggctctcgggttgacaacggctctcgggttgacaacggctcccagttcttcatcacgacagtcaagacagcctggctagatggcaagcatgtggtgtttggcaaagttctagagggcatggaggtggtgcggaaggtggagagcaccaagacagacagccgggataaacccctgaaggatgtgatcatcgcagactgcggcaagatcgaggtggagaagccctttgccatcgccaaggagtagggcacagggacatctttctttgagtgaccgtctgtgcaggccctgtagtccgccacagggctctgagctgcactggccccggtgctggcatctggtggagcggacccactcccctcacattccacaggcccatggactcacttttgtaacaaactcctaccaacactgaccaataaaaaaaaatgtgggtttttttttttttt

SEQ ID NO: 446201 - DNA, 467 bp, Homo sapiens
gcctactactactaaattcgcggccgcgtcgacgccaacgcaggcaaagacaccaacggctcccagttcttcatcacgacagtcaagacagcctggctagatggcaagcatgtggtgtttggcaaagttctagagggcatggaggtggtgcggaaggtggagagcaccaagacagacagccgggataaacccctgaaggatgtgatcatcgcagactgcggcaagatcgaggtggagaagccctttgccatcgccaaggagtagggcacagggacatctttctttgagtgaccgtctgtgcaggccctgtagtccgccacagggctctgagctgcactggccccggtgctggcatctggtggagcggacccactcccctcacattccacaggcccatggactcacttttgtaacaaactcctaccaacactgaccaataaaaaaaaatgtgggtttttttttttttt

SEQ ID NO: 446202 - DNA, 898 bp, Homo sapiens
cccacgcgtccggctgtccgggctgctttcgcctccgcctgtggatgctgcgcctctccgaacgcaacatgaaggtgctccttgccgccgccctcatcgcggggtccgtcttcttcctgctgctgccgggaccttctgcggccgatgagaagaagaaggggcccaaagtcaccgtcaaggtgtattttgacctacgaattggagatgaagatgtaggccgggtgatctttggtctcttcggaaagactgttccaaaaacagtggataattttgtggccttagctacaggagagaaaggatttggctacaaaaacagcaaattccatcgtgtaatcaaggacttcatgatccagggcggagacttcaccaggggagatggcacaggaggaaagagcatctacggtgagcgcttccccgatgagaacttcaaactgaagcactacgggcctggctgggtgagcatggccaacgcaggcaaagacaccaacggctcccagttcttcatcacgacagtcaagacagcctggctagatggcaagcatgtggtgtttggcaaagttctagagggcatggaggtggtgcggaaggtggagagcaccaagacagacagccgggataaacccctgaaggatgtgatcatcgcagactgcggcaagatcgaggtggagaagccctttgccatcgccaaggagtagggcacagggacatctttctttgagtgaccgtctgtgcaggccctgtagtccgccacagggctctgagctgcactggccccggtgctggcatctggtggagcggacccactcccctcacattccacaggcccatggactcacttttgtaacaaactcctaccaacactgaccaataaaaaaaaatgtgggtttttttttttttt

SEQ ID NO: 446203 - DNA, 1237 bp, Homo sapiens
cccacgcgtccggctgtccgggctgctttcgcctccgcctgtggatgctgcgcctctccgaacgcaacatgaaggtgctccttgccgccgccctcatcgcggggtccgtcttcttcctgctgctgccgggaccttctgcggccgatgagaagaagaaggggcccaaagtcaccgtcaaggtgtattttgacctacgaattggagatgaagatgtaggccgggtgatctttggtctcttcggaaagactgttccaaaaacagtggataattttgtggccttagctacaggagagaaaggatttggctacaaaaacagcaaattccatcgtgtaatcaaggacttcatgatccagggcggagacttcaccaggggagatggcacaggaggaaagagcatctacggtgagcgcttccccgatgagaacttcaaactgaagcactacgggcctggctgggtgagcatggccaacgcaggcaaagacaccaacggctcccagttcttcatcacgacagtcaagacagcctggctagatggcaagcatgtggtgtttggcaaagttctagagggcatggaggtggtgcggaaggtggagagcaccaagacagacagccgggataaacccctgaaggatgtgatcatcgcagactgcggcaagatcgaggtggagaagccctttgccatcgccaaggagtagggcacagggacatctttctttgagtgaccgtctgtgcaggccctgtagtccgccacagggctctgagctgcactggccccggtgctggcatctggtggagcggacccactcccctcacattccacaggcccatggactcacttttgtaacaaactcctaccaacactgaccaataaaaaaaaatgtgggttttttttttttttaaaaaaaaaaaaaaaaaaaaaaaaaaaaaaaaaaaaaaaaaaaaaaaaaaaaaaaaaaaaaaaaaaaaaaaaaaaaaaaaataactaacgcacacagcaaaggaaaagaaagaacaagcaactggccaaaaacacagaacacagagacaccaaaaaagagggggggggggcacaaaacacagcacacagagagcggggcaaggatacacccaccaagcaccataggagagagggacagacaacacgcagggggacaactaaaagcggcagcgcgggcgaacaacacgtaggggaggacaaaaggagaggagggagagggggaaacacacccggggcgaa

SEQ ID NO: 446204 - DNA, 975 bp, Homo sapiens
  misc_feature (937)..(938): n is a, c, g, or t
  misc_feature (940)..(940): n is a, c, g, or t
  misc_feature (942)..(942): n is a, c, g, or t
cccacgcgtccggctgtccgggctgctttcgcctccgcctgtggatgctgcgcctctccgaacgcaacatgaaggtgctccttgccgccgccctcatcgcggggtccgtcttcttcctgctgctgccgggaccttctgcggccgatgagaagaagaaggggcccaaagtcaccgtcaaggtgtattttgacctacgaattggagatgaagatgtaggccgggtgatctttggtctcttcggaaagactgttccaaaaacagtggataattttgtggccttagctacaggagagaaaggatttggctacaaaaacagcaaattccatcgtgtaatcaaggacttcatgatccagggcggagacttcaccaggggagatggcacaggaggaaagagcatctacggtgagcgcttccccgatgagaacttcaaactgaagcactacgggcctggctgggtgagcatggccaacgcaggcaaagacaccaacggctcccagttcttcatcacgacagtcaagacagcctggctagatggcaagcatgtggtgtttggcaaagttctagagggcatggaggtggtgcggaaggtggagagcaccaagacagacagccgggataaacccctgaaggatgtgatcatcgcagactgcggcaagatcgaggtggagaagccctttgccatcgccaaggagtagggcacagggacatctttctttgagtgaccgtctgtgcaggccctgtagtccgccacagggctctgagctgcactggccccggtgctggcatctggtggagcggacccactcccctcacattccacaggcccatggactcacttttgtaacaaactcctaccaacactgaccaataaaaaaaaatgtgggttttttttttttttttttttttttttttttttttttttttttttttttttgtnngngngggggggggggggggggagtgggaggggggggg

SEQ ID NO: 446205 - DNA, 1600 bp, Homo sapiens
  misc_feature (1272)..(1272): n is a, c, g, or t
  misc_feature (1310)..(1310): n is a, c, g, or t
  misc_feature (1313)..(1313): n is a, c, g, or t
  misc_feature (1320)..(1320): n is a, c, g, or t
  misc_feature (1339)..(1339): n is a, c, g, or t
  misc_feature (1350)..(1350): n is a, c, g, or t
  misc_feature (1362)..(1362): n is a, c, g, or t
  misc_feature (1365)..(1365): n is a, c, g, or t
  misc_feature (1369)..(1369): n is a, c, g, or t
  misc_feature (1374)..(1374): n is a, c, g, or t
  misc_feature (1377)..(1377): n is a, c, g, or t
  misc_feature (1379)..(1380): n is a, c, g, or t
  misc_feature (1383)..(1383): n is a, c, g, or t
  misc_feature (1387)..(1388): n is a, c, g, or t
  misc_feature (1401)..(1401): n is a, c, g, or t
  misc_feature (1404)..(1404): n is a, c, g, or t
  misc_feature (1414)..(1414): n is a, c, g, or t
  misc_feature (1423)..(1423): n is a, c, g, or t
  misc_feature (1425)..(1425): n is a, c, g, or t
  misc_feature (1428)..(1428): n is a, c, g, or t
  misc_feature (1431)..(1431): n is a, c, g, or t
  misc_feature (1440)..(1440): n is a, c, g, or t
  misc_feature (1448)..(1448): n is a, c, g, or t
  misc_feature (1454)..(1454): n is a, c, g, or t
cccacgcgtccggctgtccgggctgctttcgcctccgcctgtggatgctgcgcctctccgaacgcaacatgaaggtgctccttgccgccgccctcatcgcggggtccgtcttcttcctgctgctgccgggaccttctgcggccgatgagaagaagaaggggcccaaagtcaccgtcaaggtgtattttgacctacgaattggagatgaagatgtaggccgggtgatctttggtctcttcggaaagactgttccaaaaacagtggataattttgtggccttagctacaggagagaaaggatttggctacaaaaacagcaaattccatcgtgtaatcaaggacttcatgatccagggcggagacttcaccaggggagatggcacaggaggaaagagcatctacggtgagcgcttccccgatgagaacttcaaactgaagcactacgggcctggctgggtgagcatggccaacgcaggcaaagacaccaacggctcccagttcttcatcacgacagtcaagacagcctggctagatggcaagcatgtggtgtttggcaaagttctagagggcatggaggtggtgcggaaggtggagagcaccaagacagacagccgggataaacccctgaaggatgtgatcatcgcagactgcggcaagatcgaggtggagaagccctttgccatcgccaaggagtagggcacagggacatctttctttgagtgaccgtctgtgcaggccctgtagtccgccacagggctctgagctgcactggccccggtgctggcatctggtggagcggacccactcccctcacattccacaggcccatggactcacttttgtaacaaactcctaccaacactgaccaataaaaaaaaatgtgggtttttttttttttttaatgtgtgggcctggttcttgagcctgcagcacctcccctaggcctacatcccaacatgcctgcaactctcctgtggcaatgggtgcctgccccttccctgggatcctgcctgaaattttgacccaggagctacccaggaaaagtcaggcaggagcttttgccccctgcttctaaactttgccagctactgggcctccacatttgctccccttgccaccaccctccagtctatgttaagggatgtatctgtactttttcatagcctacctctaaattgatttttttttttttttttggtagagacaggtctcactatgttgcgctggctggtctcaaacttccagacccaagcatcctcctgctctggccagnagtctgttagaattttggtgcctccagttttgtgtgcngtngatcatngtgggtcttagccctctgnagcatacgctngggcctttctcngancggnggacntcngnntcnacanngcctcctacttcnacnttcttttcangaggtggtncngangtngagagcccnagacaacngcgggntaaacctgaggatgtgatcacgccgatgggcagatcgagtgagaagcatttgcatcgcaagagaaggccagggaatcttctttgatcacgctttcaggctgtaatcgcaatgccctactgaatggccgtttggactgggcacggac

SEQ ID NO: 446206 - DNA, 965 bp, Homo sapiens
cccacgcgtccggctgtccgggctgctttcgcctccgcctgtggatgctgcgcctctccgaacgcaacatgaaggtgctccttgccgccgccctcatcgcggggtccgtcttcttcctgctgctgccgggaccttctgcggccgatgagaagaagaaggggcccaaagtcaccgtcaaggtgtattttgacctacgaattggagatgaagatgtaggccgggtgatctttggtctcttcggaaagactgttccaaaaacagtggataattttgtggccttagctacaggagagaaaggatttggctacaaaaacagcaaattccatcgtgtaatcaaggacttcatgatccagggcggagacttcaccaggggagatggcacaggaggaaagagcatctacggtgagcgcttccccgatgagaacttcaaactgaagcactacgggcctggctgggtgagcatggccaacgcaggcaaagacaccaacggctcccagttcttcatcacgacagtcaagacagcctggctagatggcaagcatgtggtgtttggcaaagttctagagggcatggaggtggtgcggaaggtggagagcaccaagacagacagccgggataaacccctgaaggatgtgatcatcgcagactgcggcaagatcgaggtggagaagccctttgccatcgccaaggagtagggcacagggacatctttctttgagtgaccgtctgtgcaggccctgtagtccgccacagggctctgagctgcactggccccggtgctggcatctggtggagcggacccactcccctcacattccacaggcccatggactcacttttgtaacaaactcctaccaacactgaccaataaaaaaaaatgtgggttttttttttttttttttttttttttttttttttttttttttttttttttaggccggtttcacccccgggggggcccccac

SEQ ID NO: 446207 - DNA, 1034 bp, Homo sapiens
  misc_feature (960)..(960): n is a, c, g, or t
cccacgcgtccggctgtccgggctgctttcgcctccgcctgtggatgctgcgcctctccgaacgcaacatgaaggtgctccttgccgccgccctcatcgcggggtccgtcttcttcctgctgctgccgggaccttctgcggccgatgagaagaagaaggggcccaaagtcaccgtcaaggtgtattttgacctacgaattggagatgaagatgtaggccgggtgatctttggtctcttcggaaagactgttccaaaaacagtggataattttgtggccttagctacaggagagaaaggatttggctacaaaaacagcaaattccatcgtgtaatcaaggacttcatgatccagggcggagacttcaccaggggagatggcacaggaggaaagagcatctacggtgagcgcttccccgatgagaacttcaaactgaagcactacgggcctggctgggtgagcatggccaacgcaggcaaagacaccaacggctcccagttcttcatcacgacagtcaagacagcctggctagatggcaagcatgtggtgtttggcaaagttctagagggcatggaggtggtgcggaaggtggagagcaccaagacagacagccgggataaacccctgaaggatgtgatcatcgcagactgcggcaagatcgaggtggagaagccctttgccatcgccaaggagtagggcacagggacatctttctttgagtgaccgtctgtgcaggccctgtagtccgccacagggctctgagctgcactggccccggtgctggcatctggtggagcggacccactcccctcacattccacaggcccatggactcacttttgtaacaaactcctaccaacactgaccaataaaaaaaaatgtgggttttttttttttttttttttttttttttttttttttttttttttttttttttttttttttttttttttttttgttntttttttttttttgtttttttttttttttttttttttttataagaaaacagagagagagactatagggggggga

SEQ ID NO: 446208 - DNA, 1036 bp, Homo sapiens
cccacgcgtccggctgtccgggctgctttcgcctccgcctgtggatgctgcgcctctccgaacgcaacatgaaggtgctccttgccgccgccctcatcgcggggtccgtcttcttcctgctgctgccgggaccttctgcggccgatgagaagaagaaggggcccaaagtcaccgtcaaggtgtattttgacctacgaattggagatgaagatgtaggccgggtgatctttggtctcttcggaaagactgttccaaaaacagtggataattttgtggccttagctacaggagagaaaggatttggctacaaaaacagcaaattccatcgtgtaatcaaggacttcatgatccagggcggagacttcaccaggggagatggcacaggaggaaagagcatctacggtgagcgcttccccgatgagaacttcaaactgaagcactacgggcctggctgggtgagcatggccaacgcaggcaaagacaccaacggctcccagttcttcatcacgacagtcaagacagcctggctagatggcaagcatgtggtgtttggcaaagttctagagggcatggaggtggtgcggaaggtggagagcaccaagacagacagccgggataaacccctgaaggatgtgatcatcgcagactgcggcaagatcgaggtggagaagccctttgccatcgccaaggagtagggcacagggacatctttctttgagtgaccgtctgtgcaggccctgtagtccgccacagggctctgagctgcactggccccggtgctggcatctggtggagcggacccactcccctcacattccacaggcccatggactcacttttgtaacaaactcctaccaacactgaccaataaaaaaaaatgtgggttttttttttttttttttttttttttttttttttttttttttttttttttttttttttttttttttttttttttttttttttttttttttttatttttttttttccaccccgacgccggagagtgggcccacgggggggcgcgcgggggggg

SEQ ID NO: 446209 - DNA, 1035 bp, Homo sapiens
cccacgcgtccggctgtccgggctgctttcgcctccgcctgtggatgctgcgcctctccgaacgcaacatgaaggtgctccttgccgccgccctcatcgcggggtccgtcttcttcctgctgctgccgggaccttctgcggccgatgagaagaagaaggggcccaaagtcaccgtcaaggtgtattttgacctacgaattggagatgaagatgtaggccgggtgatctttggtctcttcggaaagactgttccaaaaacagtggataattttgtggccttagctacaggagagaaaggatttggctacaaaaacagcaaattccatcgtgtaatcaaggacttcatgatccagggcggagacttcaccaggggagatggcacaggaggaaagagcatctacggtgagcgcttccccgatgagaacttcaaactgaagcactacgggcctggctgggtgagcatggccaacgcaggcaaagacaccaacggctcccagttcttcatcacgacagtcaagacagcctggctagatggcaagcatgtggtgtttggcaaagttctagagggcatggaggtggtgcggaaggtggagagcaccaagacagacagccgggataaacccctgaaggatgtgatcatcgcagactgcggcaagatcgaggtggagaagccctttgccatcgccaaggagtagggcacagggacatctttctttgagtgaccgtctgtgcaggccctgtagtccgccacagggctctgagctgcactggccccggtgctggcatctggtggagcggacccactcccctcacattccacaggcccatggactcacttttgtaacaaactcctaccaacactgaccaataaaaaaaaatgtgggttttttttttttttttttttttttttttttttttttttttttttttttttttttttttttttttttttttttttttttttttttttttttttttttttgtgtggggggggggggagcctcctcaccccccccacacaccccccccccctga

SEQ ID NO: 446210 - DNA, 1004 bp, Homo sapiens
cccacgcgtccggctgtccgggctgctttcgcctccgcctgtggatgctgcgcctctccgaacgcaacatgaaggtgctccttgccgccgccctcatcgcggggtccgtcttcttcctgctgctgccgggaccttctgcggccgatgagaagaagaaggggcccaaagtcaccgtcaaggtgtattttgacctacgaattggagatgaagatgtaggccgggtgatctttggtctcttcggaaagactgttccaaaaacagtggataattttgtggccttagctacaggagagaaaggatttggctacaaaaacagcaaattccatcgtgtaatcaaggacttcatgatccagggcggagacttcaccaggggagatggcacaggaggaaagagcatctacggtgagcgcttccccgatgagaacttcaaactgaagcactacgggcctggctgggtgagcatggccaacgcaggcaaagacaccaacggctcccagttcttcatcacgacagtcaagacagcctggctagatggcaagcatgtggtgtttggcaaagttctagagggcatggaggtggtgcggaaggtggagagcaccaagacagacagccgggataaacccctgaaggatgtgatcatcgcagactgcggcaagatcgaggtggagaagccctttgccatcgccaaggagtagggcacagggacatctttctttgagtgaccgtctgtgcaggccctgtagtccgccacagggctctgagctgcactggccccggtgctggcatctggtggagcggacccactcccctcacattccacaggcccatggactcacttttgtaacaaactcctaccaacactgaccaataaaaaaaaatgtgggttttttttttttttttttttttttttttttttttttttttttttttttttaaacccgccccctttccctttttttttcccgggttaaaaaaaaatttttatagtacagagggggtaattt

SEQ ID NO: 446211 - DNA, 954 bp, Homo sapiens
cccacgcgtccggctgtccgggctgctttcgcctccgcctgtggatgctgcgcctctccgaacgcaacatgaaggtgctccttgccgccgccctcatcgcggggtccgtcttcttcctgctgctgccgggaccttctgcggccgatgagaagaagaaggggcccaaagtcaccgtcaaggtgtattttgacctacgaattggagatgaagatgtaggccgggtgatctttggtctcttcggaaagactgttccaaaaacagtggataattttgtggccttagctacaggagagaaaggatttggctacaaaaacagcaaattccatcgtgtaatcaaggacttcatgatccagggcggagacttcaccaggggagatggcacaggaggaaagagcatctacggtgagcgcttccccgatgagaacttcaaactgaagcactacgggcctggctgggtgagcatggccaacgcaggcaaagacaccaacggctcccagttcttcatcacgacagtcaagacagcctggctagatggcaagcatgtggtgtttggcaaagttctagagggcatggaggtggtgcggaaggtggagagcaccaagacagacagccgggataaacccctgaaggatgtgatcatcgcagactgcggcaagatcgaggtggagaagccctttgccatcgccaaggagtagggcacagggacatctttctttgagtgaccgtctgtgcaggccctgtagtccgccacagggctctgagctgcactggccccggtgctggcatctggtggagcggacccactcccctcacattccacaggcccatggactcacttttgtaacaaactcctaccaacactgaccaataaaaaaaaatgtgggttttttttttttttttttttttttttttttggggtccggggccggatttgggtatcgggggcctaggggt

SEQ ID NO: 446212 - DNA, 1203 bp, Homo sapiens
ccacgcgtcggagcatctacggtgaaggcgcttcccctgctttcgcctccgcctgtggatgctgcgcctctccgaacgcaacatgaaggtgctccttgccgccgccctcatcgcggggtccgtcttcttcctgctgctgccgggaccttctgcggccgatgagaagaagaaggggcccaaagtcaccgtcaaggtgtattttgacctacgaattggagatgaagatgtaggccgggtgatctttggtctcttcggaaagactgttccaaaaacagtggataattttgtggccttagctacaggagagaaaggatttggctacaaaaacagcaaattccatcgtgtaatcaaggacttcatgatccagggcggagacttcaccaggggagatggcacaggaggaaagagcatctacggtgagcgcttccccgatgagaacttcaaactgaagcactacgggcctggctgggtgagcatggccaacgcaggcaaagacaccaacggctcccagttcttcatcacgacagtcaagacagcctggctagatggcaagcatgtggtgtttggcaaagttctagagggcatggaggtggtgcggaaggtggagagcaccaagacagacagccgggataaacccctgaaggatgtgatcatcgcagactgcggcaagatcgaggtggagaagccctttgccatcgccaaggagtagggcacagggacatctttctttgagtgaccgtctgtgcaggccctgtagtccgccacagggctctgagctgcactggccccggtgctggcatctggtggagcggacccactcccctcacattccacaggcccatggactcacttttgtaacaaactaaaaaaaaaaaaaaaaaaaaaaaaaaaaaaaaaaaaaaaaaaaaaaaaaaaaaaaaaaaaaaaaaaaaaaaaaaaaaaaaataactaacgcacacagcaaaggaaaagaaagaacaagcaactggccaaaaacacagaacacagagacaccaaaaaagagggggggggggcacaaaacacagcacacagagagcggggcaaggatacacccaccaagcaccataggagagagggacagacaacacgcagggggacaactaaaagcggcagcgcgggcgaacaacacgtaggggaggacaaaaggagaggagggagagggggaaacacacccggggcgaa

SEQ ID NO: 446213 - DNA, 972 bp, Homo sapiens
ccacgcgtcggagcatctacggtgaaggcgcttcccctgctttcgcctccgcctgtggatgctgcgcctctccgaacgcaacatgaaggtgctccttgccgccgccctcatcgcggggtccgtcttcttcctgctgctgccgggaccttctgcggccgatgagaagaagaaggggcccaaagtcaccgtcaagcggggaaaacaacgggggggggcggggggggccccccccaaaaaacacgtcaccgtcaaggtgtattttgacctacgaattggagatgaagatgtaggccgggtgatctttggtctcttcggaaagactgttccaaaaacagtggataattttgtggccttagctacaggagagaaaggatttggctacaaaaacagcaaattccatcgtgtaatcaaggacttcatgatccagggcggagacttcaccaggggagatggcacaggaggaaagagcatctacggtgagcgcttccccgatgagaacttcaaactgaagcactacgggcctggctgggtgagcatggccaacgcaggcaaagacaccaacggctcccagttcttcatcacgacagtcaagacagcctggctagatggcaagcatgtggtgtttggcaaagttctagagggcatggaggtggtgcggaaggtggagagcaccaagacagacagccgggataaacccctgaaggatgtgatcatcgcagactgcggcaagatcgaggtggagaagccctttgccatcgccaaggagtagggcacagggacatctttctttgagtgaccgtctgtgcaggccctgtagtccgccacagggctctgagctgcactggccccggtgctggcatctggtggagcggacccactcccctcacattccacaggcccatggactcacttttgtaacaaactcctaccaacactgaccaataaaaaaaaatgtgggtttttttttttttt

SEQ ID NO: 446214 - DNA, 600 bp, Homo sapiens
gacttcaccaggtgagatggcacaggatcgtgtaatcaaggacttcatgatccagggcggagacttcaccaggggagatggcacaggaggaaagagcatctacggtgagcgcttccccgatgagaacttcaaactgaagcactacgggcctggctgggtgagcatggccaacgcaggcaaagacaccaacggctcccagttcttcatcacgacagtcaagacagcctggctagatggcaagcatgtggtgtttggcaaagttctagagggcatggaggtggtgcggaaggtggagagcaccaagacagacagccgggataaacccctgaaggatgtgatcatcgcagactgcggcaagatcgaggtggagaagccctttgccatcgccaaggagtagggcacagggacatctttctttgagtgaccgtctgtgcaggccctgtagtccgccacagggctctgagctgcactggccccggtgctggcatctggtggagcggacccactcccctcacattccacaggcccatggactcacttttgtaacaaactcctaccaacactgaccaataaaaaaaaatgtgggtttttttttttttt

SEQ ID NO: 446215 - DNA, 1437 bp, Homo sapiens
ccgggttaggataatataaatagttaaattaagaatggttatgttagggttgtacggtagaactgctattattcatcctatgtgggtaattgaggagtatgctaagattttgcgtacctgggtttggtttaatccacctcaactgcctgctatgatggataagattgagagagtgaggagaaggcttacgtttagtgagggagagatttggtatatgattgagatgggggctagtctttgtcatgtgagaagaagcaggccggatgtcagaggggtgccttgggtaacctctgggactcagaagtgaaagggggctattcctagttttattgctatagccattatgattattaatgatgagtattgattggtagtattggttatggttcattgtccggagagtatattgttgaagaggatagctattagaaggattatggatgcggttgcttgcgtgaggaaatacttgatggcagcttctgttggaacgaaggtttatttttttggttagaactggaataaaagctagcatgtttatttctaggcctactcaggtaaaaaatcatgcgagcttaccgctgtgtattttgacctacgaattggagatgaagatgtaggccgggtgatctttggtctcttcggaaagactgttccaaaaacagtggataattttgtggccttagctacaggagagaaaggatttggctacaaaaacagcaaattccatcgtgtaatcaaggacttcatgatccagggcggagacttcaccaggggagatggcacaggaggaaagagcatctacggtgagcgcttccccgatgagaacttcaaactgaagcactacgggcctggctgggtgagcatggccaacgcaggcaaagacaccaacggctcccagttcttcatcacgacagtcaagacagcctggctagatggcaagcatgtggtgtttggcaaagttctagagggcatggaggtggtgcggaaggtggagagcaccaagacagacagccgggataaacccctgaaggatgtgatcatcgcagactgcggcaagatcgaggtggagaagccctttgccatcgccaaggagtagggcacagggacatctttctttgagtgaccgtctgtgcaggccctgtagtccgccacagggctctgagctgcactggccccggtgctggcatctggtggagcggacccactcccctcacattccacaggcccatggactcacttttgtaacaaactcctaccaacactgaccaataaaaaaaaatgtgggttttttttttttttttttttttttttttttttttttttttttttttttttttttttttttttttttttttttttttttttttttttttttttatttttttttttccaccccgacgccggagagtgggcccacgggggggcgcgcgggggggg

SEQ ID NO: 446216 - DNA, 1568 bp, Homo sapiens
  misc_feature (1530)..(1531): n is a, c, g, or t
  misc_feature (1533)..(1533): n is a, c, g, or t
  misc_feature (1535)..(1535): n is a, c, g, or t
ccacgcgtcggagcatctacggtgaaggcgcttcccctgctttcgcctccgcctgtggatgctgcgcctctccgaacgcaacatgaaggtgctccttgccgccgccctcatcgcggggtccgtcttcttcctgctgctgccgggaccttctgcggccgatgagaagaagaaggggcccaaagtcaccgtcaaggtgtattttgacctacgaattggagatgaagatgtaggccgggtgatctttggtctcttcggaaagactgttccaaaaacagtggataattttgtggccttagctacaggagagaaaggatttggctacaaaaacagcaaattccatcgtgtaatcaaggacttcatgatccagggcggagacttcaccaggggagatggcacaggaggaaagagcatctacggtgagcgcttccccgatgagaacttcaaactgaagcactacgggcctggctgggtgagcatggccaacgcaggcaaagacaccaacggctcccagttcttcatcacgacagtcaagacagcctggctagatggcaagcatgtggtgtttggcaaagttctagagggcatggtgagttgtggaagcaagggctactactgggcaatcctcaccggggattcaacacagaccccagggcaggagctccatgtgtccatccctttcccaaaaggacccaacccacagatgcagcccagtgctcctgtccagaataaaccctgtacctccatgcctccaaggttctaaattcttccagccccctcagagcccagccaggaaggctgcacaactgccagagcctccctcccctccttcactcagtgacgtgctggtcccacccctgaggtatacagagtgcagctgaacgcaatgtccctgagaagccacatgccctggtcaccctcttcctcctcctcacccttggcccaacctgggtcttacttcaaaggaacaaaattcctgtaccccctcgtcaaatctgcattctccctgctctggccaggagtctgttagaattttggtgcctccagttttgagtgctgttgatcacttgtgggtcttagccctcctgagccatacgctggggcctttctcctgagcggtggacctcctgatccaccatgccctcctacttccacctttcttttccaggaggtggtgcggaaggtggagagcaccaagacagacagccgggataaacccctgaaggatgtgatcatcgcagactgcggcaagatcgaggtggagaagccctttgccatcgccaaggagtagggcacagggacatctttctttgagtgaccgtctgtgcaggccctgtagtccgccacagggctctgagctgcactggccccggtgctggcatctggtggagcggacccactcccctcacattccacaggcccatggactcacttttgtaacaaactcctaccaacactgaccaataaaaaaaaatgtgggttttttttttttttttttttttttttttttttttttttttttttttttttgtnngngngggggggggggggggggagtgggaggggggggg

SEQ ID NO: 446217 - DNA, 2193 bp, Homo sapiens
  misc_feature (1865)..(1865): n is a, c, g, or t
  misc_feature (1903)..(1903): n is a, c, g, or t
  misc_feature (1906)..(1906): n is a, c, g, or t
  misc_feature (1913)..(1913): n is a, c, g, or t
  misc_feature (1932)..(1932): n is a, c, g, or t
  misc_feature (1943)..(1943): n is a, c, g, or t
  misc_feature (1955)..(1955): n is a, c, g, or t
  misc_feature (1958)..(1958): n is a, c, g, or t
  misc_feature (1962)..(1962): n is a, c, g, or t
  misc_feature (1967)..(1967): n is a, c, g, or t
  misc_feature (1970)..(1970): n is a, c, g, or t
  misc_feature (1972)..(1973): n is a, c, g, or t
  misc_feature (1976)..(1976): n is a, c, g, or t
  misc_feature (1980)..(1981): n is a, c, g, or t
  misc_feature (1994)..(1994): n is a, c, g, or t
  misc_feature (1997)..(1997): n is a, c, g, or t
  misc_feature (2007)..(2007): n is a, c, g, or t
  misc_feature (2016)..(2016): n is a, c, g, or t
  misc_feature (2018)..(2018): n is a, c, g, or t
  misc_feature (2021)..(2021): n is a, c, g, or t
  misc_feature (2024)..(2024): n is a, c, g, or t
  misc_feature (2033)..(2033): n is a, c, g, or t
  misc_feature (2041)..(2041): n is a, c, g, or t
  misc_feature (2047)..(2047): n is a, c, g, or t
ccacgcgtcggagcatctacggtgaaggcgcttcccctgctttcgcctccgcctgtggatgctgcgcctctccgaacgcaacatgaaggtgctccttgccgccgccctcatcgcggggtccgtcttcttcctgctgctgccgggaccttctgcggccgatgagaagaagaaggggcccaaagtcaccgtcaaggtgtattttgacctacgaattggagatgaagatgtaggccgggtgatctttggtctcttcggaaagactgttccaaaaacagtggataattttgtggccttagctacaggagagaaaggatttggctacaaaaacagcaaattccatcgtgtaatcaaggacttcatgatccagggcggagacttcaccaggggagatggcacaggaggaaagagcatctacggtgagcgcttccccgatgagaacttcaaactgaagcactacgggcctggctgggtgagcatggccaacgcaggcaaagacaccaacggctcccagttcttcatcacgacagtcaagacagcctggctagatggcaagcatgtggtgtttggcaaagttctagagggcatggtgagttgtggaagcaagggctactactgggcaatcctcaccggggattcaacacagaccccagggcaggagctccatgtgtccatccctttcccaaaaggacccaacccacagatgcagcccagtgctcctgtccagaataaaccctgtacctccatgcctccaaggttctaaattcttccagccccctcagagcccagccaggaaggctgcacaactgccagagcctccctcccctccttcactcagtgacgtgctggtcccacccctgaggtatacagagtgcagctgaacgcaatgtccctgagaagccacatgccctggtcaccctcttcctcctcctcacccttggcccaacctgggtcttacttcaaaggaacaaaattcctgtaccccctcgtcaaatctgcattctccctgctctggccaggagtctgttagaattttggtgcctccagttttgagtgctgttgatcacttgtgggtcttagccctcctgagccatacgctggggcctttctcctgagcggtggacctcctgatccaccatgccctcctacttccacctttcttttccaggaggtggtgcggaaggtggagagcaccaagacagacagccgggataaacccctgaaggatgtgatcatcgcagactgcggcaagatcgaggtggagaagccctttgccatcgccaaggagtagggcacagggacatctttctttgagtgaccgtctgtgcaggccctgtagtccgccacagggctctgagctgcactggccccggtgctggcatctggtggagcggacccactcccctcacattccacaggcccatggactcacttttgtaacaaactcctaccaacactgaccaataaaaaaaaatgtgggtttttttttttttttaatgtgtgggcctggttcttgagcctgcagcacctcccctaggcctacatcccaacatgcctgcaactctcctgtggcaatgggtgcctgccccttccctgggatcctgcctgaaattttgacccaggagctacccaggaaaagtcaggcaggagcttttgccccctgcttctaaactttgccagctactgggcctccacatttgctccccttgccaccaccctccagtctatgttaagggatgtatctgtactttttcatagcctacctctaaattgatttttttttttttttttggtagagacaggtctcactatgttgcgctggctggtctcaaacttccagacccaagcatcctcctgctctggccagnagtctgttagaattttggtgcctccagttttgtgtgcngtngatcatngtgggtcttagccctctgnagcatacgctngggcctttctcngancggnggacntcngnntcnacanngcctcctacttcnacnttcttttcangaggtggtncngangtngagagcccnagacaacngcgggntaaacctgaggatgtgatcacgccgatgggcagatcgagtgagaagcatttgcatcgcaagagaaggccagggaatcttctttgatcacgctttcaggctgtaatcgcaatgccctactgaatggccgtttggactgggcacggac

SEQ ID NO: 446218 - DNA, 1052 bp, Homo sapiens
  misc_feature (458)..(458): n is a, c, g, or t
  misc_feature (535)..(535): n is a, c, g, or t
  misc_feature (1014)..(1015): n is a, c, g, or t
  misc_feature (1017)..(1017): n is a, c, g, or t
  misc_feature (1019)..(1019): n is a, c, g, or t
ccacgcgtcggagcatctacggtgaaggcgcttcccctgctttcgcctccgcctgtggatgctgcgcctctccgaacgcaacatgaaggtgctccttgccgccgccctcatcgcggggtccgtcttcttcctgctgctgccgggaccttctgcggccgatgagaagaagaaggggcccaaagtcaccgtcaaggtgtattttgacctacgaattggagatgaagatgtaggccgggtgatctttggtctcttcggaaagactgttccaaaaacagtggataattttgtggccttagctacaggagagaaaggatttggctacaaaaacagcaaattccatcgtgtaatcaaggacttcatgatccagggcggagacttcaccaggggagatggcacaggaggaaagagcatctacggtgagcgcttccccgatgagaacttcaaactgaagcactacngggccccttggggcttggggggttggaaggccatttggggccccaaaacgggccaaggggccaaaaaaggaaacaanccaaaaacgggggcttcccccccaagcaacggctcccagttcttcatcacgacagtcaagacagcctggctagatggcaagcatgtggtgtttggcaaagttctagagggcatggaggtggtgcggaaggtggagagcaccaagacagacagccgggataaacccctgaaggatgtgatcatcgcagactgcggcaagatcgaggtggagaagccctttgccatcgccaaggagtagggcacagggacatctttctttgagtgaccgtctgtgcaggccctgtagtccgccacagggctctgagctgcactggccccggtgctggcatctggtggagcggacccactcccctcacattccacaggcccatggactcacttttgtaacaaactcctaccaacactgaccaataaaaaaaaatgtgggttttttttttttttttttttttttttttttttttttttttttttttttttgtnngngngggggggggggggggggagtgggaggggggggg

SEQ ID NO: 446219 - DNA, 755 bp, Homo sapiens
  misc_feature (717)..(718): n is a, c, g, or t
  misc_feature (720)..(720): n is a, c, g, or t
  misc_feature (722)..(722): n is a, c, g, or t
ccacgcgtcggagcatctacggtgaaggcgcttcccctgctttcgcctccgcctgtggatgctgcgcctctccgaacgcaacatgaaggtgctccttgccgccgccctcatcgcggggtccgtcttcttcctgctgctgccgggaccttctgcggccgatgagaagaagaaggggcccaaagtcaccgtcaaggtgtattttgacctacgaattggagatgaagatgtaggccgggtgatctttggtctcttcggaaagactgttccaaaaacagtggataattttgtggccttagctacaggagagaaaggatttggctacaaaaacagcaaattccatcgtgtaatcaaggacttcatgatccagggcggagacttcaccaggggagatggcacaggaggaaagagcatctacggtgagcgcttccccgatgagaacttcaaactgaagccctttgccatcgccaaggagtagggcacagggacatctttctttgagtgaccgtctgtgcaggccctgtagtccgccacagggctctgagctgcactggccccggtgctggcatctggtggagcggacccactcccctcacattccacaggcccatggactcacttttgtaacaaactcctaccaacactgaccaataaaaaaaaatgtgggttttttttttttttttttttttttttttttttttttttttttttttttttgtnngngngggggggggggggggggagtgggaggggggggg

SEQ ID NO: 446220 - DNA, 691 bp, Homo sapiens
ccacgcgtcggagcatctacggtgaaggcgcttcccctgctttcgcctccgcctgtggatgctgcgcctctccgaacgcaacatgaaggtgctccttgccgccgccctcatcgcggggtccgtcttcttcctgctgctgccgggaccttctgcggccgatgagaagaagaaggggcccaaagtcaccgtcaaggtgtattttgacctacgaattggagagcaccaagacagacagccgggataaacccctgaaggatgtgatcatcgcagactgcggcaagatcgaggtggagaagccctttgccatcgccaaggagtagggcacagggacatctttctttgagtgaccgtctgtgcaggccctgtagtccgccacagggctctgagctgcactggccccggtgctggcatctggtggagcggacccactcccctcacattccacaggcccatggactcacttttgtaacaaactcctaccaacactgaccaataaaaaaaaatgtgggttttttttttttttttttttttttttttttttttttttttttttttttttttttttttttttttttttttttttttttttttttttttttttttttttttttttttttttttttttttttcggggggcaggccttttgttccatcttggggggggggcacacccgcccccacttttctctcc

SEQ ID NO: 446221 - DNA, 1374 bp, Homo sapiens
agaaacagaatcctaactatttctgaggaaactgcaggtccaaaatgtggctgcttttaacaatggcaagtttgatatctgtactggggactacacatggtttgtttggaaaattacatcctggaagccctgaagtgactatgaacattagtcagatgattacttattggggatacccaaatgaagaatatgaagttgtgactgaagatggttatattcttgaagtcaatagaattccttatgggaagaaaaattcagggaatacaggccagagacctgttgtgtttttgcagcatggtttgcttgcatcagccacaaactggatttccaacctgccgaacaacagccttgccttcattctggcagatgctggttatgatgtgtggctgggcaacagcagaggaaacacctgggccagaagaaacttgtactattcaccagattcagttgaattctgggctttcagctttgatgaaatggctaaatatgaccttccagccacaatcgacttcattgtaaagaaaactggacagaagcagctacactatgttggccattcccagggcaccaccattggttttattgccttttccaccaatcccagcctggctaaaagaatcaaaaccttctatgctctagctcctgttgccactgtgaagtatacaaaaagccttataaacaaacttagatttgttcctcaatccctcttcaagtttatatttggtgacaaaatattctacccacacaacttctttgatcaatttcttgctactgaagtgtgctcccgtgagatgctgaatctcctttgcagcaatgccttatttataatttgtggatttgacagtaagaactttaacacgagtcgcttggatgtgtatctatcacataatccagcaggaacttctgttcaaaacatgttccattggacccaggctgttaagtctgggaaattccaagcttatgactggggaagcccagttcagaataggatgcactatgatcagtcccaacctccctactacaatgtgacagccatgaatgtaccaattgcagtgtggaacggtggcaaggacctgttggctgacccccaagatgttggccttttgcttccaaaactccccaatcttatttaccacaaggagattcctttttacaatcacttggactttatctgggcaatggatgcccctcaagaagtttacaatgacattgtttctatgatatcagaagataaaaagtagttctggatttaaagaattatccgtttgtttttccaaaatactttattctctcatacatagtattttcataatgtttgacatgcagtgcttctttctgtaattttgactttagaaatatattggcatcaacaaa

SEQ ID NO: 446222 - DNA, 607 bp, Homo sapiens
gacctgaatcagaaaacataaatctttactgtttttaagaaactgagtatgtgtcttagtatgtatataatatgtgtgtctgttgatttctagagtcgcttggatgtgtatctatcacataatccagcaggaacttctgttcaaaacatgttccattggacccaggctgttaagtctgggaaattccaagcttatgactggggaagcccagttcagaataggatgcactatgatcagtcccaacctccctactacaatgtgacagccatgaatgtaccaattgcagtgtggaacggtggcaaggacctgttggctgacccccaagatgttggccttttgcttccaaaactccccaatcttatttaccacaaggagattcctttttacaatcacttggactttatctgggcaatggatgcccctcaagaagtttacaatgacattgtttctatgatatcagaagataaaaagtagttctggatttaaagaattatccgtttgtttttccaaaatactttattctctcatacatagtattttcataatgtttgacatgcagtgcttctttctgtaattttgactttagaaatatattggcatcaacaaa

SEQ ID NO: 446223 - DNA, 583 bp, Homo sapiens
cgcttcttcccaggtcctgcggtgtcctgtgtgctgtcaggctgtccgtgaactccggacgtggccctggcgggccgtgtggtggagtctcatttcgggttgtttgccgacggttcggattttcgccaccctgtttttagtgctgttaagtctgggaaattccaagcttatgactggggaagcccagttcagaataggatgcactatgatcagtcccaacctccctactacaatgtgacagccatgaatgtaccaattgcagtgtggaacggtggcaaggacctgttggctgacccccaagatgttggccttttgcttccaaaactccccaatcttatttaccacaaggagattcctttttacaatcacttggactttatctgggcaatggatgcccctcaagaagtttacaatgacattgtttctatgatatcagaagataaaaagtagttctggatttaaagaattatccgtttgtttttccaaaatactttattctctcatacatagtattttcataatgtttgacatgcagtgcttctttctgtaattttgactttagaaatatattggcatcaacaaa

SEQ ID NO: 446224 - DNA, 448 bp, Homo sapiens
tgttggaatcctcacatttatcctagaataaggatacatttataaagtttataaacattttcttccttaggccagagacctgttgtgtttttgcagcatggtttgcttgcatcagccacaaactggatttccaacctgccgaacaacagccttgccttcattctggcagatgctggttatgatgtgtggctgggcaacagcagaggaaacacctgggccagaagaaacttgtactattcaccagattcagttgaattctgggctttcaggtaaacaaaagggacaattaaaaataaacactgggctttaaaagcataggcatttgccccttctaatccagtcccattttaacaaattacactccaagtaggaggataaacaagtcattttcattctaatccattcttggattcttccatgtacctcattcctagggtagcttttcctt

SEQ ID NO: 446225 - DNA, 583 bp, Homo sapiens
tggaatcctcacatttatcctagaataaggatacatttataaagtttataaacattttcttccttaggccagagacctgttgtgtttttgcagcatggtttgcttgcatcagccacaaactggatttccaacctgccgaacaacagccttgccttcattctggcagatgctggttatgatgtgtggctgggcaacagcagaggaaacacctgggccagaagaaacttgtactattcaccagattcagttgaattctgggctttcaggtaaacaaaagggacaattaaaaataaacactgggctttaaaagcataggcatttgccccttctaatccagtcccattttaacaaattacactccaagtaggaggataaacaagtcattttcattctaatccattcttggattcttccatgtacctcattcctagggtagcttttccttcaaacttttgtgatctcaggagtctccattagggatttccagaaagtgattttccaaatggaatgaacaatatggctgaagcaaggaaactcacagcccctggaaaattccaaaggaatgtccatatggattcaagag

SEQ ID NO: 446226 - DNA, 1425 bp, Homo sapiens
  misc_feature (1425)..(1425): n is a, c, g, or t
agaaacagaatcctaactatttctgaggaaactgcaggtccaaaatgtggctgcttttaacaatggcaagtttgatatctgtactggggactacacatggtttgtttggaaaattacatcctggaagccctgaagtgactatgaacattagtcagatgattacttattggggatacccaaatgaagaatatgaagttgtgactgaagatggttatattcttgaagtcaatagaattccttatgggaagaaaaattcagggaatacaggccagagacctgttgtgtttttgcagcatggtttgcttgcatcagccacaaactggatttccaacctgccgaacaacagccttgccttcattctggcagatgctggttatgatgtgtggctgggcaacagcagaggaaacacctgggccagaagaaacttgtactattcaccagattcagttgaattctgggctttcagctttgatgaaatggctaaatatgaccttccagccacaatcgacttcattgtaaagaaaactggacagaagcagctacactatgttggccattcccagggcaccaccattggttttattgccttttccaccaatcccagcctggctaaaagaatcaaaaccttctatgctctagctcctgttgccactgtgaagtatacaaaaagccttataaacaaacttagatttgttcctcaatccctcttcaagtttatatttggtgacaaaatattctacccacacaacttctttgatcaatttcttgctactgaagtgtgctcccgtgagatgctgaatctcctttgcagcaatgccttatttataatttgtggatttgacagtaagaactttaacacgagtcgcttggatgtgtatctatcacataatccagcaggaacttctgttcaaaacatgttccattggacccaggctgttaagtctgggaaattccaagcttatgactggggaagcccagttcagaataggatgcactatgatcagtcccaacctccctactacaatgtgacagccatgaatgtaccaattgcagtgtggaacggtggcaaggacctgttggctgacccccaagatgttggccttttgcttccaaaactccccaatcttatttaccacaaggagattcctttttacaatcacttggactttatctgggcaatggatgcccctcaagaagtttacaatgacattgtttctatgatatcagaagataaaaagtagttctggatttaaagaattatccgtttgtttttccaaaatactttattctctcatacatagtattttcataatgtttgacatgcagtgcttctttctgtaattttgactttagaaatatattggcatcaacaaaaaataaaacactggcctcgttggcctcagcggtggagctctgcggccggan

SEQ ID NO: 446227 - DNA, 3017 bp, Homo sapiens
tgcgcggggcgtaaggcgctttggccagagtggtttgatggttttgtgttagtcttcctgcagctgagcttccacaagacactttttccctttcagccacccaatatctcgcgagacttgctattctgcgccccctcctaccttgcgcttgcgcagatcttcaaagcagaaggtcgcgcttggaggaagtggcggctttgagtccggtggcccaatcgctgttactacttctctgaagctcctctcggctgcttgccgagacaccctgccgccaagatgcctcgaattatgatcaaggggggcgtatggaggaataccgaggatgaaattctgaaagcagcggtaatgaaatatgggaaaaatcagtggtctaggattgcctcattgctgcatagaaaatcagcaaagcagtgcaaagccagatggtatgaatggctggatccaagcattaagaagacagaatggtccagagaagaagaggaaaaactcttgcacttggccaagttgatgccaactcagtggaggaccattgctccaatcattggaagaacagcggcccagtgcttagaacactatgaatttcttctggataaagctgcccaaagagacaatgaagaggaaacaacagatgatccacgaaaacttaaacctggagaaatagatccaaatccagaaacaaaaccagcgcggcctgatccaattgatatggatgaggatgaacttgagatgctttctgaagccagagcccgcttggctaatactcagggaaagaaggccaagaggaaagcaagagagaaacaattggaagaagcaagacgtcttgctgccctccaaaaaagaagagaacttcgagcagctggcatagaaattcagaagaaaagaaaaaggaagagaggagttgattataatgccgaaatcccatttgaaaaaaagcctgcccttggtttttatgatacttctgaggaaaactaccaagctcttgacgcagatttcaggaaattaagacaacaggatcttgatggggagctaagatctgaaaaagaaggaagagatagaaaaaaagacaaacagcatttgaaaaggaaaaaagaatctgatttaccatcagctattcttcaaactagtggtgtttctgaatttactaaaaagagaagcaaactagtacttcctgcccctcagatttcagatgcagaactccaggaagttgtaaaagtaggccaagcgagtgaaattgcacgtcaaactgccgaggaatctggcataacaaattctgcttccagtacacttttgtctgagtacaatgtcaccaacaacagcgttgctcttagaacaccacgaacaccagcttcccaggacagaattctgcaggaagcccagaacctcatggccctcaccaatgtggacaccccattgaaaggtggacttaataccccattgcatgagagtgacttctcaggtgtaactccacagcgacaagttgtacagactccaaacacagttctctctactccattcaggactccttctaatggagctgaagggctgactccccggagtggaacaactcccaaaccagttattaactctactccgggtagaactcctcttcgagacaagttaaacattaatcccgaggatggaatggcagactatagtgatccctcttacgtgaagcagatggaaagagaatcccgagaacatctccgtttagggttgttgggccttcctgcccctaagaatgattttgaaattgttctaccagaaaatgccgagaaggagctggaagaacgtgaaatagatgatacttacattgaagatgctgctgatgtggatgctcgaaagcaggccatacgagatgcagagcgtgtaaaggaaatgaaacgaatgcataaagctgtccagaaagatctgccaagaccatcagaagtaaatgaaactattctaagacccttaaatgtagaaccgcctttaacagatttacagaaaagtgaagaactaatcaaaaaagaaatgatcacaatgcttcattatgaccttctacatcacccttatgaaccatctggaaataaaaaaggcaaaactgtagggtttggtaccaataattcagagcacattacctatctggaacataatccttatgaaaagttctccaaagaagagctgaaaaaggcccaggatgttttggtgcaggagatggaagtggttaaacaaggaatgagccatggagagctctcaagtgaagcttataaccaggtgtgggaagaatgctacagtcaagttttatatcttcctgggcagagccgctacacacgggccaatctggctagtaaaaaggacagaattgaatcacttgaaaagaggctcgagataaacaggggtcacatgacgacagaagccaagagggctgcaaagatggaaaagaagatgaaaattttgcttgggggttaccagtctcgtgctatggggctcatgaaacagttgaatgacttatgggaccaaattgaacaggctcacttggagttacgcacttttgaagaactcaagaaacatgaagattctgctattccccggaggctagagtgtctaaaagaagacgttcagcgacaacaagaaagagaaaaggaacttcaacatagatatgctgatttgctgctggagaaagagactttaaagtcaaaattctgaagtacagtttatattctgtcacaggattaattaattgccggttttcatactctagaaggctgaaactgatgtttatcttcattgacaaatttacccaccatctgtggtttttcagttgtttattttaaatgatatcgatcttacacattctgtgtataaagaccttaactccacaggacggacattttagagtttaaattattaaggctatcattcttttagtaatgtcatatttgcaaacttttttagttttggcctttaatttaaaaagcctaattttaaagtgctgcctgtgagtaactcttgaataaaaacaaaatataaaaaattga

SEQ ID NO: 446228 - DNA, 6546 bp, Homo sapiens
tgcgcggggcgtaaggcgctttggccagagtggtttgatggttttgtgttagtcttcctgcagctgagcttccacaagacactttttccctttcagccacccaatatctcgcgagacttgctattctgcgccccctcctaccttgcgcttgcgcagatcttcaaagcagaaggtcgcgcttggaggaagtggcggctttgagtccggtggcccaatcgctgttactacttctctgaagctcctctcggctgcttgccgagacaccctgccgccaagatgcctcgaattatgatcaaggggggcgtatggaggaataccgaggatgaaattctgaaagcagcggtaatgaaatatgggaaaaatcagtggtctaggattgcctcattgctgcatagaaaatcagcaaagcagtgcaaagccagatggtatgaatggctggatccaagcattaagaagacagaatggtccagagaagaagaggaaaaactcttgcacttggccaagttgatgccaactcagtggaggaccattgctccaatcattggaagaacagcggcccagtgcttagaacactatgaatttcttctggataaagctgcccaaagagacaatgaagaggaaacaacagatgatccacgaaaacttaaacctggagaaatagatccaaatccagaaacaaaaccagcgcggcctgatccaattgatatggatgaggatgaacttgagatgctttctgaagccagagcccgcttggctaatactcagggaaagaaggccaagaggaaagcaagagagaaacaattggaagaagcaagacgtcttgctgccctccaaaaaagaagagaacttcgagcagctggcatagaaattcagaagaaaagaaaaaggaagagaggagttgattataatgccgaaatcccatttgaaaaaaagcctgcccttggtttttatgatacttctgaggaaaactaccaagctcttgacgcagatttcaggaaattaagacaacaggatcttgatggggagctaagatctgaaaaagaaggaagagatagaaaaaaagacaaacagcatttgaaaaggaaaaaagaatctgatttaccatcagctattcttcaaactagtggtgtttctgaatttactaaaaagagaagcaaactagtacttcctgcccctcagatttcagatgcagaactccaggaagttgtaaaagtaggccaagcgagtgaaattgcacgtcaaactgccgaggaatctggcataacaaattctgcttccagtacacttttgtctgagtacaatgtcaccaacaacagcgttgctcttagaacaccacgaacaccagcttcccaggacagaattctgcaggaagcccagaacctcatggccctcaccaatgtggacaccccattgaaaggtggacttaataccccattgcatgagagtgacttctcaggtgtaactccacagcgacaagttgtacagactccaaacacagttctctctactccattcaggactccttctaatggagctgaagggctgactccccggagtggaacaactcccaaaccagttattaactctactccgggtagaactcctcttcgagacaagttaaacattaatcccgaggatggaatggcagactatagtgatccctcttacgtgaagcagatggaaagagaatcccgagaacatctccgtttagggttgttgggccttcctgcccctaagaatgattttgaaattgttctaccagaaaatgccgagaaggagctggaagaacgtgaaatagatgatacttacattgaagatgctgctgatgtggatgctcgaaagcaggccatacgagatgcagagcgtgtaaaggaaatgaaacgaatgcataaagctgtccagaaagatctgccaagaccatcagaagtaaatgaaactattctaagacccttaaatgtagaaccgcctttaacagatttacagaaaagtgaagaactaatcaaaaaagaaatgatcacaatgcttcattatgaccttctacatcacccttatgaaccatctggaaataaaaaaggcaaaactgtagggtttggtaccaataattcagagcacattacctatctggaacataatccttatgaaaagttctccaaagaagagctgaaaaaggcccaggatgttttggtgcaggagatggaagtggttaaacaaggaatgagccatggagagctctcaagtgaagcttataaccaggtgtgggaagaatgctacagtcaagttttatatcttcctgggcagagccgctacacacgggccaatctggctagtaaaaaggacagaattgaatcacttgaaaagaggctcgagataaacaggggtcacatgacgacagaagccaagagggctgcaaagatggaaaagaagatgaaaattttgcttgggggttaccagtctcgtgctatggggctcatgaaacagttgaatgacttatgggaccaaattgaacaggctcacttggagttacgcacttttgaagaactcaagaaacatgaagattctgctattccccggaggctagagtgtctaaaagaagacgttcagcgacaacaagaaagagaaaaggaacttcaacatagatatgctgatttgctgctggagaaagagactttaaagtcaaaattctgaagtacagtttatattctgtcacaggattaattaattgccggttttcatactctagaaggctgaaactgatgtttatcttcattgacaaatttacccaccatctgtggtttttcagttgtttattttaaatgatatcgatcttacacattctgtgtataaagaccttaactccacaggacggacattttagagtttaaattattaaggctatcattcttttagtaatgtcatatttgcaaacttttttagttttggcctttaatttaaaaagcctaattttaaagtgctgcctgtgagtaactcttgaataaaaacaaaatataaaaaattgagaatgtagccttttgtttgaagtaattagatacttaagagtgcctgcaaaccagcagctatgtactctgtgtcatatttaatgagtaactcttgggtaatcaaaatggtgatgcagtatcttaaacacttaagaggcagttctttgtggctttgttagtttcagcaaagagtggtcatttctgtatacactgacaagttagattaactttttagtacctcaaattttttttttgttaatatcactttaaagaaggtctcttgtctgccagctacttaaataatttatgggtcagggcttaaaagatttaacttccttgccccattattttcttataagtattttttgacaaaggcattttaaaagttaatttcaagaaggccatcaaacttaaagctctatgtttagcctaagaagtcagttacatcagtgtagaatttggggaatggatagaggtggagatatttaattttatataattcatataaattgatttagttacagtatcagttggctacaagctcattatagactagcaatgttttgacatcaccaaaaacgtttgcccagtcttagaatactagggactataggaagggaagggattcattcattcattcgatattgaatgtataccctgtgccagagtcttagagagagaacaacaaacaaaataggcctagttcttgtttagtagagcttatagtcttttgagaatgacagacaattaaaatccaaatgtttatttggtgattcttatgtgtcagacacttaagtgttgggagataagcagttattaagacagagttcttgctctcatggaggtgacattagtggggaggagatactaagtatgtccagggaaagtatcagaccatgagttttagattctgtggaggaaattaaagtagggtgattatgagatagtgaatgagtggctattttagactggacgatcaaagagacctcttggaaggcagctatgctcaccactataccactgcactgtgccgcaccgtaccactataagctgcacggccaaagagacctcttaaagaagtaacatttaagataacatgtgattgacattttagaatgggctatccttgtgagattcaaggaaagaacatcctaggtggagtgaatagcaaacataaagcctcttttgtatgtttgaggaacaaaaaggacaatgcagctagagtgtcaagaatggcatttctgtatataagacctcgttgtatagagccacataaataaggctataataaggaatttggatcttactttaaatatgataagaatcgatgagaagatctaagcaaaggaatgacatgatcagatttggttttagaaacatcactatctccttagtgtgtaaaatctcaccaggctggagatagggaagccagtccaattaggagcctgatgcagtgatccagacaaaaaaataatagtgattctaactagagtccaggtaatagtagtggagatatgtggagagacatgataggtatatacttaatagtcttatcagacgataaattgatattttcctggtgtgtagtcacttaattcaaatacttttttcagtaagttctgggttttctaggaaaaacttcagtatcatcagtgaataatgatagtgtttcttctgatagttttatttcacttttattgcatgttttgttatctgaaatgtttaggacaatgttaacaataatgatgttagacatttttttttcttattttaatgggaatgtccatagttttaagtttgctgttgggagttagatagtctttatctgaaagacagtgtctctcttttagtttttaaagagtttgaattagaaatggctctggaactttaaacagtataccatttgggcatctattaaagcattcatataattgttctcatttgatgttttgatgaggtatattaatagattttcccacattaaatcatctttgcactcctggaatcaggtagattaatttttaaaagaaattttaaaggatttatagtttatttgcactttttgtagacttgaattatatggatttaaaagttgatctaatattaataaaggctcactttgttttcaaaatttgaagtaattcacatacttatagcctaaaatcggcaggaattacaaaatttcaaaactggcacattgtaaactgcatatgcatttgccaggtagtggtgccacttgaaatggtgaacagacacactgttatcctttgtcagtatcctgtaaagcccaggattctttaccagcaccatacagcgattttggtgactattttaacattcacactgaggccaggggtggtgagtcatgcctgtaatcctagcactttgggaggccaaggtgggaggatcatttgagctcaggagttcaagattagcctgggtaacatagtgagaccctgtctctattaaaaaataataataaaaataacattcacattggtattgttcactaaggtattggttgttaaggcattcattaaggtattgttaaaacttgtgttaagcatgttaaagtctcagtaactttgggatagaaataaaatgtgataaaaagctgaaagaaaccaccacaagggagagtcctttttgaaatattagagacataatgctgtctaataaaaaacgacatcaaagaaaaactacactacagtgactgcagacttaatgttggccaaccatgcatccaaagtgctagaattacaggtgtgagccaccatgcccagcctggttattgtattttgatattgggattttgctagctctctaaagtaaataggataactgtatatctttttctgtgcattaagcagttataacatgggaatgatttgttcatgaaaggttgaaagtctgtacttacagaacttttgagttcacagtgctttctggaaataatttctttataactgtcagtttcttttgtgactattatgttacctatttttaaatttaagcaactttaaattaaaaaaattgtttttaaaatatattcttccttttatgtttatttagtaaatttaggtaatgtatactttttaagaaatatttttattttgttcaaatttaaacatctgttgttagcagaaaattctaatagcaatttcttttctattaactttgccatttctaagttataggaaatttaccttctcttaattctaccactttttacttgactagacttgttaagggtatacattttctgttcagaaaactagtgtttttattggcttatctattgtgattttgttttaaaatatgttaatttctcaatttaggcttattattttgttttctgtagttttttgactttttgagactgatgcttattttttgcttgtatacaaatgaatgtgttgaagacttttgaactgtcctttgagttcaaatatgttcacatcccagccattttgatatgtagtagtcttgttttctaagtagtatatcattgtgttttaaatttctggttcaataattaagtttttcaaaa

SEQ ID NO: 446229 - DNA, 4784 bp, Homo sapiens
tgcgcggggcgtaaggcgctttggccagagtggtttgatggttttgtgttagtcttcctgcagctgagcttccacaagacactttttccctttcagccacccaatatctcgcgagacttgctattctgcgccccctcctaccttgcgcttgcgcagatcttcaaagcagaaggtcgcgcttggaggaagtggcggctttgagtccggtggcccaatcgctgttactacttctctgaagctcctctcggctgcttgccgagacaccctgccgccaagatgcctcgaattatgatcaaggggggcgtatggaggaataccgaggatgaaattctgaaagcagcggtaatgaaatatgggaaaaatcagtggtctaggattgcctcattgctgcatagaaaatcagcaaagcagtgcaaagccagatggtatgaatggctggatccaagcattaagaagacagaatggtccagagaagaagaggaaaaactcttgcacttggccaagttgatgccaactcagtggaggaccattgctccaatcattggaagaacagcggcccagtgcttagaacactatgaatttcttctggataaagctgcccaaagagacaatgaagaggaaacaacagatgatccacgaaaacttaaacctggagaaatagatccaaatccagaaacaaaaccagcgcggcctgatccaattgatatggatgaggatgaacttgagatgctttctgaagccagagcccgcttggctaatactcagggaaagaaggccaagaggaaagcaagagagaaacaattggaagaagcaagacgtcttgctgccctccaaaaaagaagagaacttcgagcagctggcatagaaattcagaagaaaagaaaaaggaagagaggagttgattataatgccgaaatcccatttgaaaaaaagcctgcccttggtttttatgatacttctgaggaaaactaccaagctcttgacgcagatttcaggaaattaagacaacaggatcttgatggggagctaagatctgaaaaagaaggaagagatagaaaaaaagacaaacagcatttgaaaaggaaaaaagaatctgatttaccatcagctattcttcaaactagtggtgtttctgaatttactaaaaagagaagcaaactagtacttcctgcccctcagatttcagatgcagaactccaggaagttgtaaaagtaggccaagcgagtgaaattgcacgtcaaactgccgaggaatctggcataacaaattctgcttccagtacacttttgtctgagtacaatgtcaccaacaacagcgttgctcttagaacaccacgaacaccagcttcccaggacagaattctgcaggaagcccagaacctcatggccctcaccaatgtggacaccccattgaaaggtggacttaataccccattgcatgagagtgacttctcaggtgtaactccacagcgacaagttgtacagactccaaacacagttctctctactccattcaggactccttctaatggagctgaagggctgactccccggagtggaacaactcccaaaccagttattaactctactccgggtagaactcctcttcgagacaagttaaacattaatcccgaggatggaatggcagactatagtgatccctcttacgtgaagcagatggaaagagaatcccgagaacatctccgtttagggttgttgggccttcctgcccctaagaatgattttgaaattgttctaccagaaaatgccgagaaggagctggaagaacgtgaaatagatgatacttacattgaagatgctgctgatgtggatgctcgaaagcaggccatacgagatgcagagcgtgtaaaggaaatgaaacgaatgcataaagctgtccagaaagatctgccaagaccatcagaagtaaatgaaactattctaagacccttaaatgtagaaccgcctttaacagatttacagaaaagtgaagaactaatcaaaaaagaaatgatcacaatgcttcattatgaccttctacatcacccttatgaaccatctggaaataaaaaaggcaaaactgtagggtttggtaccaataattcagagcacattacctatctggaacataatccttatgaaaagttctccaaagaagagctgaaaaaggcccaggatgttttggtgcaggagatggaagtggttaaacaaggaatgagccatggagagctctcaagtgaagcttataaccaggtgtgggaagaatgctacagtcaagttttatatcttcctgggcagagccgctacacacgggccaatctggctagtaaaaaggacagaattgaatcacttgaaaagaggctcgagataaacaggggtcacatgacgacagaagccaagagggctgcaaagatggaaaagaagatgaaaattttgcttgggggttaccagtctcgtgctatggggctcatgaaacagttgaatgacttatgggaccaaattgaacaggctcacttggagttacgcacttttgaagaactcaagaaacatgaagattctgctattccccggaggctagagtgtctaaaagaagacgttcagcgacaacaagaaagagaaaaggaacttcaacatagatatgctgatttgctgctggagaaagagactttaaagtcaaaattctgaagtacagtttatattctgtcacaggattaattaattgccggttttcatactctagaaggctgaaactgatgtttatcttcattgacaaatttacccaccatctgtggtttttcagttgtttattttaaatgatatcgatcttacacattctgtgtataaagaccttaactccacaggacggacattttagagtttaaattattaaggctatcattcttttagtaatgtcatatttgcaaacttttttagttttggcctttaatttaaaaagcctaattttaaagtgctgcctgtgagtaactcttgaataaaaacaaaatataaaaaattgagaatgtagccttttgtttgaagtaattagatacttaagagtgcctgcaaaccagcagctatgtactctgtgtcatatttaatgagtaactcttgggtaatcaaaatggtgatgcagtatcttaaacacttaagaggcagttctttgtggctttgttagtttcagcaaagagtggtcatttctgtatacactgacaagttagattaactttttagtacctcaaattttttttttgttaatatcactttaaagaaggtctcttgtctgccagctacttaaataatttatgggtcagggcttaaaagatttaacttccttgccccattattttcttataagtattttttgacaaaggcattttaaaagttaatttcaagaaggccatcaaacttaaagctctatgtttagcctaagaagtcagttacatcagtgtagaatttggggaatggatagaggtggagatatttaattttatataattcatataaattgatttagttacagtatcagttggctacaagctcattatagactagcaatgttttgacatcaccaaaaacgtttgcccagtcttagaatactagggactataggaagggaagggattcattcattcattcgatattgaatgtataccctgtgccagagtcttagagagagaacaacaaacaaaataggcctagttcttgtttagtagagcttatagtcttttgagaatgacagacaattaaaatccaaatgtttatttggtgattcttatgtgtcagacacttaagtgttgggagataagcagttattaagacagagttcttgctctcatggaggtgacattagtggggaggagatactaagtatgtccagggaaagtatcagaccatgagttttagattctgtggaggaaattaaagtagggtgattatgagatagtgaatgagtggctattttagactggacgatcaaagcaaagtgctagaattacaggtgtgagccaccatgcccagcctggttattgtattttgatattgggattttgctagctctctaaagtaaataggataactgtatatctttttctgtgcattaagcagttataacatgggaatgatttgttcatgaaaggttgaaagtctgtacttacagaacttttgagttcacagtgctttctggaaataatttctttataactgtcagtttcttttgtgactattatgttacctatttttaaatttaagcaactttaaattaaaaaaattgtttttaaaatatattcttccttttatgtttatttagtaaatttaggtaatgtatactttttaagaaatatttttattttgttcaaatttaaacatctgttgttagcagaaaattctaatagcaatttcttttctattaactttgccatttctaagttataggaaatttaccttctcttaattctaccactttttacttgactagacttgttaagggtatacattttctgttcagaaaactagtgtttttattggcttatctattgtgattttgttttaaaatatgttaatttctcaatttaggcttattattttgttttctgtagttttttgactttttgagactgatgcttattttttgcttgtatacaaatgaatgtgttgaagacttttgaactgtcctttgagttcaaatatgttcacatcccagccattttgatatgtagtagtcttgttttctaagtagtatatcattgtgttttaaatttctggttcaataattaagtttttcaaaa

SEQ ID NO: 446230 - DNA, 2963 bp, Homo sapiens
tgcgcggggcgtaaggcgctttggccagagtggtttgatggttttgtgttagtcttcctgcagctgagcttccacaagacactttttccctttcagccacccaatatctcgcgagacttgctattctgcgccccctcctaccttgcgcttgcgcagatcttcaaagcagaaggtcgcgcttggaggaagtggcggctttgagtccggtggcccaatcgctgttactacttctctgaagctcctctcggctgcttgccgagacaccctgccgccaagatgcctcgaattatgatcaaggggggcgtatggaggaataccgaggatgaaattctgaaagcagcggtaatgaaatatgggaaaaatcagtggtctaggattgcctcattgctgcatagaaaatcagcaaagcagtgcaaagccagatggtatgaatggctggatccaagcattaagaagacagaatggtccagagaagaagaggaaaaactcttgcacttggccaagttgatgccaactcagtggaggaccattgctccaatcattggaagaacagcggcccagtgcttagaacactatgaatttcttctggataaagctgcccaaagagacaatgaagaggaaacaacagatgatccacgaaaacttaaacctggagaaatagatccaaatccagaaacaaaaccagcgcggcctgatccaattgatatggatgaggatgaacttgagatgctttctgaagccagagcccgcttggctaatactcagggaaagaaggccaagaggaaagcaagagagaaacaattggaagaagcaagacgtcttgctgccctccaaaaaagaagagaacttcgagcagctggcatagaaattcagaagaaaagaaaaaggaagagaggagttgattataatgccgaaatcccatttgaaaaaaagcctgcccttggtttttatgatacttctgaggaaaactaccaagctcttgacgcagatttcaggaaattaagacaacaggatcttgatggggagctaagatctgaaaaagaaggaagagatagaaaaaaagacaaacagcatttgaaaaggaaaaaagaatctgatttaccatcagctattcttcaaactagtggtgtttctgaatttactaaaaagagaagcaaactagtacttcctgcccctcagatttcagatgcagaactccaggaagttataacaaattctgcttccagtacacttttgtctgagtacaatgtcaccaacaacagcgttgctcttagaacaccacgaacaccagcttcccaggacagaattctgcaggaagcccagaacctcatggccctcaccaatgtggacaccccattgaaaggtggacttaataccccattgcatgagagtgacttctcaggtgtaactccacagcgacaagttgtacagactccaaacacagttctctctactccattcaggactccttctaatggagctgaagggctgactccccggagtggaacaactcccaaaccagttattaactctactccgggtagaactcctcttcgagacaagttaaacattaatcccgaggatggaatggcagactatagtgatccctcttacgtgaagcagatggaaagagaatcccgagaacatctccgtttagggttgttgggccttcctgcccctaagaatgattttgaaattgttctaccagaaaatgccgagaaggagctggaagaacgtgaaatagatgatacttacattgaagatgctgctgatgtggatgctcgaaagcaggccatacgagatgcagagcgtgtaaaggaaatgaaacgaatgcataaagctgtccagaaagatctgccaagaccatcagaagtaaatgaaactattctaagacccttaaatgtagaaccgcctttaacagatttacagaaaagtgaagaactaatcaaaaaagaaatgatcacaatgcttcattatgaccttctacatcacccttatgaaccatctggaaataaaaaaggcaaaactgtagggtttggtaccaataattcagagcacattacctatctggaacataatccttatgaaaagttctccaaagaagagctgaaaaaggcccaggatgttttggtgcaggagatggaagtggttaaacaaggaatgagccatggagagctctcaagtgaagcttataaccaggtgtgggaagaatgctacagtcaagttttatatcttcctgggcagagccgctacacacgggccaatctggctagtaaaaaggacagaattgaatcacttgaaaagaggctcgagataaacaggggtcacatgacgacagaagccaagagggctgcaaagatggaaaagaagatgaaaattttgcttgggggttaccagtctcgtgctatggggctcatgaaacagttgaatgacttatgggaccaaattgaacaggctcacttggagttacgcacttttgaagaactcaagaaacatgaagattctgctattccccggaggctagagtgtctaaaagaagacgttcagcgacaacaagaaagagaaaaggaacttcaacatagatatgctgatttgctgctggagaaagagactttaaagtcaaaattctgaagtacagtttatattctgtcacaggattaattaattgccggttttcatactctagaaggctgaaactgatgtttatcttcattgacaaatttacccaccatctgtggtttttcagttgtttattttaaatgatatcgatcttacacattctgtgtataaagaccttaactccacaggacggacattttagagtttaaattattaaggctatcattcttttagtaatgtcatatttgcaaacttttttagttttggcctttaatttaaaaagcctaattttaaagtgctgcctgtgagtaactcttgaataaaaacaaaatataaaaaattga

SEQ ID NO: 446231 - DNA, 2819 bp, Homo sapiens
tgcgcggggcgtaaggcgctttggccagagtggtttgatggttttgtgttagtcttcctgcagctgagcttccacaagacactttttccctttcagccacccaatatctcgcgagacttgctattctgcgccccctcctaccttgcgcttgcgcagatcttcaaagcagaaggtcgcgcttggaggaagtggcggctttgagtccggtggcccaatcgctgttactacttctctgaagctcctctcggctgcttgccgagacaccctgccgccaagatgcctcgaattatgatcaaggggggcgtatggaggaataccgaggatgaaattctgaaagcagcggtaatgaaatatgggaaaaatcagtggtctaggattgcctcattgctgcatagaaaatcagcaaagcagtgcaaagccagatggtatgaatggctggatccaagcattaagaagacagaatggtccagagaagaagaggaaaaactcttgcacttggccaagttgatgccaactcagtggaggaccattgctccaatcattggaagaacagcggcccagtgcttagaacactatgaatttcttctggataaagctgcccaaagagacaatgaagaggaaacaacagatgatccacgaaaacttaaacctggagaaatagatccaaatccagaaacaaaaccagcgcggcctgatccaattgatatggatgaggatgaacttgagatgctttctgaagccagagcccgcttggctaatactcagggaaagaaggccaagaggaaagcaagagagaaacaattggaagaagcaagacgtcttgctgccctccaaaaaagaagagaacttcgagcagctggcatagaaattcagaagaaaagaaaaaggaagagaggagttgattataatgccgaaatcccatttgaaaaaaagcctgcccttggtttttatgatacttctgaggaaaactaccaagctcttgacgcagatttcaggaaattaagacaacaggatcttgatggggagctaagatctgaaaaagaaggaagagatagaaaaaaagacaaacagcatttgaaaaggaaaaaagaatctgatttaccatcagctattcttcaaactagtggtgtttctgaatttactaaaaagagaagcaaactagtacttcctgcccctcagatttcagatgcagaactccaggaagttgtaaaagtaggccaagcgagtgaaattgcacgtcaaactgccgaggaatctggcataacaaattctgcttccagtacacttttgtctgagtacaatgtcaccaacaacagcgttgctcttagaacaccacgaacaccagcttcccaggacagaattctgcaggaagcccagaacctcatggccctcaccaatgtggacaccccattgaaaggtggacttaataccccattgcatgagagtgacttctcaggtgtaactccacagcgacaagttgtacagactccaaacacagttctctctactccattcaggactccttctaatggagctgaagggctgactccccggagtggaacaactcccaaaccagttattaactctactccgggtagaactcctcttcgagacaagttaaacattaatcccgaggatggaatggcagactatagtgatccctcttacgtgaagcagatggaaagagaatcccgagaacatctccgtttagggttgttgggccttcctgcccctaagaatgattttgaaattgttctaccagaaaatgccgagaaggagctggaagaacgtgaaatagatgatacttacattgaagatgctgctgatgtggatgctcgaaagcaggccatacgagatgcagagcgtgtaaaggaaatgaaacgaatgcataaagctgtccagaaagatctgccaagaccatcagaagtaaatgaaactattctaagacccttaaatgtagaaccgcctttaacagatttacagaaaagtgaagaactaatcaaaaaagaaatgatcacaatgcttcattatgaccttctacatcacccttatgaaccatctggaaataaaaaaggcaaaactgtagggtttggtaccaataattcagagcacattacctatctggaacataatccttatgaaaagttctccaaagaagagctgaaaaagataaacaggggtcacatgacgacagaagccaagagggctgcaaagatggaaaagaagatgaaaattttgcttgggggttaccagtctcgtgctatggggctcatgaaacagttgaatgacttatgggaccaaattgaacaggctcacttggagttacgcacttttgaagaactcaagaaacatgaagattctgctattccccggaggctagagtgtctaaaagaagacgttcagcgacaacaagaaagagaaaaggaacttcaacatagatatgctgatttgctgctggagaaagagactttaaagtcaaaattctgaagtacagtttatattctgtcacaggattaattaattgccggttttcatactctagaaggctgaaactgatgtttatcttcattgacaaatttacccaccatctgtggtttttcagttgtttattttaaatgatatcgatcttacacattctgtgtataaagaccttaactccacaggacggacattttagagtttaaattattaaggctatcattcttttagtaatgtcatatttgcaaacttttttagttttggcctttaatttaaaaagcctaattttaaagtgctgcctgtgagtaactcttgaataaaaacaaaatataaaaaattga

SEQ ID NO: 446232 - DNA, 1025 bp, Homo sapiens
gacacagttctattggtttgaaatacataaatattttatttcaattgtggtaattctttcatttcagttgattgctaaattataaacattattcaaagtttgttgtggggaaggaactccagttatattgtataaactaaatgctatacttaaattatcctttccactcttaggttcaggagataagcccttctctgtaagcactgtatgccatggctgccagtgtgtttgatttttgctgccatgaactttggaaccgtgaatctaaattatggccctatcactgcctatcaagcaagatgaagtccagctttgtcgtggctggtgtctcctgaatggattaaaaaaaaaaatgccctgaggtttatattggagataaacaggggtcacatgacgacagaagccaagagggctgcaaagatggaaaagaagatgaaaattttgcttgggggttaccagtctcgtgctatggggctcatgaaacagttgaatgacttatgggaccaaattgaacaggctcacttggagttacgcacttttgaagaactcaagaaacatgaagattctgctattccccggaggctagagtgtctaaaagaagacgttcagcgacaacaagaaagagaaaaggaacttcaacatagatatgctgatttgctgctggagaaagagactttaaagtcaaaattctgaagtacagtttatattctgtcacaggattaattaattgccggttttcatactctagaaggctgaaactgatgtttatcttcattgacaaatttacccaccatctgtggtttttcagttgtttattttaaatgatatcgatcttacacattctgtgtataaagaccttaactccacaggacggacattttagagtttaaattattaaggctatcattcttttagtaatgtcatatttgcaaacttttttagttttggcctttaatttaaaaagcctaattttaaagtgctgcctgtgagtaactcttgaataaaaacaaaatataaaaaattga

SEQ ID NO: 446233 - DNA, 699 bp, Homo sapiens
  misc_feature (37)..(37): n is a, c, g, or t
  misc_feature (44)..(44): n is a, c, g, or t
  misc_feature (57)..(57): n is a, c, g, or t
  misc_feature (76)..(76): n is a, c, g, or t
ggagggcccgcctcggccggcgcggttccgtttttcnccccgangatactgtttaanccagcctctttggggacanaaccaaccggctgcaaagatggaaaagaagatgaaaattttgcttgggggttaccagtctcgtgctatggggctcatgaaacagttgaatgacttatgggaccaaattgaacaggctcacttggagttacgcacttttgaagaactcaagaaacatgaagattctgctattccccggaggctagagtgtctaaaagaagacgttcagcgacaacaagaaagagaaaaggaacttcaacatagatatgctgatttgctgctggagaaagagactttaaagtcaaaattctgaagtacagtttatattctgtcacaggattaattaattgccggttttcatactctagaaggctgaaactgatgtttatcttcattgacaaatttacccaccatctgtggtttttcagttgtttattttaaatgatatcgatcttacacattctgtgtataaagaccttaactccacaggacggacattttagagtttaaattattaaggctatcattcttttagtaatgtcatatttgcaaacttttttagttttggcctttaatttaaaaagcctaattttaaagtgctgcctgtgagtaactcttgaataaaaacaaaatataaaaaattga

SEQ ID NO: 446234 - DNA, 1218 bp, Homo sapiens
gtctcaaactcctgacctcaggcgatccacccacctcagcgtcccaaagtgctgggattataggcgtgagcaccgcacctggcctatgagtaatcttttatttaggaaatttacatttttacattagtgagattggtcttttgggctattgtacttttttttttttttttttgagatggagtcttgctctctcacccaggctggagtgcagtagtgcaatcttggcccactgcaacctctgcctcctgggctcgagtgattctctgcctcagccttccaagtagctgggactacaggcatgtgccaccgcacctggctaatttttgtgtttttagtagagatggggttttgctatgttggccaggctggtcttgaattcctgacctcaggtgatccacctacctcggcctcccaaagtgctagaattacaggtgtgagccaccatgcccagcctggttattgtattttgatattgggattttgctagctctctaaagtaaataggataactgtatatctttttctgtgcattaagcagttataacatgggaatgatttgttcatgaaaggttgaaagtctgtacttacagaacttttgagttcacagtgctttctggaaataatttctttataactgtcagtttcttttgtgactattatgttacctatttttaaatttaagcaactttaaattaaaaaaattgtttttaaaatatattcttccttttatgtttatttagtaaatttaggtaatgtatactttttaagaaatatttttattttgttcaaatttaaacatctgttgttagcagaaaattctaatagcaatttcttttctattaactttgccatttctaagttataggaaatttaccttctcttaattctaccactttttacttgactagacttgttaagggtatacattttctgttcagaaaactagtgtttttattggcttatctattgtgattttgttttaaaatatgttaatttctcaatttaggcttattattttgttttctgtagttttttgactttttgagactgatgcttattttttgcttgtatacaaatgaatgtgttgaagacttttgaactgtcctttgagttcaaatatgttcacatcccagccattttgatatgtagtagtcttgttttctaagtagtatatcattgtgttttaaatttctggttcaataattaagtttttcaaaa

SEQ ID NO: 446235 - DNA, 375 bp, Homo sapiens
tgatctttggatataatgtaggtaaaacttttaaacctagtttctcacacacacaataggtacctgagaaatgatagctgctgttatagtgagtgaaagcaaaggatgtttatacttttgaggaaacatggatgcttgatttttaaaaagcagtctgcattgactcaaaggcttcttaagctatttttcctaggtattgttatccacccttccaaaaaacaaccaaccacatcttggatttgactcaaggcatgagggaaaaaattagtcttctaaagctctctggatatggcaagtgtttgtagtacttaaacttattgaaattattattgtaaacaggcccaggatgttttggtgcaggagatggaagtggtt

SEQ ID NO: 446236 - DNA, 6899 bp, Homo sapiens
tgcgcggggcgtaaggcgctttggccagagtggtttgatggttttgtgttagtcttcctgcagctgagcttccacaagacactttttccctttcagccacccaatatctcgcgagacttgctattctgcgccccctcctaccttgcgcttgcgcagatcttcaaagcagaaggtcgcgcttggaggaagtggcggctttgagtccggtggcccaatcgctgttactacttctctgaagctcctctcggctgcttgccgagacaccctgccgccaagatgcctcgaattatgatcaaggggggcgtatggaggaataccgaggatgaaattctgaaagcagcggtaatgaaatatgggaaaaatcagtggtctaggattgcctcattgctgcatagaaaatcagcaaagcagtgcaaagccagatggtatgaatggctggatccaagcattaagaagacagaatggtccagagaagaagaggaaaaactcttgcacttggccaagttgatgccaactcagtggaggaccattgctccaatcattggaagaacagcggcccagtgcttagaacactatgaatttcttctggataaagctgcccaaagagacaatgaagaggaaacaacagatgatccacgaaaacttaaacctggagaaatagatccaaatccagaaacaaaaccagcgcggcctgatccaattgatatggatgaggatgaacttgagatgctttctgaagccagagcccgcttggctaatactcagggaaagaaggccaagaggaaagcaagagagaaacaattggaagaagcaagacgtcttgctgccctccaaaaaagaagagaacttcgagcagctggcatagaaattcagaagaaaagaaaaaggaagagaggagttgattataatgccgaaatcccatttgaaaaaaagcctgcccttggtttttatgatacttctgaggaaaactaccaagctcttgacgcagatttcaggaaattaagacaacaggatcttgatggggagctaagatctgaaaaagaaggaagagatagaaaaaaagacaaacagcatttgaaaaggaaaaaagaatctgatttaccatcagctattcttcaaactagtggtgtttctgaatttactaaaaagagaagcaaactagtacttcctgcccctcagatttcagatgcagaactccaggaagttgtaaaagtaggccaagcgagtgaaattgcacgtcaaactgccgaggaatctggcataacaaattctgcttccagtacacttttgtctgagtacaatgtcaccaacaacagcgttgctcttagaacaccacgaacaccagcttcccaggacagaattctgcaggaagcccagaacctcatggccctcaccaatgtggacaccccattgaaaggtggacttaataccccattgcatgagagtgacttctcaggtgtaactccacagcgacaagttgtacagactccaaacacagttctctctactccattcaggactccttctaatggagctgaagggctgactccccggagtggaacaactcccaaaccagttattaactctactccgggtagaactcctcttcgagacaagttaaacattaatcccgaggatggaatggcagactatagtgatccctcttacgtgaagcagatggaaagagaatcccgagaacatctccgtttagggttgttgggccttcctgcccctaagaatgattttgaaattgttctaccagaaaatgccgagaaggagctggaagaacgtgaaatagatgatacttacattgaagatgctgctgatgtggatgctcgaaagcaggccatacgagatgcagagcgtgtaaaggaaatgaaacgaatgcataaagctgtccagaaagatctgccaagaccatcagaagtaaatgaaactattctaagacccttaaatgtagaaccgcctttaacagatttacagaaaagtgaagaactaatcaaaaaagaaatgatcacaatgcttcattatgaccttctacatcacccttatgaaccatctggaaataaaaaaggcaaaactgtagggtttggtaccaataattcagagcacattacctatctggaacataatccttatgaaaagttctccaaagaagagctgaaaaaggcccaggatgttttggtgcaggagatggaagtggttaaacaaggaatgagccatggagagctctcaagtgaagcttataaccaggtgtgggaagaatgctacagtcaagttttatatcttcctgggcagagccgctacacacgggccaatctggctagtaaaaaggacagaattgaatcacttgaaaagaggctcgagataaacaggggtcacatgacgacagaagccaagagggctgcaaagatggaaaagaagatgaaaattttgcttgggggttaccagtctcgtgctatggggctcatgaaacagttgaatgacttatgggaccaaattgaacaggctcacttggagttacgcacttttgaagaactcaagaaacatgaagattctgctattccccggaggctagagtgtctaaaagaagacgttcagcgacaacaagaaagagaaaaggaacttcaacatagatatgctgatttgctgctggagaaagagactttaaagtcaaaattctgaagtacagtttatattctgtcacaggattaattaattgccggttttcatactctagaaggctgaaactgatgtttatcttcattgacaaatttacccaccatctgtggtttttcagttgtttattttaaatgatatcgatcttacacattctgtgtataaagaccttaactccacaggacggacattttagagtttaaattattaaggctatcattcttttagtaatgtcatatttgcaaacttttttagttttggcctttaatttaaaaagcctaattttaaagtgctgcctgtgagtaactcttgaataaaaacaaaatataaaaaattgagaatgtagccttttgtttgaagtaattagatacttaagagtgcctgcaaaccagcagctatgtactctgtgtcatatttaatgagtaactcttgggtaatcaaaatggtgatgcagtatcttaaacacttaagaggcagttctttgtggctttgttagtttcagcaaagagtggtcatttctgtatacactgacaagttagattaactttttagtacctcaaattttttttttgttaatatcactttaaagaaggtctcttgtctgccagctacttaaataatttatgggtcagggcttaaaagatttaacttccttgccccattattttcttataagtattttttgacaaaggcattttaaaagttaatttcaagaaggccatcaaacttaaagctctatgtttagcctaagaagtcagttacatcagtgtagaatttggggaatggatagaggtggagatatttaattttatataattcatataaattgatttagttacagtatcagttggctacaagctcattatagactagcaatgttttgacatcaccaaaaacgtttgcccagtcttagaatactagggactataggaagggaagggattcattcattcattcgatattgaatgtataccctgtgccagagtcttagagagagaacaacaaacaaaataggcctagttcttgtttagtagagcttatagtcttttgagaatgacagacaattaaaatccaaatgtttatttggtgattcttatgtgtcagacacttaagtgttgggagataagcagttattaagacagagttcttgctctcatggaggtgacattagtggggaggagatactaagtatgtccagggaaagtatcagaccatgagttttagattctgtggaggaaattaaagtagggtgattatgagatagtgaatgagtggctattttagactggacgatcaaagagacctcttggaaggcagctatgctcaccactataccactgcactgtgccgcaccgtaccactataagctgcacggccaaagagacctcttaaagaagtaacatttaagataacatgtgattgacattttagaatgggctatccttgtgagattcaaggaaagaacatcctaggtggagtgaatagcaaacataaagcctcttttgtatgtttgaggaacaaaaaggacaatgcagctagagtgtcaagaatggcatttctgtatataagacctcgttgtatagagccacataaataaggctataataaggaatttggatcttactttaaatatgataagaatcgatgagaagatctaagcaaaggaatgacatgatcagatttggttttagaaacatcactatctccttagtgtgtaaaatctcaccaggctggagatagggaagccagtccaattaggagcctgatgcagtgatccagacaaaaaaataatagtgattctaactagagtccaggtaatagtagtggagatatgtggagagacatgataggtatatacttaatagtcttatcagacgataaattgatattttcctggtgtgtagtcacttaattcaaatacttttttcagtaagttctgggttttctaggaaaaacttcagtatcatcagtgaataatgatagtgtttcttctgatagttttatttcacttttattgcatgttttgttatctgaaatgtttaggacaatgttaacaataatgatgttagacatttttttttcttattttaatgggaatgtccatagttttaagtttgctgttgggagttagatagtctttatctgaaagacagtgtctctcttttagtttttaaagagtttgaattagaaatggctctggaactttaaacagtataccatttgggcatctattaaagcattcatataattgttctcatttgatgttttgatgaggtatattaatagattttcccacattaaatcatctttgcactcctggaatcaggtagattaatttttaaaagaaattttaaaggatttatagtttatttgcactttttgtagacttgaattatatggatttaaaagttgatctaatattaataaaggctcactttgttttcaaaatttgaagtaattcacatacttatagcctaaaatcggcaggaattacaaaatttcaaaactggcacattgtaaactgcatatgcatttgccaggtagtggtgccacttgaaatggtgaacagacacactgttatcctttgtcagtatcctgtaaagcccaggattctttaccagcaccatacagcgattttggtgactattttaacattcacactgaggccaggggtggtgagtcatgcctgtaatcctagcactttgggaggccaaggtgggaggatcatttgagctcaggagttcaagattagcctgggtaacatagtgagaccctgtctctattaaaaaataataataaaaataacattcacattggtattgttcactaaggtattggttgttaaggcattcattaaggtattgttaaaacttgtgttaagcatgttaaagtctcagtaactttgggatagaaataaaatgtgataaaaagctgaaagaaaccaccacaagggagagtcctttttgaaatattagagacataatgctgtctaataaaaaacgacatcaaagaaaaactacactacagtgactgcagacttaatgttggccaaccatgcatcctccctagaaatgcatttgaatttgatttactaatcttttatttaggaaatttacatttttacattagtgagattggtcttttgggctattgtacttttttttttttttttttgagatggagtcttgctctctcacccaggctggagtgcagtagtgcaatcttggcccactgcaacctctgcctcctgggctcgagtgattctctgcctcagccttccaagtagctgggactacaggcatgtgccaccgcacctggctaatttttgtgtttttagtagagatggggttttgctatgttggccaggctggtcttgaattcctgacctcaggtgatccacctacctcggcctcccaaagtgctagaattacaggtgtgagccaccatgcccagcctggttattgtattttgatattgggattttgctagctctctaaagtaaataggataactgtatatctttttctgtgcattaagcagttataacatgggaatgatttgttcatgaaaggttgaaagtctgtacttacagaacttttgagttcacagtgctttctggaaataatttctttataactgtcagtttcttttgtgactattatgttacctatttttaaatttaagcaactttaaattaaaaaaattgtttttaaaatatattcttccttttatgtttatttagtaaatttaggtaatgtatactttttaagaaatatttttattttgttcaaatttaaacatctgttgttagcagaaaattctaatagcaatttcttttctattaactttgccatttctaagttataggaaatttaccttctcttaattctaccactttttacttgactagacttgttaagggtatacattttctgttcagaaaactagtgtttttattggcttatctattgtgattttgttttaaaatatgttaatttctcaatttaggcttattattttgttttctgtagttttttgactttttgagactgatgcttattttttgcttgtatacaaatgaatgtgttgaagacttttgaactgtcctttgagttcaaatatgttcacatcccagccattttgatatgtagtagtcttgttttctaagtagtatatcattgtgttttaaatttctggttcaataattaagtttttcaaaa

SEQ ID NO: 446237 - DNA, 6926 bp, Homo sapiens
tgcgcggggcgtaaggcgctttggccagagtggtttgatggttttgtgttagtcttcctgcagctgagcttccacaagacactttttccctttcagccacccaatatctcgcgagacttgctattctgcgccccctcctaccttgcgcttgcgcagatcttcaaagcagaaggtcgcgcttggaggaagtggcggctttgagtccggtggcccaatcgctgttactacttctctgaagctcctctcggctgcttgccgagacaccctgccgccaagatgcctcgaattatgatcaaggggggcgtatggaggaataccgaggatgaaattctgaaagcagcggtaatgaaatatgggaaaaatcagtggtctaggattgcctcattgctgcatagaaaatcagcaaagcagtgcaaagccagatggtatgaatggctggatccaagcattaagaagacagaatggtccagagaagaagaggaaaaactcttgcacttggccaagttgatgccaactcagtggaggaccattgctccaatcattggaagaacagcggcccagtgcttagaacactatgaatttcttctggataaagctgcccaaagagacaatgaagaggaaacaacagatgatccacgaaaacttaaacctggagaaatagatccaaatccagaaacaaaaccagcgcggcctgatccaattgatatggatgaggatgaacttgagatgctttctgaagccagagcccgcttggctaatactcagggaaagaaggccaagaggaaagcaagagagaaacaattggaagaagcaagacgtcttgctgccctccaaaaaagaagagaacttcgagcagctggcatagaaattcagaagaaaagaaaaaggaagagaggagttgattataatgccgaaatcccatttgaaaaaaagcctgcccttggtttttatgatacttctgaggaaaactaccaagctcttgacgcagatttcaggaaattaagacaacaggatcttgatggggagctaagatctgaaaaagaaggaagagatagaaaaaaagacaaacagcatttgaaaaggaaaaaagaatctgatttaccatcagctattcttcaaactagtggtgtttctgaatttactaaaaagagaagcaaactagtacttcctgcccctcagatttcagatgcagaactccaggaagttgtaaaagtaggccaagcgagtgaaattgcacgtcaaactgccgaggaatctggcataacaaattctgcttccagtacacttttgtctgagtacaatgtcaccaacaacagcgttgctcttagaacaccacgaacaccagcttcccaggacagaattctgcaggaagcccagaacctcatggccctcaccaatgtggacaccccattgaaaggtggacttaataccccattgcatgagagtgacttctcaggtgtaactccacagcgacaagttgtacagactccaaacacagttctctctactccattcaggactccttctaatggagctgaagggctgactccccggagtggaacaactcccaaaccagttattaactctactccgggtagaactcctcttcgagacaagttaaacattaatcccgaggatggaatggcagactatagtgatccctcttacgtgaagcagatggaaagagaatcccgagaacatctccgtttagggttgttgggccttcctgcccctaagaatgattttgaaattgttctaccagaaaatgccgagaaggagctggaagaacgtgaaatagatgatacttacattgaagatgctgctgatgtggatgctcgaaagcaggccatacgagatgcagagcgtgtaaaggaaatgaaacgaatgcataaagctgtccagaaagatctgccaagaccatcagaagtaaatgaaactattctaagacccttaaatgtagaaccgcctttaacagatttacagaaaagtgaagaactaatcaaaaaagaaatgatcacaatgcttcattatgaccttctacatcacccttatgaaccatctggaaataaaaaaggcaaaactgtagggtttggtaccaataattcagagcacattacctatctggaacataatccttatgaaaagttctccaaagaagagctgaaaaaggcccaggatgttttggtgcaggagatggaagtggttaaacaaggaatgagccatggagagctctcaagtgaagcttataaccaggtgtgggaagaatgctacagtcaagttttatatcttcctgggcagagccgctacacacgggccaatctggctagtaaaaaggacagaattgaatcacttgaaaagaggctcgagataaacaggggtcacatgacgacagaagccaagagggctgcaaagatggaaaagaagatgaaaattttgcttgggggttaccagtctcgtgctatggggctcatgaaacagttgaatgacttatgggaccaaattgaacaggctcacttggagttacgcacttttgaagaactcaagaaacatgaagattctgctattccccggaggctagagtgtctaaaagaagacgttcagcgacaacaagaaagagaaaaggaacttcaacatagatatgctgatttgctgctggagaaagagactttaaagtcaaaattctgaagtacagtttatattctgtcacaggattaattaattgccggttttcatactctagaaggctgaaactgatgtttatcttcattgacaaatttacccaccatctgtggtttttcagttgtttattttaaatgatatcgatcttacacattctgtgtataaagaccttaactccacaggacggacattttagagtttaaattattaaggctatcattcttttagtaatgtcatatttgcaaacttttttagttttggcctttaatttaaaaagcctaattttaaagtgctgcctgtgagtaactcttgaataaaaacaaaatataaaaaattgagaatgtagccttttgtttgaagtaattagatacttaagagtgcctgcaaaccagcagctatgtactctgtgtcatatttaatgagtaactcttgggtaatcaaaatggtgatgcagtatcttaaacacttaagaggcagttctttgtggctttgttagtttcagcaaagagtggtcatttctgtatacactgacaagttagattaactttttagtacctcaaattttttttttgttaatatcactttaaagaaggtctcttgtctgccagctacttaaataatttatgggtcagggcttaaaagatttaacttccttgccccattattttcttataagtattttttgacaaaggcattttaaaagttaatttcaagaaggccatcaaacttaaagctctatgtttagcctaagaagtcagttacatcagtgtagaatttggggaatggatagaggtggagatatttaattttatataattcatataaattgatttagttacagtatcagttggctacaagctcattatagactagcaatgttttgacatcaccaaaaacgtttgcccagtcttagaatactagggactataggaagggaagggattcattcattcattcgatattgaatgtataccctgtgccagagtcttagagagagaacaacaaacaaaataggcctagttcttgtttagtagagcttatagtcttttgagaatgacagacaattaaaatccaaatgtttatttggtgattcttatgtgtcagacacttaagtgttgggagataagcagttattaagacagagttcttgctctcatggaggtgacattagtggggaggagatactaagtatgtccagggaaagtatcagaccatgagttttagattctgtggaggaaattaaagtagggtgattatgagatagtgaatgagtggctattttagactggacgatcaaagagacctcttggaaggcagctatgctcaccactataccactgcactgtgccgcaccgtaccactataagctgcacggccaaagagacctcttaaagaagtaacatttaagataacatgtgattgacattttagaatgggctatccttgtgagattcaaggaaagaacatcctaggtggagtgaatagcaaacataaagcctcttttgtatgtttgaggaacaaaaaggacaatgcagctagagtgtcaagaatggcatttctgtatataagacctcgttgtatagagccacataaataaggctataataaggaatttggatcttactttaaatatgataagaatcgatgagaagatctaagcaaaggaatgacatgatcagatttggttttagaaacatcactatctccttagtgtgtaaaatctcaccaggctggagatagggaagccagtccaattaggagcctgatgcagtgatccagacaaaaaaataatagtgattctaactagagtccaggtaatagtagtggagatatgtggagagacatgataggtatatacttaatagtcttatcagacgataaattgatattttcctggtgtgtagtcacttaattcaaatacttttttcagtaagttctgggttttctaggaaaaacttcagtatcatcagtgaataatgatagtgtttcttctgatagttttatttcacttttattgcatgttttgttatctgaaatgtttaggacaatgttaacaataatgatgttagacatttttttttcttattttaatgggaatgtccatagttttaagtttgctgttgggagttagatagtctttatctgaaagacagtgtctctcttttagtttttaaagagtttgaattagaaatggctctggaactttaaacagtataccatttgggcatctattaaagcattcatataattgttctcatttgatgttttgatgaggtatattaatagattttcccacattaaatcatctttgcactcctggaatcaggtagattaatttttaaaagaaattttaaaggatttatagtttatttgcactttttgtagacttgaattatatggatttaaaagttgatctaatattaataaaggctcactttgttttcaaaatttgaagtaattcacatacttatagcctaaaatcggcaggaattacaaaatttcaaaactggcacattgtaaactgcatatgcatttgccaggtagtggtgccacttgaaatggtgaacagacacactgttatcctttgtcagtatcctgtaaagcccaggattctttaccagcaccatacagcgattttggtgactattttaacattcacactgaggccaggggtggtgagtcatgcctgtaatcctagcactttgggaggccaaggtgggaggatcatttgagctcaggagttcaagattagcctgggtaacatagtgagaccctgtctctattaaaaaataataataaaaataacattcacattggtattgttcactaaggtattggttgttaaggcattcattaaggtattgttaaaacttgtgttaagcatgttaaagtctcagtaactttgggatagaaataaaatgtgataaaaagctgaaagaaaccaccacaagggagagtcctttttgaaatattagagacataatgctgtctaataaaaaacgacatcaaagaaaaactacactacagtgactgcagacttaatgttggccaaccatgcatcctccctagaaatgcatttgaatttgatttactaatcttttatttaggaaatttacatttttacattagtgagattggtcttttgggctattgtacttttttttttttttttttgagatggagtcttgctctctcacccaggctggagtgcagtagtgcaatcttggcccactgcaacctctgcctcctgggctcgagtgattctctgccttacaggacttctcccaagatagcgggaggagcatacagggctgtgttcgccaccggaacccgtggcataaattctgggggttatcaagataagacgacatggggttttgctatgttggccaggctggtcttgaattcctgacctcaggtgatccacctacctcggcctcccaaagtgctagaattacaggtgtgagccaccatgcccagcctggttattgtattttgatattgggattttgctagctctctaaagtaaataggataactgtatatctttttctgtgcattaagcagttataacatgggaatgatttgttcatgaaaggttgaaagtctgtacttacagaacttttgagttcacagtgctttctggaaataatttctttataactgtcagtttcttttgtgactattatgttacctatttttaaatttaagcaactttaaattaaaaaaattgtttttaaaatatattcttccttttatgtttatttagtaaatttaggtaatgtatactttttaagaaatatttttattttgttcaaatttaaacatctgttgttagcagaaaattctaatagcaatttcttttctattaactttgccatttctaagttataggaaatttaccttctcttaattctaccactttttacttgactagacttgttaagggtatacattttctgttcagaaaactagtgtttttattggcttatctattgtgattttgttttaaaatatgttaatttctcaatttaggcttattattttgttttctgtagttttttgactttttgagactgatgcttattttttgcttgtatacaaatgaatgtgttgaagacttttgaactgtcctttgagttcaaatatgttcacatcccagccattttgatatgtagtagtcttgttttctaagtagtatatcattgtgttttaaatttctggttcaataattaagtttttcaaaa

SEQ ID NO: 446238 - DNA, 4416 bp, Homo sapiens
tgcgcggggcgtaaggcgctttggccagagtggtttgatggttttgtgttagtcttcctgcagctgagcttccacaagacactttttccctttcagccacccaatatctcgcgagacttgctattctgcgccccctcctaccttgcgcttgcgcagatcttcaaagcagaaggtcgcgcttggaggaagtggcggctttgagtccggtggcccaatcgctgttactacttctctgaagctcctctcggctgcttgccgagacaccctgccgccaagatgcctcgaattatgatcaaggggggcgtatggaggaataccgaggatgaaattctgaaagcagcggtaatgaaatatgggaaaaatcagtggtctaggattgcctcattgctgcatagaaaatcagcaaagcagtgcaaagccagatggtatgaatggctggatccaagcattaagaagacagaatggtccagagaagaagaggaaaaactcttgcacttggccaagttgatgccaactcagtggaggaccattgctccaatcattggaagaacagcggcccagtgcttagaacactatgaatttcttctggataaagctgcccaaagagacaatgaagaggaaacaacagatgatccacgaaaacttaaacctggagaaatagatccaaatccagaaacaaaaccagcgcggcctgatccaattgatatggatgaggatgaacttgagatgctttctgaagccagagcccgcttggctaatactcagggaaagaaggccaagaggaaagcaagagagaaacaattggaagaagcaagacgtcttgctgccctccaaaaaagaagagaacttcgagcagctggcatagaaattcagaagaaaagaaaaaggaagagaggagttgattataatgccgaaatcccatttgaaaaaaagcctgcccttggtttttatgatacttctgaggaaaactaccaagctcttgacgcagatttcaggaaattaagacaacaggatcttgatggggagctaagatctgaaaaagaaggaagagatagaaaaaaagacaaacagcatttgaaaaggaaaaaagaatctgatttaccatcagctattcttcaaactagtggtgtttctgaatttactaaaaagagaagcaaactagtacttcctgcccctcagatttcagatgcagaactccaggaagttgtaaaagtaggccaagcgagtgaaattgcacgtcaaactgccgaggaatctggcataacaaattctgcttccagtacacttttgtctgagtacaatgtcaccaacaacagcgttgctcttagaacaccacgaacaccagcttcccaggacagaattctgcaggaagcccagaacctcatggccctcaccaatgtggacaccccattgaaaggtggacttaataccccattgcatgagagtgacttctcaggtgtaactccacagcgacaagttgtacagactccaaacacagttctctctactccattcaggactccttctaatggagctgaagggctgactccccggagtggaacaactcccaaaccagttattaactctactccgggtagaactcctcttcgagacaagttaaacattaatcccgaggatggaatggcagactatagtgatccctcttacgtgaagcagatggaaagagaatcccgagaacatctccgtttagggttgttgggccttcctgcccctaagaatgattttgaaattgttctaccagaaaatgccgagaaggagctggaagaacgtgaaatagatgatacttacattgaagatgctgctgatgtggatgctcgaaagcaggccatacgagatgcagagcgtgtaaaggaaatgaaacgaatgcataaagctgtccagaaagatctgccaagaccatcagaagtaaatgaaactattctaagacccttaaatgtagaaccgcctttaacagatttacagaaaagtgaagaactaatcaaaaaagaaatgatcacaatgcttcattatgaccttctacatcacccttatgaaccatctggaaataaaaaaggcaaaactgtagggtttggtaccaataattcagagcacattacctatctggaacataatccttatgaaaagttctccaaagaagagctgaaaaaggcccaggatgttttggtgcaggagatggaagtggttaaacaaggaatgagccatggagagctctcaagtgaagcttataaccaggtgtgggaagaatgctacagtcaagttttatatcttcctgggcagagccgctacacacgggccaatctggctagtaaaaaggacagaattgaatcacttgaaaagaggctcgagataaacaggggtcacatgacgacagaagccaagagggctgcaaagatggaaaagaagatgaaaattttgcttgggggttaccagtctcgtgctatggggctcatgaaacagttgaatgacttatgggaccaaattgaacaggctcacttggagttacgcacttttgaagaactcaagaaacatgaagattctgctattccccggaggctagagtgtctaaaagaagacgttcagcgacaacaagaaagagaaaaggaacttcaacatagatatgctgatttgctgctggagaaagagactttaaagtcaaaattctgaagtacagtttatattctgtcacaggattaattaattgccggttttcatactctagaaggctgaaactgatgtttatcttcattgacaaatttacccaccatctgtggtttttcagttgtttattttaaatgatatcgatcttacacattctgtgtataaagaccttaactccacaggacggacattttagagtttaaattattaaggctatcattcttttagtaatgtcatatttgcaaacttttttagttttggcctttaatttaaaaagcctaattttaaagtgctgcctgtgagtaactcttgaataaaaacaaaatataaaaaattgagaatgtagccttttgtttgaagtaattagatacttaagagtgcctgcaaaccagcagctatgtactctgtgtcatatttaatgagtaactcttgggtaatcaaaatggtgatgcagtatcttaaacacttaagaggcagttctttgtggctttgttagtttcagcaaagagtggtcatttctgtatacactgacaagttagattaactttttagtacctcaaattttttttttgttaatatcactttaaagaaggtctcttgtctgccagctacttaaataatttatgggtcagggcttaaaagatttaacttccttgccccattattttcttataagtattttttgacaaaggcattttaaaagttaatttcaagaaggccatcaaacttaaagctctatgtttagcctaagaagtcagttacatcagtgtagaatttggggaatggatagaggtggagatatttaattttatataattcatataaattgatttagttacagtatcagttggctacaagctcattatagactagcaatgttttgacatcaccaaaaacgtttgcccagtcttagaatactagggactataggaagggaagggattcattcattcattcgatattgaatgtataccctgtgccagagtcttagagagagaacaacaaacaaaataggcctagttcttgtttagtagagcttatagtcttttgagaatgacagacaattaaaatccaaatgtttatttggtgattcttatgtgtcagacacttaagtgttgggagataagcagttattaagacagagttcttgctctcatggaggtgacattagtggggaggagatactaagtatgtccagggaaagtatcagaccatgagttttagattctgtggaggaaattaaagtagggtgattatgagatagtgaatgagtggctattttagactggacgatcaaagagacctcttggaaggcagctatgctcaccactataccactgcactgtgccgcaccgtaccactataagctgcacggccaaagagacctcttaaagaagtaacatttaagataacatgtgattgacattttagaatgggctatccttgtgagattcaaggaaagaacatcctaggtggagtgaatagcaaacataaagcctcttttgtatgtttgaggaacaaaaaggacaatgcagctagagtgtcaagaatggcatttctgtatataagacctcgttgtatagagccacataaataaggctataataaggaatttggatcttaaatgttacttctttaagaggtctctttggccgtgcagcttatagtggtacggtgcggcacagtgcagtggtatagtggtgagcatagctgccttccaagaggtctctttgatcg

SEQ ID NO: 446239 - DNA, 3219 bp, Homo sapiens
tgcgcggggcgtaaggcgctttggccagagtggtttgatggttttgtgttagtcttcctgcagctgagcttccacaagacactttttccctttcagccacccaatatctcgcgagacttgctattctgcgccccctcctaccttgcgcttgcgcagatcttcaaagcagaaggtcgcgcttggaggaagtggcggctttgagtccggtggcccaatcgctgttactacttctctgaagctcctctcggctgcttgccgagacaccctgccgccaagatgcctcgaattatgatcaaggggggcgtatggaggaataccgaggatgaaattctgaaagcagcggtaatgaaatatgggaaaaatcagtggtctaggattgcctcattgctgcatagaaaatcagcaaagcagtgcaaagccagatggtatgaatggctggatccaagcattaagaagacagaatggtccagagaagaagaggaaaaactcttgcacttggccaagttgatgccaactcagtggaggaccattgctccaatcattggaagaacagcggcccagtgcttagaacactatgaatttcttctggataaagctgcccaaagagacaatgaagaggaaacaacagatgatccacgaaaacttaaacctggagaaatagatccaaatccagaaacaaaaccagcgcggcctgatccaattgatatggatgaggatgaacttgagatgctttctgaagccagagcccgcttggctaatactcagggaaagaaggccaagaggaaagcaagagagaaacaattggaagaagcaagacgtcttgctgccctccaaaaaagaagagaacttcgagcagctggcatagaaattcagaagaaaagaaaaaggaagagaggagttgattataatgccgaaatcccatttgaaaaaaagcctgcccttggtttttatgatacttctgaggaaaactaccaagctcttgacgcagatttcaggaaattaagacaacaggatcttgatggggagctaagatctgaaaaagaaggaagagatagaaaaaaagacaaacagcatttgaaaaggaaaaaagaatctgatttaccatcagctattcttcaaactagtggtgtttctgaatttactaaaaagagaagcaaactagtacttcctgcccctcagatttcagatgcagaactccaggaagttgtaaaagtaggccaagcgagtgaaattgcacgtcaaactgccgaggaatctggcataacaaattctgcttccagtacacttttgtctgagtacaatgtcaccaacaacagcgttgctcttagaacaccacgaacaccagcttcccaggacagaattctgcaggaagcccagaacctcatggccctcaccaatgtggacaccccattgaaaggtggacttaataccccattgcatgagagtgacttctcaggtgtaactccacagcgacaagttgtacagactccaaacacagttctctctactccattcaggactccttctaatggagctgaagggctgactccccggagtggaacaactcccaaaccagttattaactctactccgggtagaactcctcttcgagacaagttaaacattaatcccgaggatggaatggcagactatagtgatccctcttacgtgaagcagatggaaagagaatcccgagaacatctccgtttagggttgttgggccttcctgcccctaagaatgattttgaaattgttctaccagaaaatgccgagaaggagctggaagaacgtgaaatagatgatacttacattgaagatgctgctgatgtggatgctcgaaagcaggccatacgagatgcagagcgtgtaaaggaaatgaaacgaatgcataaagctgtccagaaagatctgccaagaccatcagaagtaaatgaaactattctaagacccttaaatgtagaaccgcctttaacagatttacagaaaagtgaagaactaatcaaaaaagaaatgatcacaatgcttcattatgaccttctacatcacccttatgaaccatctggaaataaaaaaggcaaaactgtagggtttggtaccaataattcagagcacattacctatctggaacataatccttatgaaaagttctccaaagaagagctgaaaaaggcccaggatgttttggtgcaggagatggaagtggttaaacaaggaatgagccatggagagctctcaagtgaagcttataaccaggtgtgggaagaatgctacagtcaagttttatatcttcctgggcagagccgctacacacgggccaatctggctagtaaaaaggacagaattgaatcacttgaaaagaggctcgaggttcaggagataagcccttctctgtaagcactgtatgccatggctgccagtgtgtttgatttttgctgccatgaactttggaaccgtgaatctaaattatggccctatcactgcctatcaagcaagatgaagtccagctttgtcgtggctggtgtctcctgaatggattaaaaaaaaaaatgccctgaggtttatattggagataaacaggggtcacatgacgacagaagccaagagggctgcaaagatggaaaagaagatgaaaattttgcttgggggttaccagtctcgtgctatggggctcatgaaacagttgaatgacttatgggaccaaattgaacaggctcacttggagttacgcacttttgaagaactcaagaaacatgaagattctgctattccccggaggctagagtgtctaaaagaagacgttcagcgacaacaagaaagagaaaaggaacttcaacatagatatgctgatttgctgctggagaaagagactttaaagtcaaaattctgaagtacagtttatattctgtcacaggattaattaattgccggttttcatactctagaaggctgaaactgatgtttatcttcattgacaaatttacccaccatctgtggtttttcagttgtttattttaaatgatatcgatcttacacattctgtgtataaagaccttaactccacaggacggacattttagagtttaaattattaaggctatcattcttttagtaatgtcatatttgcaaacttttttagttttggcctttaatttaaaaagcctaattttaaagtgctgcctgtgagtaactcttgaataaaaacaaaatataaaaaattga

SEQ ID NO: 446240 - DNA, 2303 bp, Homo sapiens
tgcgcggggcgtaaggcgctttggccagagtggtttgatggttttgtgttagtcttcctgcagctgagcttccacaagacactttttccctttcagccacccaatatctcgcgagacttgctattctgcgccccctcctaccttgcgcttgcgcagatcttcaaagcagaaggtcgcgcttggaggaagtggcggctttgagtccggtggcccaatcgctgttactacttctctgaagctcctctcggctgcttgccgagacaccctgccgccaagatgcctcgaattatgatcaaggggggcgtatggaggaataccgaggatgaaattctgaaagcagcggtaatgaaatatgggaaaaatcagtggtctaggattgcctcattgctgcatagaaaatcagcaaagcagtgcaaagccagatggtatgaatggctggatccaagcattaagaagacagaatggtccagagaagaagaggaaaaactcttgcacttggccaagttgatgccaactcagtggaggaccattgctccaatcattggaagaacagcggcccagtgcttagaacactatgaatttcttctggataaagctgcccaaagagacaatgaagaggaaacaacagatgatccacgaaaacttaaacctggagaaatagatccaaatccagaaacaaaaccagcgcggcctgatccaattgatatggatgaggatgaacttgagatgctttctgaagccagagcccgcttggctaatactcagggaaagaaggccaagaggaaagcaagagagaaacaattggaagaagcaagacgtcttgctgccctccaaaaaagaagagaacttcgagcagctggcatagaaattcagaagaaaagaaaaaggaagagaggagttgattataatgccgaaatcccatttgaaaaaaagcctgcccttggtttttatgatacttctgaggaaaactaccaagctcttgacgcagatttcaggaaattaagacaacaggatcttgatggggagctaagatctgaaaaagaaggaagagatagaaaaaaagacaaacagcatttgaaaaggaaaaaagaatctgatttaccatcagctattcttcaaactagtggtgtttctgaatttactaaaaagagaagcaaactagtacttcctgcccctcagatttcagatgcagaactccaggaagttgtaaaagtaggccaagcgagtgaaattgcacgtcaaactgccgaggaatctggcataacaaattctgcttccagtacacttttgtctgagtacaatgtcaccaacaacagcgttgctcttagaacaccacgaacaccagcttcccaggacagaattctgcaggaagcccagaacctcatggccctcaccaatgtggacaccccattgaaaggtggacttaataccccattgcatgagagtgacttctcaggtgtaactccacagcgacaagttgtacagactccaaacacagttctctctactccattcaggactccttctaatggagctgaagggctgactccccggagtggaacaactcccaaaccagttattaactctactccgggtagaactcctcttcgagacaagttaaacattaatcccgaggatggaatggcagactatagtgatccctcttacgtgaagcagatggaaagagaatcccgagaacatctccgtttagggttgttgggccttcctgcccctaagaatgattttgaaattgttctaccagaaaatgccgagaaggagctggaagaacgtgaaatagatgatacttacattgaagatgctgctgatgtggatgctcgaaagcaggccatacgagatgcagagcgtgtaaaggaaatgaaacgaatgcataaagctgtccagaaagatctgccaagaccatcagaagtaaatgaaactattctaagacccttaaatgtagaaccgcctttaacagatttacagaaaagtgaagaactaatcaaaaaagaaatgatcacaatgcttcattatgaccttctacatcacccttatgaaccatctggaaataaaaaaggcaaaactgtagggtttggtaccaataattcagagcacattacctatctggaacataatccttatgtgcaactgcttacacacggattggccccttggatcagctcttaagggacacttatcaccatgcccgccaccaaatgttcacgtcacttctcaaacctccactggtcacacccgttcctcacgcgctctctctcctctgctcccgtgcccactcgactctccct

SEQ ID NO: 446241 - DNA, 712 bp, Homo sapiens
tttggtagagacagggttttaccatgctgcccaggctggtctcgaattcctgagcgcaggcgatccgcccaggagtcaagaccagccttggcaacatagcaagaccccatctcttggcatttaatatgtactagctcatttaactcattcagcaattaaactactgagtgcctactatgttaagcagtagggaacaatgaataaaaagagagaaagctagcatttattgtacccctacgtgccaggcattgggtactcagaagagaacacatatagaaagtcatgtccacatggagcttacattctagtggaaggaaacagactagcaacaaggacttaaataaataagcagataattccagaacctgataaatgcaataaagataataaaacagtgatatgagagtgattagggagaggcactaatttagacagagggacaggaaaagcatctttgggatggtgacatttcagctgaggtttgaagagagcattgtagacagatggaagagtaagtgcaaagttcctgttagaaacaagttttagggggcgggtgtggtggctcacacctgtaatcctagcactttaggaggccgaagtgggtggattgcttgagcccaggagttcaagaccagtctgggcaacatagtgagagtttgtttctacaaataaaaaaaaattagccagatatggtggctcatgcctgtggtcc

SEQ ID NO: 446242 - DNA, 712 bp, Homo sapiens
tttggtagagacagggttttaccatgctgcccaggctggtctcgaattcctgagcgcaggcgatccgcccaggagtcaagaccagccttggcaacatagcaagaccccatctcttggcatttaatatgtactagctcatttaactcattcagcaattaaactactgagtgcctactatgttaagcagtagggaacaatgaaaaaatattgtctttgccttcaaacagttcaaagaagcatcataacaggaatttttaaaaagagagaaagctagcatttattgtacccctacgtgccaggcattgggtactcagaagagaacacatatagaaagtcatgtccacatggagcttacattctagtggaaggaaacagactagcaacaaggacttaaataaataagcagataattccagaacctgataaatgcaataaagataataaaacagtgatatgagagtgattagggagaggcactaatttagacagagggacaggaaaagcatctttgggatggtgacatttcagctgaggtttgaagagaagggggcgggtgtggtggctcacacctgtaatcctagcactttaggaggccgaagtgggtggattgcttgagcccaggagttcaagaccagtctgggcaacatagtgagagtttgtttctacaaataaaaaaaaattagccagatatggtggctcatgcctgtggtcc

SEQ ID NO: 446243 - DNA, 1461 bp, Homo sapiens
tttggtagagacagggttttaccatgctgcccaggctggtctcgaattcctgagcgcaggcgatccgcccacctcagtctcccaaagtgctgggattataagtatgaatcaccgcgtctggcctccctgccatttttactatagcaggaaccagggctggaggcagtctcccagactcctgccctggtcacctcatcagcctccctgagactcagctccactcagggcagcgaggaagacaagcaaacccatggaaccagttagagagggccagaggaacagatcaccctagagatctaccagtcagattccagttactttcttgtcaaggttcccaggatcccagacttccaaccaaacctactgggaatccagccagtctaggagtttcccaggagccagagggacaggatgcacttcctttctaaagattccagcctccagagcagcctgtgccagtgtttattttgagcaccaccgagagtctggcttcaggaaggaaagtaaaagcagcttcaggagagaatgcagtaagccagggtcgggggtgccggccagtgttcttggtgcaggttacctgggcttcggctggggcttcctgaccttcccctttcttggcaccagccttgtcccaagttctgaaattgtcaccatttttcagggaagaacagctataggatggctgttttcctttctttttcctgagagggagcccagccctactctcctcttccctcccaataagaatgggagaagaaaggactagaaaagatcagaggataaatctaaaaacaatgaggtgagatgtgtgctgccacctgcctgtactcctggctactcagtaggccgaggtgggaggatctcttgaggcccaggagtcaagaccagccttggcaacatagcaagaccccatctcttggcatttaatatgtactagctcatttaactcattcagcaattaaactactgagtgcctactatgttaagcagtagggaacaatgaataaaaagagagaaagctagcatttattgtacccctacgtgccaggcattgggtactcagaagagaacacatatagaaagtcatgtccacatggagcttacattctagtggaaggaaacagactagcaacaaggacttaaataaataagcagataattccagaacctgataaatgcaataaagataataaaacagtgatatgagagtgattagggagaggcactaatttagacagagggacaggaaaagcatctttgggatggtgacatttcagctgaggtttgaagagaagggggcgggtgtggtggctcacacctgtaatcctagcactttaggaggccgaagtgggtggattgcttgagcccaggagttcaagaccagtctgggcaacatagtgagagtttgtttctacaaataaaaaaaaattagccagatatggtggctcatgcctgtggtcc

SEQ ID NO: 446244 - DNA, 766 bp, Homo sapiens
tttggtagagacagggttttaccatgctgcccaggctggtctcgaattcctgagcgcaggcgatccgcccaggagtcaagaccagccttggcaacatagcaagaccccatctcttggcatttaatatgtactagctcatttaactcattcagcaattaaactactgagtgcctactatgttaagcagtagggaacaatgaaaaaatattgtctttgccttcaaacagttcaaagaagcatcataacaggaatttttaaaaagagagaaagctagcatttattgtacccctacgtgccaggcattgggtactcagaagagaacacatatagaaagtcatgtccacatggagcttacattctagtggaaggaaacagactagcaacaaggacttaaataaataagcagataattccagaacctgataaatgcaataaagataataaaacagtgatatgagagtgattagggagaggcactaatttagacagagggacaggaaaagcatctttgggatggtgacatttcagctgaggtttgaagagagcattgtagacagatggaagagtaagtgcaaagttcctgttagaaacaagttttagggggcgggtgtggtggctcacacctgtaatcctagcactttaggaggccgaagtgggtggattgcttgagcccaggagttcaagaccagtctgggcaacatagtgagagtttgtttctacaaataaaaaaaaattagccagatatggtggctcatgcctgtggtcc

SEQ ID NO: 446245 - DNA, 1515 bp, Homo sapiens
tttggtagagacagggttttaccatgctgcccaggctggtctcgaattcctgagcgcaggcgatccgcccacctcagtctcccaaagtgctgggattataagtatgaatcaccgcgtctggcctccctgccatttttactatagcaggaaccagggctggaggcagtctcccagactcctgccctggtcacctcatcagcctccctgagactcagctccactcagggcagcgaggaagacaagcaaacccatggaaccagttagagagggccagaggaacagatcaccctagagatctaccagtcagattccagttactttcttgtcaaggttcccaggatcccagacttccaaccaaacctactgggaatccagccagtctaggagtttcccaggagccagagggacaggatgcacttcctttctaaagattccagcctccagagcagcctgtgccagtgtttattttgagcaccaccgagagtctggcttcaggaaggaaagtaaaagcagcttcaggagagaatgcagtaagccagggtcgggggtgccggccagtgttcttggtgcaggttacctgggcttcggctggggcttcctgaccttcccctttcttggcaccagccttgtcccaagttctgaaattgtcaccatttttcagggaagaacagctataggatggctgttttcctttctttttcctgagagggagcccagccctactctcctcttccctcccaataagaatgggagaagaaaggactagaaaagatcagaggataaatctaaaaacaatgaggtgagatgtgtgctgccacctgcctgtactcctggctactcagtaggccgaggtgggaggatctcttgaggcccaggagtcaagaccagccttggcaacatagcaagaccccatctcttggcatttaatatgtactagctcatttaactcattcagcaattaaactactgagtgcctactatgttaagcagtagggaacaatgaataaaaagagagaaagctagcatttattgtacccctacgtgccaggcattgggtactcagaagagaacacatatagaaagtcatgtccacatggagcttacattctagtggaaggaaacagactagcaacaaggacttaaataaataagcagataattccagaacctgataaatgcaataaagataataaaacagtgatatgagagtgattagggagaggcactaatttagacagagggacaggaaaagcatctttgggatggtgacatttcagctgaggtttgaagagagcattgtagacagatggaagagtaagtgcaaagttcctgttagaaacaagttttagggggcgggtgtggtggctcacacctgtaatcctagcactttaggaggccgaagtgggtggattgcttgagcccaggagttcaagaccagtctgggcaacatagtgagagtttgtttctacaaataaaaaaaaattagccagatatggtggctcatgcctgtggtcc

SEQ ID NO: 446246 - DNA, 798 bp, Homo sapiens
tgacacaagaccaaattaggaatggttgccatgatccagattcttttatggaactcctacagatgcgttttggaatcaggtttttaaagtcccttttatagcaaataaataggaggttttgagggctgtttatgagcgcattccattgcagtgtctttcagcggagccagagctcagccaatcctaattaagaagcaatttcagctgcagtcattgcttattataataattgtgacatttttatagccctacattgtctttctcaaagtaacggattcaggaggagtccttttctgagtagagtccacagaagaggtattctattggtaagcatttcaaatgacttccttcatacagtagtataaaaataatttgatagcagtccgtttgaaaaatgtttataaggaaccagcttaaactgatcagatggaatatattttcatcagtcgcttacctgaaataagtacaaaccttttttattttttaaaaggggggcctaaatttcgctcctaataatattgtaaggttacatattaagtttcaaatagataagtagtactgtgagggaaggaactgctaactgtaaatactacctaatttgaatcaagtaattttggctcctgatgtcacatggaggtactgaaatttattttcttttacttaattccatctccaggtggatttatataatggaatttaaaagtttatgtaaatcttttccaatttttattctgtgttctttaaggatgactgtggcataatataaacattgcgaaaattttctcccaagtatatttg

SEQ ID NO: 446247 - DNA, 2773 bp, Homo sapiens
ccggccccctttgttcccgggtccgggccgcaggcccgctgcggcggactgggcggcggaagttcgacggcgccgggcgagtggctgttgagcggcgccgcgggagttccgcaggtttcccgtgttcgcagcggagccggaggccagctgaacccggccgtgggatcccggataggaggaggaggggacccataggacgcgttaacatggacctggaaaacaaagtgaagaagatgggcttaggtcacgagcaaggatttggagccccttgtttaaaatgcaaagaaaaatgtgaaggattcgaactgcacttctggagaaaaatatgtcgtaactgcaagtgtggccaagaagagcatgatgtcctcttgagcaatgaagaggatcgaaaagtgggaaaactttttgaagacaccaagtataccactctgattgcaaaactaaagtcagatggaattcccatgtataaacgcaatgttatgatattgacgaatccagttgctgccaagaagaatgtctccatcaatacagttacctatgagtgggctcctcctgtccagaatcaagcattggccaggcagtacatgcagatgctacccaaggaaaagcagccagtagcaggctcagagggggcacagtaccggaagaagcagctggcaaagcagctccctgcacatgaccaggacccttcaaagtgccatgagttgtctcccagagaggtgaaggagatggagcagtttgtgaagaaatataagagcgaagctctgggagtaggagatgtcaaacttccctgtgagatggatgcccaaggccccaaacaaatgaacattcctggaggggatagaagcaccccagcagcagtgggggccatggaggacaaatctgctgagcacaaaagaactcaatattcctgctattgctgcaaactgagtatgaaagaaggtgacccagccatctatgccgaaagggctggctatgataaactgtggcacccagcttgttttgtctgcagcacctgccatgaactcctggttgacatgatttatttttggaagaatgagaagctatactgtggcagacattactgtgacagcgagaaaccccgatgtgctggctgtgacgagctgatattcagcaatgagtatacccaggcagaaaaccagaattggcacctgaaacacttctgctgctttgactgtgatagcattctagctggggagatatacgtgatggtcaatgacaagcccgtgtgcaagccctgctatgtgaagaatcacgctgtggtgtgtcaaggatgccacaatgccatcgacccagaagtgcagcgggtgacctataacaatttcagctggcatgcatccacagagtgctttctgtgctcttgctgcagcaaatgcctcattgggcagaagttcatgccagtagaagggatggttttctgttcagtggaatgtaagaagaggatgtcttaggaggagggcacccagaagtatcgagccatagctatccaaagtggtctgcatttctactgtaaaatgcaatttgaaaaaaataaaacgcaaaaaaagaaactgtaaaggaaaccaagagattttgtttaatttttttggccattttttcttcatcaattttttttcggtctcaacttttaaacttggtttaagcatttgatttgtaaaacagtaaataattgtatctttccatagcttttcaaatgtgaaatcatttgttggaagcttggatctcattaaacttcatgtctctattccatttgtgccacacacttaaaagttagtgtactgaatggaaagatgagcattcctagttctacacttcttttttccccctcatgtgtaaaatgaaaagaaaactaaatttgccctaataccaaggcgctacgtttattgcctcgtcttattcactgacctttgtaatgatacacagtgaattctttttgacaaagagaaatgcagtgtagtatgcagagctgctgttttaatgcctatgcatttactctttcctgatttaggcagaggtggcattttctttattgcatttctctatttttttaatgtaccctaccttcagtattctctttgtaagttggtgacttgcatctgtggccttgaatattttattatcacatgtggcataacagtatccacactttttagttctttattttttttttttattttgagcaattctcctgcctcagcctcccaaatagctgggattacaggtgcatgccaccacacccagctaatttttgtatttttagtagagacaggttttcaccatgttagccaggctggtctcaaactcctgacctcagatgatccgcctgccttggcctcccaaagtgctgggattacaggtgtgggagccaccatgcctgacccacacactttttacttgtatagatgatttttggcttggacataaaagccaagccacccatttgcttttaatccaaagaacatgtatagtttttgtacccagagactatgatttatattgattgcacttgcctgccatgatttagataagattttttttgcatggtttttattctttcctaatggatcctgttttataatacttccaagcctgtccatggatatatcaaatgtcttcacttgtatattttcatggctaggtatttctaatgtttattcttccctgtgtacttctacacatagctatgcactatgaaaattaaatggaatgaatgatatgtatattactcaaaataaagtttctttcactttaa

SEQ ID NO: 446248 - DNA, 2866 bp, Homo sapiens
tgacacaagaccaaattaggaatggttgccatgatccagattcttttatggaactcctacagatgcgttttggaatcaggtttttaaagtcccttttatagcaaataaataggaggttttgagggctgtttatgagcgcattccattgcagtgtctttcagcggagccagagctcagccaatcctaattaagaagcaatttcagctgcagtcattgcttattataataattgtgacatttttatagccctacattgtctttctcaaagtaacggattcaggaggagtccttttctgagtagagtccacagaagaggtattctattgatgggcttaggtcacgagcaaggatttggagccccttgtttaaaatgcaaagaaaaatgtgaaggattcgaactgcacttctggagaaaaatatgtcgtaactgcaagtgtggccaagaagagcatgatgtcctcttgagcaatgaagaggatcgaaaagtgggaaaactttttgaagacaccaagtataccactctgattgcaaaactaaagtcagatggaattcccatgtataaacgcaatgttatgatattgacgaatccagttgctgccaagaagaatgtctccatcaatacagttacctatgagtgggctcctcctgtccagaatcaagcattggccaggcagtacatgcagatgctacccaaggaaaagcagccagtagcaggctcagagggggcacagtaccggaagaagcagctggcaaagcagctccctgcacatgaccaggacccttcaaagtgccatgagttgtctcccagagaggtgaaggagatggagcagtttgtgaagaaatataagagcgaagctctgggagtaggagatgtcaaacttccctgtgagatggatgcccaaggccccaaacaaatgaacattcctggaggggatagaagcaccccagcagcagtgggggccatggaggacaaatctgctgagcacaaaagaactcaatattcctgctattgctgcaaactgagtatgaaagaaggtgacccagccatctatgccgaaagggctggctatgataaactgtggcacccagcttgttttgtctgcagcacctgccatgaactcctggttgacatgatttatttttggaagaatgagaagctatactgtggcagacattactgtgacagcgagaaaccccgatgtgctggctgtgacgagctgatattcagcaatgagtatacccaggcagaaaaccagaattggcacctgaaacacttctgctgctttgactgtgatagcattctagctggggagatatacgtgatggtcaatgacaagcccgtgtgcaagccctgctatgtgaagaatcacgctgtggtgtgtcaaggatgccacaatgccatcgacccagaagtgcagcgggtgacctataacaatttcagctggcatgcatccacagagtgctttctgtgctcttgctgcagcaaatgcctcattgggcagaagttcatgccagtagaagggatggttttctgttcagtggaatgtaagaagaggatgtcttaggaggagggcacccagaagtatcgagccatagctatccaaagtggtctgcatttctactgtaaaatgcaatttgaaaaaaataaaacgcaaaaaaagaaactgtaaaggaaaccaagagattttgtttaatttttttggccattttttcttcatcaattttttttcggtctcaacttttaaacttggtttaagcatttgatttgtaaaacagtaaataattgtatctttccatagcttttcaaatgtgaaatcatttgttggaagcttggatctcattaaacttcatgtctctattccatttgtgccacacacttaaaagttagtgtactgaatggaaagatgagcattcctagttctacacttcttttttccccctcatgtgtaaaatgaaaagaaaactaaatttgccctaataccaaggcgctacgtttattgcctcgtcttattcactgacctttgtaatgatacacagtgaattctttttgacaaagagaaatgcagtgtagtatgcagagctgctgttttaatgcctatgcatttactctttcctgatttaggcagaggtggcattttctttattgcatttctctatttttttaatgtaccctaccttcagtattctctttgtaagttggtgacttgcatctgtggccttgaatattttattatcacatgtggcataacagtatccacactttttagttctttattttttttttttattttgagcaattctcctgcctcagcctcccaaatagctgggattacaggtgcatgccaccacacccagctaatttttgtatttttagtagagacaggttttcaccatgttagccaggctggtctcaaactcctgacctcagatgatccgcctgccttggcctcccaaagtgctgggattacaggtgtgggagccaccatgcctgacccacacactttttacttgtatagatgatttttggcttggacataaaagccaagccacccatttgcttttaatccaaagaacatgtatagtttttgtacccagagactatgatttatattgattgcacttgcctgccatgatttagataagattttttttgcatggtttttattctttcctaatggatcctgttttataatacttccaagcctgtccatggatatatcaaatgtcttcacttgtatattttcatggctaggtatttctaatgtttattcttccctgtgtacttctacacatagctatgcactatgaaaattaaatggaatgaatgatatgtatattactcaaaataaagtttctttcactttaa

SEQ ID NO: 446249 - DNA, 2824 bp, Homo sapiens
ccggccccctttgttcccgggtccgggccgcaggcccgctgcggcggactgggcggcggaagttcgacggcgccgggcgagtggctgttgagcggcgccgcgggagttccgcaggtttcccgtgttcgcagcggagccggaggccagctgaacccggccgtgggatcccggataggaggaggaggggacccataggacgcgttaacatggacctggaaaacaaagtgaagaagatgggcttaggtcacgagcaaggatttggagccccttgtttaaaatgcaaagaaaaatgtgaaggattcgaactgcacttctggagaaaaatatgtcgtaactgcaagtgtggccaagaagagcatgatgtcctcttgagcaatgaagaggatcgaaaagtgggaaaactttttgaagacaccaagtataccactctgattgcaaaactaaagtcagatggaattcccatgtataaacgcaatgttatgatattgacgaatccagttgctgccaagaagaatgtctccatcaatacagttacctatgagtgggctcctcctgtccagaatcaagcattggccaggcagtacatgcagatgctacccaaggaaaagcagccagtagcaggctcagagggggcacagtaccggaagaagcagctggcaaagcagctccctgcacatgaccaggacccttcaaagtgccatgagttgtctcccagagaggtgaaggagatggagcagtttgtgaagaaatataagagcgaagctctgggagtaggagatgtcaaacttccctgtgagatggatgcccaaggccccaaacaaatgaacattcctggaggggatagaagcaccccagcagcagtgggggccatggaggacaaatctgctgagcacaaaagaactcaatattcctgctattgctgcaaactgagtatgaaagaaggtgacccagccatctatgccgaaagggctggctatgataaactgtggcacccagcttgttttgtctgcagcacctgccatgaactcctggttgacatgatttatttttggaagaatgagaagctatactgtggcagacattactgtgacagcgagaaaccccgatgtgctggctgtgacgagctgatattcagcaatgagtatacccaggcagaaaaccagaattggcacctgaaacacttctgctgctttgactgtgatagcattctagctggggagatatacgtgatggtcaatgacaagcccgtgtgcaagccctgctatgtgaagaatcacgctgtggtgtgtcaaggatgccacaatgccatcgacccagaagtgcagcgggtgacctataacaatttcagctggcatgcatccacagagtgctttctgtgctcttgctgcagcaaatgcctcattgggcagaagttcatgccagtagaagggatggttttctgttcagtggaatgtaagaagaggatgtcttaggaggagggcacccagaagtatcgagccatagctatccaaagtggtctgcatttctactgtaaaatgcaatttgaaaaaaataaaacgcaaaaaaagaaactgtaaaggaaaccaagagattttgtttaatttttttggccattttttcttcatcaattttttttcggtctcaacttttaaacttggtttaagcatttgatttgtaaaacagtaaataattgtatctttccatagcttttcaaatgtgaaatcatttgttggaagcttggatctcattaaacttcatgtctctattccatttgtgccacacacttaaaagttagtgtactgaatggaaagatgagcattcctagttctacacttcttttttccccctcatgtgtaaaatgaaaagaaaactaaatttgccctaataccaaggcgctacgtttattgcctcgtcttattcactgacctttgtaatgatacacagtgaattctttttgacaaagagaaatgcagtgtagtatgcagagctgctgttttaatgcctatgcatttactctttcctgatttaggcagaggtggcattttctttattgcatttctctatttttttaatgtaccctaccttcagtattctctttgtaagttggtgacttgcatctgtggccttgaatattttattatcacatgtggcataacagtatccacactttttagttctttattttttttttttattttgagcaattctcctgcctcagcctcccaaatagctgggattacaggtgcatgccaccacacccagctaatttttgtatttttagtagagacaggttttcaccatgttagccaggctggtctcaaactcctgacctcagatgatccgcctgccttggcctcccaaagtgctgggattacaggtgtgggagccaccatgcctgacccacacactttttacttgtatagatgatttttggcttggacataaaagccaagccacccatttgcttttaatccaaagaacatgtatagtttttgtacccagagactatgatttatattgattgcacttgcctgccatgatttagataagattttttttgcatggtttttattctttcctaatggatcctgttttataatacttccaagcctgtccatggatatatcaaatgtcttcacttgtatattttcatggctaggtatttctaatgtttattcttccctgtgtacttctacacatagctatgcactatgaaaattaaatggaatgaatgatatgtatattactcaaaataaagtttctttcactttaatttcatagtcatagctatgtgtagaaattgacgggatcctctagaccgcct

SEQ ID NO: 446250 - DNA, 2216 bp, Homo sapiens
ccggccccctttgttcccgggtccgggccgcaggcccgctgcggcggactgggcggcggaagttcgacggcgccgggcgagtggctgttgagcggcgccgcgggagttccgcaggtttcccgtgttcgcagcggagccggaggccagctgaacccggccgtgggatcccggataggaggaggaggggacccataggacgcgttaacatggacctggaaaacaaagtgaagaagatgggcttaggtcacgagcaaggatttggagccccttgtttaaaatgcaaagaaaaatgtgaaggattcgaactgcacttctggagaaaaatatgtcgtaactgcaagtgtggccaagaagagcatgatgtcctcttgagcaatgaagaggatcgaaaagtgggaaaactttttgaagacaccaagtataccactctgattgcaaaactaaagtcagatggaattcccatgtataaacgcaatgttatgatattgacgaatccagttgctgccaagaagaatgtctccatcaatacagttacctatgagtgggctcctcctgtccagaatcaagcattggccaggcagtacatgcagatgctacccaaggaaaagcagccagtagcaggctcagagggggcacagtaccggaagaagcagctggcaaagcagctccctgcacatgaccaggacccttcaaagtgccatgagttgtctcccagagaggtgaaggagatggagcagtttgtgaagaaatataagagcgaagctctgggagtaggagatgtcaaacttccctgtgagatggatgcccaaggccccaaacaaatgaacattcctggaggggatagaagcaccccagcagcagtgggggccatggaggacaaatctgctgagcacaaaagaactcaatattcctgctattgctgcaaactgagtatgaaagaaggtgacccagccatctatgccgaaagggctggctatgataaactgtggcacccagcttgttttgtctgcagcacctgccatgaactcctggttgacatgatttatttttggaagaatgagaagctatactgtggcagacattactgtgacagcgagaaaccccgatgtgctggctgtgacgagctgatattcagcaatgagtatacccaggcagaaaaccagaattggcacctgaaacacttctgctgctttgactgtgatagcattctagctggggagatatacgtgatggtcaatgacaagcccgtgtgcaagccctgctatgtgaagaatcacgctgtggtgtgtcaaggatgccacaatgccatcgacccagaagtgcagcgggtgacctataacaatttcagctggcatgcatccacagagtgctttctgtgctcttgctgcagcaaatgcctcattgggcagaagttcatgccagtagaagggatggttttctgttcagtggaatgtaagaagaggatgtcttaggaggagggcacccagaagtatcgagccatagctatccaaagtggtctgcatttctactgtaaaatgcaatttgaaaaaaataaaacgcaaaaaaagaaactgtaaaggaaaccaagagattttgtttaatttttttggccattttttcttcatcaattttttttcggtctcaacttttaaacttggtttaagcatttgatttgtaaaacagtaaataattgtatctttccatagcttttcaaatgtgaaatcatttgttggaagcttggatctcattaaacttcatgtctctattccatttgtgccacacacttaaaagttagtgtactgaatggaaagatgagcattcctagttctacacttcttttttccccctcatgtgtaaaatgaaaagaaaactaaatttgccctaataccaaggcgctacgtttattgcctcgtcttattcactgacctttgtaatgatacacagtgaattctttttgacaaagagaaatgcagtgtagtatgcagagctgctgttttaatgcctatgcatttactctttcctgatttaggcagaggtggcattttctttattgcatttctctatttttttaatgtaccctaccttcagtattctctttgtaagttggtgacttgcatctgtggccttgaatattttattatcacatgtggcataacagtatcccgcagatctccgctttggaaagggatcctctagatcacagcagcatcactgcc

SEQ ID NO: 446251 - DNA, 2534 bp, Homo sapiens
ccgggtgcctgactgcaccccgcgtgatttactatgcatcaaaatgatgtcaatgattccgatactgcacttctgtcagaaaaatatgtcgtgacttgggaaagaccctgcgaagagcatgatgtcctcttgagcaatgaagaggatcgaaaagtgggaaaactttttgaagacaccaagtataccactctgattgcaaaactaaagtcagatggaattcccatgtataaacgcaatgttatgatattgacgaatccagttgctgccaagaagaatgtctccatcaatacagttacctatgagtgggctcctcctgtccagaatcaagcattggccaggcagtacatgcagatgctacccaaggaaaagcagccagtagcaggctcagagggggcacagtaccggaagaagcagctggcaaagcagctccctgcacatgaccaggacccttcaaagtgccatgagttgtctcccagagaggtgaaggagatggagcagtttgtgaagaaatataagagcgaagctctgggagtaggagatgtcaaacttccctgtgagatggatgcccaaggccccaaacaaatgaacattcctggaggggatagaagcaccccagcagcagtgggggccatggaggacaaatctgctgagcacaaaagaactcaatattcctgctattgctgcaaactgagtatgaaagaaggtgacccagccatctatgccgaaagggctggctatgataaactgtggcacccagcttgttttgtctgcagcacctgccatgaactcctggttgacatgatttatttttggaagaatgagaagctatactgtggcagacattactgtgacagcgagaaaccccgatgtgctggctgtgacgagctgatattcagcaatgagtatacccaggcagaaaaccagaattggcacctgaaacacttctgctgctttgactgtgatagcattctagctggggagatatacgtgatggtcaatgacaagcccgtgtgcaagccctgctatgtgaagaatcacgctgtggtgtgtcaaggatgccacaatgccatcgacccagaagtgcagcgggtgacctataacaatttcagctggcatgcatccacagagtgctttctgtgctcttgctgcagcaaatgcctcattgggcagaagttcatgccagtagaagggatggttttctgttcagtggaatgtaagaagaggatgtcttaggaggagggcacccagaagtatcgagccatagctatccaaagtggtctgcatttctactgtaaaatgcaatttgaaaaaaataaaacgcaaaaaaagaaactgtaaaggaaaccaagagattttgtttaatttttttggccattttttcttcatcaattttttttcggtctcaacttttaaacttggtttaagcatttgatttgtaaaacagtaaataattgtatctttccatagcttttcaaatgtgaaatcatttgttggaagcttggatctcattaaacttcatgtctctattccatttgtgccacacacttaaaagttagtgtactgaatggaaagatgagcattcctagttctacacttcttttttccccctcatgtgtaaaatgaaaagaaaactaaatttgccctaataccaaggcgctacgtttattgcctcgtcttattcactgacctttgtaatgatacacagtgaattctttttgacaaagagaaatgcagtgtagtatgcagagctgctgttttaatgcctatgcatttactctttcctgatttaggcagaggtggcattttctttattgcatttctctatttttttaatgtaccctaccttcagtattctctttgtaagttggtgacttgcatctgtggccttgaatattttattatcacatgtggcataacagtatccacactttttagttctttattttttttttttattttgagcaattctcctgcctcagcctcccaaatagctgggattacaggtgcatgccaccacacccagctaatttttgtatttttagtagagacaggttttcaccatgttagccaggctggtctcaaactcctgacctcagatgatccgcctgccttggcctcccaaagtgctgggattacaggtgtgggagccaccatgcctgacccacacactttttacttgtatagatgatttttggcttggacataaaagccaagccacccatttgcttttaatccaaagaacatgtatagtttttgtacccagagactatgatttatattgattgcacttgcctgccatgatttagataagattttttttgcatggtttttattctttcctaatggatcctgttttataatacttccaagcctgtccatggatatatcaaatgtcttcacttgtatattttcatggctaggtatttctaatgtttattcttccctgtgtacttctacacatagctatgcactatgaaaattaaatggaatgaatgatatgtatattactcaaaataaagtttctttcactttaa

SEQ ID NO: 446252 - DNA, 1618 bp, Homo sapiens
  misc_feature (1561)..(1561): n is a, c, g, or t
  misc_feature (1580)..(1581): n is a, c, g, or t
  misc_feature (1588)..(1588): n is a, c, g, or t
ccggccccctttgttcccgggtccgggccgcaggcccgctgcggcggactgggcggcggaagttcgacggcgccgggcgagtggctgttgagcggcgccgcgggagttccgcaggtttcccgtgttcgcagcggagccggaggccagctgaacccggccgtgggatcccggataggaggaggaggggacccataggacgcgttaacatggacctggaaaacaaagtgaagaagatgggcttaggtcacgagcaaggatttggagccccttgtttaaaatgcaaagaaaaatgtgaaggattcgaactgcacttctggagaaaaatatgtcgtaactgcaagtgtggccaagaagagcatgatgtcctcttgagcaatgaagaggatcgaaaagtgggaaaactttttgaagacaccaagtataccactctgattgcaaaactaaagtcagatggaattcccatgtataaacgcaatgttatgatattgacgaatccagttgctgccaagaagaatgtctccatcaatacagttacctatgagtgggctcctcctgtccagaatcaagcattggccaggcagtacatgcagatgctacccaaggaaaagcagccagtagcaggctcagagggggcacagtaccggaagaagcagctggcaaagcagctccctgcacatgaccaggacccttcaaagtgccatgagttgtctcccagagaggtgaaggagatggagcagtttgtgaagaaatataagagcgaagctctgggagtaggagatgtcaaacttccctgtgagatggatgcccaaggccccaaacaaatgaacattcctggaggggatagaagcaccccagcagcagtgggggccatggaggacaaatctgctgagcacaaaagaactcaatattcctgctattgctgcaaactgagtatgaaagaaggtgacccagccatctatgccgaaagggctggctatgataaactgtggcacccagcttgttttgtctgcagcacctgccatgaactcctggttgacatgatttatttttggaagaatgagaagctatactgtggcagacattactgtgacagcgagaaaccccgatgtgctggctgtgacgagctgatattcagcaatgagtatacccaggcagaaaaccagaattggcacctgaaacacttctgctgctttgactgtgatagcattctagctggggagatatacgtgatggtcaatgacaagcccgtgtgcaagccctgctatgtgaagaatcacgctgtggtgtgtcaaggatgccacaatgccatcgacccagaagtgcagcgggtgacctataacaatttcagctggcatgcatccacagagtgctttctgtgctcttgctgcagcaaatgcctcattgggcagaagttcatgccagtagaagggatggttttctgttcagtggaatgtaagaagaggatgtcttaggaggagggcacccagaagtatcgagccatagctatccaaagtggtctgcatttctactgtaaaatgcaatttgaaaaaaataaaacgtncgttcccccccagggtcgnnttttttncttacctaacgagatcttcattcaccggca

SEQ ID NO: 446253 - DNA, 1544 bp, Homo sapiens
ccggccccctttgttcccgggtccgggccgcaggcccgctgcggcggactgggcggcggaagttcgacggcgccgggcgagtggctgttgagcggcgccgcgggagttccgcaggtttcccgtgttcgcagcggagccggaggccagctgaacccggccgtgggatcccggataggaggaggaggggacccataggacgcgttaacatggacctggaaaacaaagtgaagaagatgggcttaggtcacgagcaaggatttggagccccttgtttaaaatgcaaagaaaaatgtgaaggattcgaactgcacttctggagaaaaatatgtcgtaactgcaagtgtggccaagaagagcatgatgtcctcttgagcaatgaagaggatcgaaaagtgggaaaactttttgaagacaccaagtataccactctgattgcaaaactaaagtcagatggaattcccatgtataaacgcaatgttatgatattgacgaatccagttgctgccaagaagaatgtctccatcaatacagttacctatgagtgggctcctcctgtccagaatcaagcattggccaggcagtacatgcagatgctacccaaggaaaagcagccagtagcaggctcagagggggcacagtaccggaagaagcagctggcaaagcagctccctgcacatgaccaggacccttcaaagtgccatgagttgtctcccagagaggtgaaggagatggagcagtttgtgaagaaatataagagcgaagctctgggagtaggagatgtcaaacttccctgtgagatggatgcccaaggccccaaacaaatgaacattcctggaggggatagaagcaccccagcagcagtgggggccatggaggacaaatctgctgagcacaaaagaactcaatattcctgctattgctgcaaactgagtatgaaagaaggtgacccagccatctatgccgaaagggctggctatgataaactgtggcacccagcttgttttgtctgcagcacctgccatgaactcctggttgacatgatttatttttggaagaatgagaagctatactgtggcagacattactgtgacagcgagaaaccccgatgtgctggctgtgacgagctgatattcagcaatgagtatacccaggcagaaaaccagaattggcacctgaaacacttctgctgctttgactgtgatagcattctagctggggagatatacgtgatggtcaatgacaagcccgtgtgcaagccctgctatgtgaagaatcacgctgtggtgagaagtgttctaaggatatggttgcctcagcctgctttaggacttgagtttatgcttttcttaaagcctcttacaaatgggaaacagaaagcagtcctcctaagtagaaagcaaattattcctaccacagggtgttaaaatcaaggcaattcaaaaacaatacatgcattgactatgagccacctcaagatttctacttgtgaaatttacaatatcaattataggtactgcttaataataaaatcctcacttaaaaaa

SEQ ID NO: 446254 - DNA, 2268 bp, Homo sapiens
  misc_feature (2268)..(2268): n is a, c, g, or t
tagctgatcgattgagccgtcccgtcatttcacaccagggtccagatcagcgcatcagttcacctggaatttataagaaatgaaattctcaggtaccaccccagagttaatggaataagaaactttgaagtgggtctaataatctgtattttatcaagctctccatgttattttaatacatattacagtttgagaaccactaatttatacctttgctattcaaagtgtgctccatggaccggcagcattgacattatctgggagctcattagaaaatgcaggatctctgcagacaacaggaaaggaaacaaaaaaagaaactgtaaaggaaaccaagagattttgtttaatttttttggccattttttcttcatcaattttttttcggtctcaacttttaaacttggtttaagcatttgatttgtaaaacagtaaataattgtatctttccatagcttttcaaatgtgaaatcatttgttggaagcttggatctcattaaacttcatgtctctattccatttgtgccacacacttaaaagttagtgtactgaatggaaagatgagcattcctagttctacacttcttttttccccctcatgtgtaaaatgaaaagaaaactaaatttgccctaataccaaggcgctacgtttattgcctcgtcttattcactgacctttgtaatgatacacagtgaattctttttgacaaagagaaatgcagtgtagtatgcagagctgctgttttaatgcctatgcatttactctttcctgatttaggcagaggtggcattttctttattgcatttctctatttttttaatgtaccctaccttcagtattctctttgtaagttggtgacttgcatctgtggccttgaatattttattatcacatgtggcataacagtatccacactttttagttctttattttttttttttattttgagcaattctcctgcctcagcctcccaaatagctgggattacaggtgcatgccaccacacccagctaatttttgtatttttagtagagacaggttttcaccatgttagccaggctggtctcaaactcctgacctcagatgatccgcctgccttggcctcccaaagtgctgggattacaggtgtgggagccaccatgcctgacccacacactttttacttgtatagatgatttttggcttggacataaaagccaagccacccatttgcttttaatccaaagaacatgtatagtttttgtacccagagactatgatttatattgattgcacttgcctgccatgatttagataagattttttttgcatggtttttattctttcctaatggatcctgttttataatacttccaagcctgtccatggatatatcaaatgtcttcacttgtatattttcatggctaggtatttctaatgtttattcttccctgtgtacttctacacatagctatgcactatgaaaattaaatggaatgaatgatatgtatattactcaaaataaagtttctttcactttaaaaaaaaaaaaaaaagggcgccgttcgcgaggctatttacaattacgcaaaggccccaaggttgtaggcccctaagggctactacaacccttcggtgacgccataaaactcttcaccaaagagcccctaaaacccggcaaatctaccatgaccctttaatttaccggccggaacttagcttctcaccatacggtcttctactattgaaccccccttacctatattccgaaccctggtcaacctcaagctagaggcccctaatatattctcagcccacccttatacgtacgccgggataaatcagcgtctgataacgagagagaattaaaagtgacaataaagccatatatgcgcccatgagagatatcgcacaaaaccctcattaaggagacccccgagacattcttatatactcaaccataaataaagagagcgcctaaaatatctccgcccatttatataacagaaaaaccagtcttatatttacacaccaaagagaaaacgtgccagaatcataagtaattcacccacaagagaagaaaacagccgcgcctctctgatgggcgcgcgatataatcataacgattaatcaacgcagcggcggttatataaagaacgaaagatgaataataccacgccaaagatagagcacctaacgcatggaagagacacagatcaacatcggcagaataatatttataaaataatgtgtagattataacaatatgtatatgtattaaataagcn

SEQ ID NO: 446255 - DNA, 1014 bp, Homo sapiens
ccggccccctttgttcccgggtccgggccgcaggcccgctgcggcggactgggcggcggaagttcgacggcgccgggcgagtggctgttgagcggcgccgcgggagttccgcaggtttcccgtgttcgcagcggagccggaggccagctgaacccggccgtgggatcccggataggaggaggaggggacccataggacgcgttaacatggacctggaaaacaaagtgaagaaggtaggggggcgctcgtgtcgggcggcggctgcttcacctgcgcgggtcgcgcggcgcgcggcggccggaggtgccgagtgggtggggctcgcgggccccccggtgtgagcccggctctgggtctgcggtgccccgggcccagggacctggccccctgggtagaggaggtgctcggcggccccgccagctccccacactcgggagcgacagaattggaagcgcgagcgagggcgggcgcgggactcttctctccagtctcacggaatcccagtggttgtaggtgttggaaactttacttaagatgtttcagctctgcctgtgcctcctcaaaaggaaaggacgagcttagggcgagtgcgggcgagaccgtgacacttcctggctcaggaagttgaatttcattaagcctttgtggtttggggctctgctgtgctttgacagctctgatctcctcccttccggctgggctgtctggggcgctctaaaatgagtgttgatttaatgcactgccttcgcacccgtgctggtgataacttctaatgtgatttttttttcggtcattcattacttgtctaccgaccgaggcagtgcctccctcttagggaattatctgtcaaagagcgcattctccttgtttggcaggtagtcccaaagggcggttgtcaccagcgtctcagcgcagggagacattttcagcttggctgctgcctcgcaggcactggaaccgacggccctacctgagccactcccgggttatgcggagcctggtgtcgcctgggag

SEQ ID NO: 446256 - DNA, 412 bp, Homo sapiens
agagactatgatttatattgattgcacttgcctgccatgatttagataagattttttttgcatggtttttattctttcctaatggatcctgttttataatacttccaagcctgtccatggatatatcaaatgtcttcacttgtatattttcatggctaggtatttctaatgtttattcttccctgtgtacttctacacatagctatgcactatgaaaattaaatggaatgaatgatatgtatattactcaaaataaagtttctttcactttaataatcattgtatctttttattcatatccttttttgagtgaaaaatgcttctgcaactaagcatgtgttacagcagggggcgatgtctccaaggataaaaattacccaaacgaaaataaaagtctgcctctgacaggaca

SEQ ID NO: 446257 - DNA, 3519 bp, Homo sapiens
  misc_feature (3519)..(3519): n is a, c, g, or t
ccggccccctttgttcccgggtccgggccgcaggcccgctgcggcggactgggcggcggaagttcgacggcgccgggcgagtggctgttgagcggcgccgcgggagttccgcaggtttcccgtgttcgcagcggagccggaggccagctgaacccggccgtgggatcccggataggaggaggaggggacccataggacgcgttaacatggacctggaaaacaaagtgaagaagatgggcttaggtcacgagcaaggatttggagccccttgtttaaaatgcaaagaaaaatgtgaaggattcgaactgcacttctggagaaaaatatgtcgtaactgcaagtgtggccaagaagagcatgatgtcctcttgagcaatgaagaggatcgaaaagtgggaaaactttttgaagacaccaagtataccactctgattgcaaaactaaagtcagatggaattcccatgtataaacgcaatgttatgatattgacgaatccagttgctgccaagaagaatgtctccatcaatacagttacctatgagtgggctcctcctgtccagaatcaagcattggccaggcagtacatgcagatgctacccaaggaaaagcagccagtagcaggctcagagggggcacagtaccggaagaagcagctggcaaagcagctccctgcacatgaccaggacccttcaaagtgccatgagttgtctcccagagaggtgaaggagatggagcagtttgtgaagaaatataagagcgaagctctgggagtaggagatgtcaaacttccctgtgagatggatgcccaaggccccaaacaaatgaacattcctggaggggatagaagcaccccagcagcagtgggggccatggaggacaaatctgctgagcacaaaagaactcaatattcctgctattgctgcaaactgagtatgaaagaaggtgacccagccatctatgccgaaagggctggctatgataaactgtggcacccagcttgttttgtctgcagcacctgccatgaactcctggttgacatgatttatttttggaagaatgagaagctatactgtggcagacattactgtgacagcgagaaaccccgatgtgctggctgtgacgagctgatattcagcaatgagtatacccaggcagaaaaccagaattggcacctgaaacacttctgctgctttgactgtgatagcattctagctggggagatatacgtgatggtcaatgacaagcccgtgtgcaagccctgctatgtgaagaatcacgctgtggtgtgtcaaggatgccacaatgccatcgacccagaagtgcagcgggtgacctataacaatttcagctggcatgcatccacagagtgctttctgtgctcttgctgcagcaaatgcctcattgggcagaagttcatgccagtagaagggatggttttctgttcagtggaatgtaagaagaggatgtcttaggaggagggcacccagaagtatcgagccatagctatccaaagtggtctgcatttctactgtaaaatgcaatttgaaaaaaataaaacgcaaaaaaagaaactgtaaaggaaaccaagagattttgtttaatttttttggccattttttcttcatcaattttttttcggtctcaacttttaaacttggtttaagcatttgatttgtaaaacagtaaataattgtatctttccatagcttttcaaatgtgaaatcatttgttggaagcttggatctcattaaacttcatgtctctattccatttgtgccacacacttaaaagttagtgtactgaatggaaagatgagcattcctagttctacacttcttttttccccctcatgtgtaaaatgaaaagaaaactaaatttgccctaataccaaggcgctacgtttattgcctcgtcttattcactgacctttgtaatgatacacagtgaattctttttgacaaagagaaatgcagtgtagtatgcagagctgctgttttaatgcctatgcatttactctttcctgatttaggcagaggtggcattttctttattgcatttctctatttttttaatgtaccctaccttcagtattctctttgtaagttggtgacttgcatctgtggccttgaatattttattatcacatgtggcataacagtatccacactttttagttctttattttttttttttattttgagcaattctcctgcctcagcctcccaaatagctgggattacaggtgcatgccaccacacccagctaatttttgtatttttagtagagacaggttttcaccatgttagccaggctggtctcaaactcctgacctcagatgatccgcctgccttggcctcccaaagtgctgggattacaggtgtgggagccaccatgcctgacccacacactttttacttgtatagatgatttttggcttggacataaaagccaagccacccatttgcttttaatccaaagaacatgtatagtttttgtacccagagactatgatttatattgattgcacttgcctgccatgatttagataagattttttttgcatggtttttattctttcctaatggatcctgttttataatacttccaagcctgtccatggatatatcaaatgtcttcacttgtatattttcatggctaggtatttctaatgtttattcttccctgtgtacttctacacatagctatgcactatgaaaattaaatggaatgaatgatatgtatattactcaaaataaagtttctttcactttaaaaaaaaaaaaaaaagggcgccgttcgcgaggctatttacaattacgcaaaggccccaaggttgtaggcccctaagggctactacaacccttcggtgacgccataaaactcttcaccaaagagcccctaaaacccggcaaatctaccatgaccctttaatttaccggccggaacttagcttctcaccatacggtcttctactattgaaccccccttacctatattccgaaccctggtcaacctcaagctagaggcccctaatatattctcagcccacccttatacgtacgccgggataaatcagcgtctgataacgagagagaattaaaagtgacaataaagccatatatgcgcccatgagagatatcgcacaaaaccctcattaaggagacccccgagacattcttatatactcaaccataaataaagagagcgcctaaaatatctccgcccatttatataacagaaaaaccagtcttatatttacacaccaaagagaaaacgtgccagaatcataagtaattcacccacaagagaagaaaacagccgcgcctctctgatgggcgcgcgatataatcataacgattaatcaacgcagcggcggttatataaagaacgaaagatgaataataccacgccaaagatagagcacctaacgcatggaagagacacagatcaacatcggcagaataatatttataaaataatgtgtagattataacaatatgtatatgtattaaataagcn

SEQ ID NO: 446258 - DNA, 2840 bp, Homo sapiens
  misc_feature (2770)..(2770): n is a, c, g, or t
ccggccccctttgttcccgggtccgggccgcaggcccgctgcggcggactgggcggcggaagttcgacggcgccgggcgagtggctgttgagcggcgccgcgggagttccgcaggtttcccgtgttcgcagcggagccggaggccagctgaacccggccgtgggatcccggataggaggaggaggggacccataggacgcgttaacatggacctggaaaacaaagtgaagaagatgggcttaggtcacgagcaaggatttggagccccttgtttaaaatgcaaagaaaaatgtgaaggattcgaactgcacttctggagaaaaatatgtcgtaactgcaagtgtggccaagaagagcatgatgtcctcttgagcaatgaagaggatcgaaaagtgggaaaactttttgaagacaccaagtataccactctgattgcaaaactaaagtcagatggaattcccatgtataaacgcaatgttatgatattgacgaatccagttgctgccaagaagaatgtctccatcaatacagttacctatgagtgggctcctcctgtccagaatcaagcattggccaggcagtacatgcagatgctacccaaggaaaagcagccagtagcaggctcagagggggcacagtaccggaagaagcagctggcaaagcagctccctgcacatgaccaggacccttcaaagtgccatgagttgtctcccagagaggtgaaggagatggagcagtttgtgaagaaatataagagcgaagctctgggagtaggagatgtcaaacttccctgtgagatggatgcccaaggccccaaacaaatgaacattcctggaggggatagaagcaccccagcagcagtgggggccatggaggacaaatctgctgagcacaaaagaactcaatattcctgctattgctgcaaactgagtatgaaagaaggtgacccagccatctatgccgaaagggctggctatgataaactgtggcacccagcttgttttgtctgcagcacctgccatgaactcctggttgacatgatttatttttggaagaatgagaagctatactgtggcagacattactgtgacagcgagaaaccccgatgtgctggctgtgacgagctgatattcagcaatgagtatacccaggcagaaaaccagaattggcacctgaaacacttctgctgctttgactgtgatagcattctagctggggagatatacgtgatggtcaatgacaagcccgtgtgcaagccctgctatgtgaagaatcacgctgtggtgtgtcaaggatgccacaatgccatcgacccagaagtgcagcgggtgacctataacaatttcagctggcatgcatccacagagtgctttctgtgctcttgctgcagcaaatgcctcattgggcagaagttcatgccagtagaagggatggttttctgttcagtggaatgtaagaagaggatgtcttaggaggagggcacccagaagtatcgagccatagctatccaaagtggtctgcatttctactgtaaaatgcaatttgaaaaaaataaaacgcaaaaaaagaaactgtaaaggaaaccaagagattttgtttaatttttttggccattttttcttcatcaattttttttcggtctcaacttttaaacttggtttaagcatttgatttgtaaaacagtaaataattgtatctttccatagcttttcaaatgtgaaatcatttgttggaagcttggatctcattaaacttcatgtctctattccatttgtgccacacacttaaaagttagtgtactgaatggaaagatgagcattcctagttctacacttcttttttccccctcatgtgtaaaatgaaaagaaaactaaatttgccctaataccaaggcgctacgtttattgcctcgtcttattcactgacctttgtaatgatacacagtgaattctttttgacaaagagaaatgcagtgtagtatgcagagctgctgttttaatgcctatgcatttactctttcctgatttaggcagaggtggcattttctttattgcatttctctatttttttaatgtaccctaccttcagtattctctttgtaagttggtgacttgcatctgtggccttgaatattttattatcacatgtggcataacagtatccacactttttagttctttattttttttttttattttgagcaattctcctgcctcagcctcccaaatagctgggattacaggtgcatgccaccacacccagctaatttttgtatttttagtagagacaggttttcaccatgttagccaggctggtctcaaactcctgacctcagatgatccgcctgccttggcctcccaaagtgctgggattacaggtgtgggagccaccatgcctgacccacacactttttacttgtatagatgatttttggcttggacataaaagccaagccacccatttgcttttaatccaaagaacatgtatagtttttgtacccagagactatgatttatattgattgcacttgcctgccatgatttagataagattttttttgcatggtttttattctttcctaatggatcctgttttataatacttccaagcctgtccatggatatatcaaatgtcttcacttgtatattttcatggctaggtatttctaatgtttattcttccctgtgtacttctacacatagctatgcactatgaaaattaaatggaatgaatgatatgtatattactcattccatttaattttcatagngcatagctatgaaaattaaatggaatgaatgatatgtatattactcaaaataaagtttctttcactttaa

SEQ ID NO: 446259 - DNA, 2687 bp, Homo sapiens
ccggccccctttgttcccgggtccgggccgcaggcccgctgcggcggactgggcggcggaagttcgacggcgccgggcgagtggctgttgagcggcgccgcgggagttccgcaggtttcccgtgttcgcagcggagccggaggccagctgaacccggccgtgggatcccggataggaggaggaggggacccataggacgcgttaacatggacctggaaaacaaagtgaagaagaaaaatatgtcgtaactgcaagtgtggccaagaagagcatgatgtcctcttgagcaatgaagaggatcgaaaagtgggaaaactttttgaagacaccaagtataccactctgattgcaaaactaaagtcagatggaattcccatgtataaacgcaatgttatgatattgacgaatccagttgctgccaagaagaatgtctccatcaatacagttacctatgagtgggctcctcctgtccagaatcaagcattggccaggcagtacatgcagatgctacccaaggaaaagcagccagtagcaggctcagagggggcacagtaccggaagaagcagctggcaaagcagctccctgcacatgaccaggacccttcaaagtgccatgagttgtctcccagagaggtgaaggagatggagcagtttgtgaagaaatataagagcgaagctctgggagtaggagatgtcaaacttccctgtgagatggatgcccaaggccccaaacaaatgaacattcctggaggggatagaagcaccccagcagcagtgggggccatggaggacaaatctgctgagcacaaaagaactcaatattcctgctattgctgcaaactgagtatgaaagaaggtgacccagccatctatgccgaaagggctggctatgataaactgtggcacccagcttgttttgtctgcagcacctgccatgaactcctggttgacatgatttatttttggaagaatgagaagctatactgtggcagacattactgtgacagcgagaaaccccgatgtgctggctgtgacgagctgatattcagcaatgagtatacccaggcagaaaaccagaattggcacctgaaacacttctgctgctttgactgtgatagcattctagctggggagatatacgtgatggtcaatgacaagcccgtgtgcaagccctgctatgtgaagaatcacgctgtggtgtgtcaaggatgccacaatgccatcgacccagaagtgcagcgggtgacctataacaatttcagctggcatgcatccacagagtgctttctgtgctcttgctgcagcaaatgcctcattgggcagaagttcatgccagtagaagggatggttttctgttcagtggaatgtaagaagaggatgtcttaggaggagggcacccagaagtatcgagccatagctatccaaagtggtctgcatttctactgtaaaatgcaatttgaaaaaaataaaacgcaaaaaaagaaactgtaaaggaaaccaagagattttgtttaatttttttggccattttttcttcatcaattttttttcggtctcaacttttaaacttggtttaagcatttgatttgtaaaacagtaaataattgtatctttccatagcttttcaaatgtgaaatcatttgttggaagcttggatctcattaaacttcatgtctctattccatttgtgccacacacttaaaagttagtgtactgaatggaaagatgagcattcctagttctacacttcttttttccccctcatgtgtaaaatgaaaagaaaactaaatttgccctaataccaaggcgctacgtttattgcctcgtcttattcactgacctttgtaatgatacacagtgaattctttttgacaaagagaaatgcagtgtagtatgcagagctgctgttttaatgcctatgcatttactctttcctgatttaggcagaggtggcattttctttattgcatttctctatttttttaatgtaccctaccttcagtattctctttgtaagttggtgacttgcatctgtggccttgaatattttattatcacatgtggcataacagtatccacactttttagttctttattttttttttttattttgagcaattctcctgcctcagcctcccaaatagctgggattacaggtgcatgccaccacacccagctaatttttgtatttttagtagagacaggttttcaccatgttagccaggctggtctcaaactcctgacctcagatgatccgcctgccttggcctcccaaagtgctgggattacaggtgtgggagccaccatgcctgacccacacactttttacttgtatagatgatttttggcttggacataaaagccaagccacccatttgcttttaatccaaagaacatgtatagtttttgtacccagagactatgatttatattgattgcacttgcctgccatgatttagataagattttttttgcatggtttttattctttcctaatggatcctgttttataatacttccaagcctgtccatggatatatcaaatgtcttcacttgtatattttcatggctaggtatttctaatgtttattcttccctgtgtacttctacacatagctatgcactatgaaaattaaatggaatgaatgatatgtatattactcaaaataaagtttctttcactttaa

SEQ ID NO: 446260 - DNA, 1985 bp, Homo sapiens
gagatggagccttgctctgttgcccaggctggagtgcggtggctgtatctcaaaaagaaagaaagaaaagaaatggcagtcttctaatgactaggttgttctggatggcttccctttcagtcctgctattgctgcaaactgagtatgaaagaaggtgacccagccatctatgccgaaagggctggctatgataaactgtggcacccagcttgttttgtctgcagcacctgccatgaactcctggttgacatgatttatttttggaagaatgagaagctatactgtggcagacattactgtgacagcgagaaaccccgatgtgctggctgtgacgagctgatattcagcaatgagtatacccaggcagaaaaccagaattggcacctgaaacacttctgctgctttgactgtgatagcattctagctggggagatatacgtgatggtcaatgacaagcccgtgtgcaagccctgctatgtgaagaatcacgctgtggtgtgtcaaggatgccacaatgccatcgacccagaagtgcagcgggtgacctataacaatttcagctggcatgcatccacagagtgctttctgtgctcttgctgcagcaaatgcctcattgggcagaagttcatgccagtagaagggatggttttctgttcagtggaatgtaagaagaggatgtcttaggaggagggcacccagaagtatcgagccatagctatccaaagtggtctgcatttctactgtaaaatgcaatttgaaaaaaataaaacgcaaaaaaagaaactgtaaaggaaaccaagagattttgtttaatttttttggccattttttcttcatcaattttttttcggtctcaacttttaaacttggtttaagcatttgatttgtaaaacagtaaataattgtatctttccatagcttttcaaatgtgaaatcatttgttggaagcttggatctcattaaacttcatgtctctattccatttgtgccacacacttaaaagttagtgtactgaatggaaagatgagcattcctagttctacacttcttttttccccctcatgtgtaaaatgaaaagaaaactaaatttgccctaataccaaggcgctacgtttattgcctcgtcttattcactgacctttgtaatgatacacagtgaattctttttgacaaagagaaatgcagtgtagtatgcagagctgctgttttaatgcctatgcatttactctttcctgatttaggcagaggtggcattttctttattgcatttctctatttttttaatgtaccctaccttcagtattctctttgtaagttggtgacttgcatctgtggccttgaatattttattatcacatgtggcataacagtatccacactttttagttctttattttttttttttattttgagcaattctcctgcctcagcctcccaaatagctgggattacaggtgcatgccaccacacccagctaatttttgtatttttagtagagacaggttttcaccatgttagccaggctggtctcaaactcctgacctcagatgatccgcctgccttggcctcccaaagtgctgggattacaggtgtgggagccaccatgcctgacccacacactttttacttgtatagatgatttttggcttggacataaaagccaagccacccatttgcttttaatccaaagaacatgtatagtttttgtacccagagactatgatttatattgattgcacttgcctgccatgatttagataagattttttttgcatggtttttattctttcctaatggatcctgttttataatacttccaagcctgtccatggatatatcaaatgtcttcacttgtatattttcatggctaggtatttctaatgtttattcttccctgtgtacttctacacatagctatgcactatgaaaattaaatggaatgaatgatatgtatattactcaaaataaagtttctttcactttaa

SEQ ID NO: 446261 - DNA, 1187 bp, Homo sapiens
ccggccccctttgttcccgggtccgggccgcaggcccgctgcggcggactgggcggcggaagttcgacggcgccgggcgagtggctgttgagcggcgccgcgggagttccgcaggtttcccgtgttcgcagcggagccggaggccagctgaacccggccgtgggatcccggataggaggaggaggggacccataggacgcgttaacatggacctggaaaacaaagtgaagaagatgggcttaggtcacgagcaaggatttggagccccttgtttaaaatgcaaagaaaaatgtgaaggattcgaactgcacttctggagaaaaatatgtcgtaactgcaagtgtggccaagaagagcatgatgtcctcttgagcaatgaagaggatcgaaaagtgggaaaactttttgaagacaccaagtataccactctgattgcaaaactaaagtcagatggaattcccatgtataaacgcaatgttatgatattgacgaatccagttgctgccaagaagaatgtctccatcaatacagttacctatgagtgggctcctcctgtccagaatcaagcattggccaggcagtacatgcagatgctacccaaggaaaagcagccagtagcaggctcagagggggcacagtaccggaagaagcagctggcaaagcagctccctgcacatgaccaggacccttcaaagtgccatgagttgtctcccagagaggtgaaggagatggagcagtttgtgaagaaatataagagcgaagctctgggagtaggagatgtcaaacttccctgtgagatggatgcccaaggccccaaacaaatgaacattcctggaggggatagaagcaccccagcagcagtgggggccatggaggacaaatctgctgagcacaaaagaactcaatattcctgctattgctgcaaactgagtatgaaagaaggtgacccagccatctatgccgaaagggctggctatgataaactgtggcacccagcttgttttgtctgcagcacctgccatgaactcctggttgacatgatttatttttggaagaatgagaagctatactgtggcagacattactgtgacagcgagaaaccccgatgtgctggctgtgacgagctgatatcacaactgagtatacccagccctcttccccagcccgggatcctctagacgactcga

SEQ ID NO: 446262 - DNA, 348 bp, Homo sapiens
cctgttaactcaagaatatctctcctctaccctcaatccagtccctctttgtatgagccataaatgttcttcattttaacttatgagagtaaaactctacattggaggctatgaattacatatcacacaactacaaatcactaggcatgctaaggtagtttagctaaatcacacagtatatgctcaacaaatgcaactgaattaagcagggggcatcacatatttgaaagtaaaatttggcataattattagtgattgacaattccattcaagatctttggtgtgtctagcgtttcctgtcagaatctctaaaagagacacaatttatcttttcattgtcttctaact

SEQ ID NO: 446263 - DNA, 353 bp, Homo sapiens
ctccatgattagctggaatgatgcacagaactcaggaaagcactcagcttcctatcactggttattataagggacactactccagaacagcccagaggaagagatgcggcgggcaaggacggcgggcacagcgcagcactccccgctcgttggcctgcagcagcagtgtgacttgctcaaggtccagtgagtgacctcattccccagaaaaggctcctcccaccccagagtacagcctgggtagggggaaaatcagttctttcagctaccccccatccaacctttgggcctatgtgaaaagaaaggaactaagctgggtgtgttctgtctggaacccgggaagcgggtttcct

SEQ ID NO: 446264 - DNA, 2175 bp, Homo sapiens
ctccatgattagctggaatgatgcacagaactcaggaaagcactcagcttcctatcactggttattataagggacactactccagaacagcccagaggaagagatgcggcgggcaaggacggcgggcacagcgcagcactccccgctcgttggcccgggtatcccagcgcggacccacgcgatacgctgacgccccgacgccgatccggccgagccaagactcaacgatgactctgaataatgtcaccatgcgccagggcactgtgggcatgcagccacagcagcagcgctggagcatcccagctgatggcaggcatctgatggtccagaaagagccccaccagtacagccaccgcaaccgccattctgctacccctgaggaccactgccgccgaagctggtcctctgactccacagactcagtcatctcctctgagtcagggaacacctactaccgagtggtgctcataggggagcagggggtgggcaagtccactctggccaacatctttgcaggtgtgcatgacagcatggacagcgactgcgaggtgctgggagaagatacatatgaacgaaccctgatggttgatggggaaagtgcaacgattatactcctggatatgtgggaaaataagggggaaaatgaatggctccatgaccactgcatgcaggtcggggacgcatacctgattgtctactcaatcacagaccgagcgagcttcgagaaggcatctgagctgcgaatccagctccgcagggcccggcagacagaggacattcccataattttggttggcaacaaaagtgacttagtgcggtgccgagaagtgtctgtatcagaagggagagcctgtgcagtggtgtttgactgcaagttcatcgagacctctgcagctgtccagcacaacgtgaaggagctgtttgagggcattgtgcgacaggtgcgccttcggcgggacagcaaggagaagaatgaacggcggctggcctaccagaaaaggaaggagagcatgcccaggaaagccaggcgcttctggggcaagatcgtggccaaaaacaacaagaatatggccttcaagctcaagtccaaatcctgccatgacctctctgtactctaggaacccagggtcacccagatgtccctttgatggccgttgttgaaggccattgggaccaataatctatattagattgaatacttaagttagatgtggtttcccccattgtagcagggagctagcgtattagccttgtgggcaacatgatgcatgggaaatgaaagatttttgtaaaaagtcagtatttatttccaggaaaagcctgaccttgctatttgaacacccaagactctttagaggatgtgtttggtgttcacatgtgtttcttctattttggatagtagggaagtaaagcttacaaagaatgcctagaacaagaacttttcatcattaaaaatttttcccagtgttctgatatgtgactttgaggccaatgagtcataaacaaatataagaaagctgtcaatgagtttcttcaaaggagggaaaactttctacgaatctaagatccatggagctagaattgtagaactaggctcatcagaatcgtgactattattgctccatcaaactgtgaaaagaaatgatgtggaccttgctggaaacaaaggcttagcaaacaatttttgttcaatgcccaccgagacatatagaattgggaactgatacatgtgtcccttataggctcaaaaattatatcttacaatttcttatttagggggaaattatttgaatcagattctatttagtcaaaccaccttttatgttttattatttttgaattcatggagccatcataaaaatatttttaaaatcagaattattgataccctgtagtgcaaaatgtcaatttttaatgtataatcagaagtctgaattttcataaaacatatagcataaaaacttccagtactttggttgacccttgtatgtcacagctctgctctatttattattattttgcaaaataaccattttaacatttgataaagcatatttatgaacatatttcttaataagaaaaatatccattttattaccattttctatctttttcaaaatatgcaagtttttacctatatgtcttataataaaagaaataaaatatttgaaaaaa

SEQ ID NO: 446265 - DNA, 2567 bp, Homo sapiens
ctccatgattagctggaatgatgcacagaactcaggaaagcactcagcttcctatcactggttattataagggacactactccagaacagcccagaggaagagatgcggcgggcaaggacggcgggcacagcgcagcactccccgctcgttggcccgggtatcccagcgcggacccacgcgatacgctgacgccccgacgccgatccggccgagccaagtaagggggacggcccgagacggagaagggagagagtgggagtttcccagcccgcagaactttcgaagttgagaagagaacccctggaacgtgcgctcagcactgggattttctggactcaacgatgactctgaataatgtcaccatgcgccagggcactgtgggcatgcagccacagcagcagcgctggagcatcccagctgatggcaggcatctgatggtccagaaagagccccaccagtacagccaccgcaaccgccattctgctacccctgaggaccactgccgccgaagctggtcctctgactccacagactcagtcatctcctctgagtcagggaacacctactaccgagtggtgctcataggggagcagggggtgggcaagtccactctggccaacatctttgcaggtgtgcatgacagcatggacagcgactgcgaggtgctgggagaagatacatatgaacgaaccctgatggttgatggggaaagtgcaacgattatactcctggatatgtgggaaaataagggggaaaatgaatggctccatgaccactgcatgcaggtcggggacgcatacctgattgtctactcaatcacagaccgagcgagcttcgagaaggcatctgagctgcgaatccagctccgcagggcccggcagacagaggacattcccataattttggttggcaacaaaagtgacttagtgcggtgccgagaagtgtctgtatcagaagggagagcctgtgcagtggtgtttgactgcaagttcatcgagacctctgcagctgtccagcacaacgtgaaggagctgtttgagggcattgtgcgacaggtgcgccttcggcgggacagcaaggagaagaatgaacggcggctggcctaccagaaaaggaaggagagcatgcccaggaaagccaggcgcttctggggcaagatcgtggccaaaaacaacaagaatatggccttcaagctcaagtccaaatcctgccatgacctctctgtactctaggaacccagggtcacccagatgtccctttgatggccgttgttgaaggccattgggaccaataatctatattagattgaatacttaagttagatgtggtttcccccattgtagcagggagctagcgtattagccttgtgggcaacatgatgcatgggaaatgaaagatttttgtaaaaagtcagtatttatttccaggaaaagcctgaccttgctatttgaacacccaagactctttagaggatgtgtttggtgttcacatgtgtttcttctattttggatagtagggaagtaaagcttacaaagaatgcctagaacaagaacttttcatcattaaaaatttttcccagtgttctgatatgtgactttgaggccaatgagtcataaacaaatataagaaagctgtcaatgagtttcttcaaaggagggaaaactttctacgaatctaagatccatggagctagaattgtagaactaggctcatcagaatcgtgactattattgctccatcaaactgtgaaaagaaatgatgtggaccttgctggaaacaaaggcttagcaaacaatttttgttcaatgcccaccgagacatatagaattgggaactgatacatgtgtcccttataggctcaaaaattatatcttacaatttcttatttagggggaaattatttgaatcagattctatttagtcaaaccaccttttatgttttattatttttgaattcatggagccatcataaaaatatttttaaaatcagaattattgataccctgtagtgcaaaatgtcaatttttaatgtataatcagaagtctgaattttcataaaacatatagcataaaaacttccagtactttggttgacccttgtatgtcacagctctgctctatttattattattttgcaaaataaccattttaacatttgataaagcatatttatgaacatatttcttaataagaaaaatatccattttattaccattttctatctttttcaaaatatgcaagtttttacctatatgtcttataataaaagaaataaaatatttgaaaaaaaaaaaagagagaaaacaaaaactcttggcggcgtctcgacgtgaaaaaagtttaaacaactctgtgggggcccgcggcccgatgagtggacatgggccaacttgacaaagagaaccgcgcggatcatgtggttccccaaaaaaacccgggagagcgcgtcgaaacccagggtcgggcaccggtcaacacggcacggtcgtaccccccccggactgagcgaaggggcgacgcaaaagagaaagacgaagagagccaacggacgacatcgacagagacg

SEQ ID NO: 446266 - DNA, 1983 bp, Homo sapiens
ctccatgattagctggaatgatgcacagaactcaggaaagcactcagcttcctatcactggttattataagggacactactccagaacagcccagaggaagagatgcggcgggcaaggacggcgggcacagcgcagcactccccgctcgttggcccgggtatcccagcgcggacccacgcgatacgctgacgccccgacgccgatccggccgagccaagtaagggggacggcccgagacggagaagggagagagtgggagtttcccagcccgcagaactttcgaagttgagaagagaacccctggaacgtgcgctcagcactgggattttctggactcaacgatgactctgaataatgtcaccatgcgccagggcactgtgggcatgcagccacagcagcagcgctggagcatcccagctgatggcaggcatctgatggtccagaaagagccccaccagtacagccaccgcaaccgccattctgctacccctgaggaccactgccgccgaagctggtcctctgactccacagactcagtcatctcctctgagtcagggaacacctactaccgagtggtgctcataggggagcagggggtgggcaagtccactctggccaacatctttgcaggtgtgcatgacagcatggacagcgactgcgaggtgctgggagaagatacatatgaacgaaccctgatggttgatggggaaagtgcaacgattatactcctggatatgtgggaaaataagggggaaaatgaatggctccatgaccactgcatgcaggtcggggacgcatacctgattgtctactcaatcacagaccgagcgagcttcgagaaggcatctgagctgcgaatccagctccgcagggcccggcagacagaggacattcccataattttggttggcaacaaaagtgacttagtgcggtgccgagaagtgtctgtatcagaagggagagcctgtgcagtggtgtttgactgcaagttcatcgagacctctgcagctgtccagcacaacgtgaaggagctgtttgagggcattgtgcgacaggtgcgccttcggcgggacagcaaggagaagaatgaacggcggctggcctaccagaaaaggaaggagagcatgcccaggaaagccaggcgcttctggggcaagatcgtggccaaaaacaacaagaatatggccttcaagctcaagtccaaatcctgccatgacctctctgtactctaggaacccagggtcacccagatgtccctttgatggccgttgttgaaggccattgggaccaataatctatattagattgaatacttaagttagatgtggtttcccccattgtagcagggagctagcgtattagccttgtgggcaacatgatgcatgggaaatgaaagatttttgtaaaaagtcagtatttatttccaggaaaagcctgaccttgctatttgaacacccaagactctttagaggatgtgtttggtgttcacatgtgtttcttctattttggatagtagggaagtaaagcttacaaagaatgcctagaacaagaacttttcatcattaaaaatttttcccagtgttctgatatgtgactttgaggccaatgagtcataaacaaatataagaaagctgtcaatgagtttcttcaaaggagggaaaactttctacgaatctaagatccatggagctagaattgtagaactaggctcatcagaatcgtgactattattgctccatcataacaacgtaaaagacactgatttccttggaaaaacaaagtgcaccacgaggattttgcagtcaccacacccctcttccgaaaataatacataagagaactcgtacgcaacatgattagtatcaatcaaggttcaaacagggaagaaataggtgagtaaataatatataataaattctatagaagtcaacaaatgagaatcatgataccctttatagaactggtgagtgggagtagacacc

SEQ ID NO: 446267 - DNA, 1038 bp, Homo sapiens
ctccatgattagctggaatgatgcacagaactcaggaaagcactcagcttcctatcactggttattataagggacactactccagaacagcccagaggaagagatgcggcgggcaaggacggcgggcacagcgcagcactccccgctcgttggcccgggtatcccagcgcggacccacgcgatacgctgacgccccgacgccgatccggccgagccaagtaagggggacggcccgagacggagaagggagagagtgggagtttcccagcccgcagaactttcgaagttgagaagagaacccctggaacgtgcgctcagcactgggattttctggtaggggtcagagcttcaagtgcaaaggatgtcgcttctcatcagcaggttccttagttcaattcggtagaagggtcacctccctctacagatcgagtggtcagagagggcagcccttaatgatgctttatgtatttgttgtttgaatgtaagtctgccaactgaggtgctgcttttgagactaaaaaaccggctggtcgtcctggttagtggcgagatgttggggtacggagtgtgggggtgagggtgggagaggagtgtttgtgcatcttgctgattgcaacgtaagtacttatactttgtcaccagtagccggaaaaacagacctcccggctaggggaggcagtctgcaaagggaaagttgtagagaagttgttgaatatcatttaggggagtcttcagccttctgatttgcttcaagaaggggatctgagaatggtggctcaggcctgtgatctcagcactttcggaagccgaggccggaggatcacttgaccccaggagttcgagaccagcctgggcaacctagtgagaccactgtctctaccaaaaaataaaaataaaaataaaaaaactagtggacgtggtagtgcaggtctgtagtcccagctacttgggaggctgaagtggaggatctcttgagcctggcagttggaggctagctacagtgagctatgatcgtgccactgcactccagcctgggtg

SEQ ID NO: 446268 - DNA, 2290 bp, Homo sapiens
ctccatgattagctggaatgatgcacagaactcaggaaagcactcagcttcctatcactggttattataagggacactactccagaacagcccagaggaagagatgcggcgggcaaggacggcgggcacagcgcagcactccccgctcgttggcccgggtatcccagcgcggacccacgcgatacgctgacgccccgacgccgatccggccgagccaagtaagggggacggcccgagacggagaagggagagagtgggagtttcccagcccgcagaactttcgaagttgagaagagaacccctggaacgtgcgctcagcactgggattttctggactcaacgatgactctgaataatgtcaccatgcgccagggcactgtgggcatgcagccacagcagcagcgctggagcatcccagctgatggcaggcatctgatggtccagaaagagccccaccagtacagccaccgcaaccgccattctgctacccctgaggaccactgccgccgaagctggtcctctgactccacagactcagtcatctcctctgagtcagggaacacctactaccgagtggtgctcataggggagcagggggtgggcaagtccactctggccaacatctttgcaggtgtgcatgacagcatggacagcgactgcgaggtgctgggagaagatacatatgaacgaaccctgatggttgatggggaaagtgcaacgattatactcctggatatgtgggaaaataagggggaaaatgaatggctccatgaccactgcatgcaggtcggggacgcatacctgattgtctactcaatcacagaccgagcgagcttcgagaaggcatctgagctgcgaatccagctccgcagggcccggcagacagaggacattcccataattttggttggcaacaaaagtgacttagtgcggtgccgagaagtgtctgtatcagaagggagagcctgtgcagtggtgtttgactgcaagttcatcgagacctctgcagctgtccagcacaacgtgaaggagctgtttgagggcattgtgcgacaggtgcgccttcggcgggacagcaaggagaagaatgaacggcggctggcctaccagaaaaggaaggagagcatgcccaggaaagccaggcgcttctggggcaagatcgtggccaaaaacaacaagaatatggccttcaagctcaagtccaaatcctgccatgacctctctgtactctaggaacccagggtcacccagatgtccctttgatggccgttgttgaaggccattgggaccaataatctatattagattgaatacttaagttagatgtggtttcccccattgtagcagggagctagcgtattagccttgtgggcaacatgatgcatgggaaatgaaagatttttgtaaaaagtcagtatttatttccaggaaaagcctgaccttgctatttgaacacccaagactctttagaggatgtgtttggtgttcacatgtgtttcttctattttggatagtagggaagtaaagcttacaaagaatgcctagaacaagaacttttcatcattaaaaatttttcccagtgttctgatatgtgactttgaggccaatgagtcataaacaaatataagaaagctgtcaatgagtttcttcaaaggagggaaaactttctacgaatctaagatccatggagctagaattgtagaactaggctcatcagaatcgtgactattattgctccatcaaactgtgaaaagaaatgatgtggaccttgctggaaacaaaggcttagcaaacaatttttgttcaatgcccaccgagacatatagaattgggaactgatacatgtgtcccttataggctcaaaaattatatcttacaatttcttatttagggggaaattatttgaatcagattctatttagtcaaaccaccttttatgttttattatttttgaattcatggagccatcataaaaatatttttaaaatcagaattattgataccctgtagtgcaaaatgtcaatttttaatgtataatcagaagtctgaattttcataaaacatatagcataaaaacttccagtactttggttgacccttgtatgtcacagctctgctctatttattattattttgcaaaataaccattttaacatttgataaagcatatttatgaacatatttcttaataagaaaaatatccattttattaccattttctatctttttcaaaatatgcaagtttttacctatatgtcttataataaaagaaataaaatatttgaaaaaa

SEQ ID NO: 446269 - DNA, 2236 bp, Homo sapiens
ctccatgattagctggaatgatgcacagaactcaggaaagcactcagcttcctatcactggttattataagggacactactccagaacagcccagaggaagagatgcggcgggcaaggacggcgggcacagcgcagcactccccgctcgttggcccgggtatcccagcgcggacccacgcgatacgctgacgccccgacgccgatccggccgagccaagtaagggggacggcccgagacggagaagggagagagtgggagtttcccagcccgcagaactttcgaagttgagaagagaacccctggaacgtgcgctcagcactgggattttctggactcaacgatgactctgaataatgtcaccatgcgccagggcactgtgggcatgcagccacagcagcagcgctggagcatcccagctgatggcaggcatctgatggtccagaaagagccccaccagtacagccaccgcaaccgccattctgctacccctgaggaccactgccgccgaagctggtcctctgactccacagactcagtcatctcctctgagtcagggaacacctactaccgagtggtgctcataggggagcagggggtgggcaagtccactctggccaacatctttgcaggtgtgcatgacagcatggacagcgactgcgaggtgctgggagaagatacatatgaacgaaccctgatggttgatggggaaagtgcaacgattatactcctggatatgtgggaaaataagggggaaaatgaatggctccatgaccactgcatgcaggtcggggacgcatacctgattgtctactcaatcacagaccgagcgagcttcgagaaggcatctgagctgcgaatccagctccgcagggcccggcagacagaggacattcccataattttggttggcaacaaaatggtgtttgactgcaagttcatcgagacctctgcagctgtccagcacaacgtgaaggagctgtttgagggcattgtgcgacaggtgcgccttcggcgggacagcaaggagaagaatgaacggcggctggcctaccagaaaaggaaggagagcatgcccaggaaagccaggcgcttctggggcaagatcgtggccaaaaacaacaagaatatggccttcaagctcaagtccaaatcctgccatgacctctctgtactctaggaacccagggtcacccagatgtccctttgatggccgttgttgaaggccattgggaccaataatctatattagattgaatacttaagttagatgtggtttcccccattgtagcagggagctagcgtattagccttgtgggcaacatgatgcatgggaaatgaaagatttttgtaaaaagtcagtatttatttccaggaaaagcctgaccttgctatttgaacacccaagactctttagaggatgtgtttggtgttcacatgtgtttcttctattttggatagtagggaagtaaagcttacaaagaatgcctagaacaagaacttttcatcattaaaaatttttcccagtgttctgatatgtgactttgaggccaatgagtcataaacaaatataagaaagctgtcaatgagtttcttcaaaggagggaaaactttctacgaatctaagatccatggagctagaattgtagaactaggctcatcagaatcgtgactattattgctccatcaaactgtgaaaagaaatgatgtggaccttgctggaaacaaaggcttagcaaacaatttttgttcaatgcccaccgagacatatagaattgggaactgatacatgtgtcccttataggctcaaaaattatatcttacaatttcttatttagggggaaattatttgaatcagattctatttagtcaaaccaccttttatgttttattatttttgaattcatggagccatcataaaaatatttttaaaatcagaattattgataccctgtagtgcaaaatgtcaatttttaatgtataatcagaagtctgaattttcataaaacatatagcataaaaacttccagtactttggttgacccttgtatgtcacagctctgctctatttattattattttgcaaaataaccattttaacatttgataaagcatatttatgaacatatttcttaataagaaaaatatccattttattaccattttctatctttttcaaaatatgcaagtttttacctatatgtcttataataaaagaaataaaatatttgaaaaaa

SEQ ID NO: 446270 - DNA, 917 bp, Homo sapiens
ctccatgattagctggaatgatgcacagaactcaggaaagcactcagcttcctatcactggttattataagggacactactccagaacagcccagaggaagagatgcggcgggcaaggacggcgggcacagcgcagcactccccgctcgttggcccgggtatcccagcgcggacccacgcgatacgctgacgccccgacgccgatccggccgagccaagactcaacgatgactctgaataatgtcaccatgcgccagggcactgtgggcatgcagccacagcagcagcgctggagcatcccagctgatggcaggcatctgatggtccagaaagagccccaccagtacagccaccgcaaccgccattctgctacccctgaggaccactgccgccgaagctggtcctctgactccacagactcagtcatctcctctgagtcagggaacacctactaccgagtggtgctcataggggagcagggggtgggcaagtccactctggccaacatctttgcaggtgtgcatgacagcatggacagcgactgcgaggtgctgggaggtaggtgtcccagccccagtgggcttctttccaccaggggtggcccaggaagaaagagtgagggtgggtgacttatttacccacagagttgggagctgaagttaggcattttggacaattgatgggggagctgagtctctagaaaagcccaagcacaggctttcgggcaagaaaatgaaaatgcttgtagacaggaccaaaatctgttgatcctgggccagaaagggaattcttcagattccaattctaaatgggttggggaaggctgattagagagggcagagccagagggtcagcgccccacttgacttctgctgactctgacttgaacattcttcccggaactcagtatagacaca

SEQ ID NO: 446271 - DNA, 2332 bp, Homo sapiens
tactttttttacaattattgaggttttaataatacataatttgactacatttcttagatttcgcgtcgtgacgttttcagcctctcaaactgcatcgcctacgcacagaagcttcccgaatctcagacgagacacaacaaagctgcgcgctgccctcgccccgcccgcgggcgcggcggcgacaggccctcggccccgcccacaccgcggcgccacgcctccaacccgcctccagccgtgcctccccaggcccttggccccgcccacaccgcctcgccccgccccaagccgcgctgtgctccaggggcgggggcccacggcggccactcactgagccccacgggccgcagcggagtgacgtagggttggcgcacggatccgttgcggctgcagctctgcagtcgggccgttccttcgccgccgccaggggtagcggtgtagctgcgcagcgtcgcgcgcgctaccgcacccaggttcggcccgtaggcgtctggcagcccggcgccatcttcatcgagcgccatggccgcagcctgcgggccgggagcggccgggtactgcttgctcctcggcttgcatttgtttctgctgaccgcgggccctgccctgggctggaacgaccctgacagaatgttgctgcgggatgtaaaagctcttaccctccactatgaccgctataccacctcccgcaggctggatcccatcccacagttgaaatgtgttggaggcacagctggttgtgattcttataccccaaaagtcatacagtgtcagaacaaaggctgggatgggtatgatgtacagtgggaatgtaagacggacttagatattgcatacaaatttggaaaaactgtggtgagctgtgaaggctatgagtcctctgaagaccagtatgtactaagaggttcttgtggcttggagtataatttagattatacagaacttggcctgcagaaactgaaggagtctggaaagcagcacggctttgcctctttctctgattattattataagtggtcctcggcggattcctgtaacatgagtggattgattaccatcgtggtactccttgggatcgcctttgtagtctataagctgttcctgagtgacgggcagtattctcctccaccgtactctgagtatcctccattttcccaccgttaccagagattcaccaactcagcaggacctcctcccccaggctttaagtctgagttcacaggaccacagaatactggccatggtgcaacttctggttttggcagtgcttttacaggacaacaaggatatgaaaattcaggaccagggttctggacaggcttgggaactggtggaatactaggatatttgtttggcagcaatagagcggcaacacccttctcagactcgtggtactacccgtcctatcctccctcctaccctggcacgtggaatagggcttactcaccccttcatggaggctcgggcagctattcggtatgttcaaactcagacacgaaaaccagaactgcatcaggatatggtggtaccaggagacgataaagtagaaagttggagtcaaacactggatgcagaaattttggatttttcatcactttctctttagaaaaaaagtactacctgttaacaattgggaaaaggggatattcaaaagttctgtggtgttatgtccagtgtagctttttgtattctattatttgaggctaaaagttgatgtgtgacaaaatacttatgtgttgtatgtcagtgtaacatgcagatgtatattgcagtttttgaaagtgatcattactgtggaatgctaaaaatacattaatttctaaaacctgtgatgccctaagaagcattaagaatgaaggtgttgtactaatagaaactaagtacagaaaatttcagttttaggtggttgtagctgatgagttattacctcatagagactataatattctatttggtattatattatttgatgtttgctgttcttcaaacatttaaatcaagctttggactaattatgctaatttgtgagttctgatcacttttgagctctgaagctttgaatcattcagtggtggagatggccttctggtaactgaatattaccttctgtaggaaaaggtggaaaataagcatctagaaggttgttgtgaatgactctgtgctggcaaaaatgcttgaaacctctatatttctttcgttcataagaggtaaaggtcaaatttttcaacaaaagtcttttaataacaaaagcatgcagttctctgtgaaatctcaaatattgttgtaatagtctgtttcaatcttaaaaagaatcaataaaaacaaacaaggg

SEQ ID NO: 446272 - DNA, 2355 bp, Homo sapiens
tactttttttacaattattgaggttttaataatacataatttgactacatttcttagatttcgcgtcgtgacgttttcagcctctcaaactgcatcgcctacgcacagaagcttcccgaatctcagacgagacacaacaaagctgcgcgctgccctcgccccgcccgcgggcgcggcggcgacaggccctcggccccgcccacaccgcggcgccacgcctccaacccgcctccagccgtgcctccccaggcccttggccccgcccacaccgcctcgccccgccccaagccgcgctgtgctccaggggcgggggcccacggcggccactcactgagccccacgggccgcagcggagtgacgtagggttggcgcacggatccgttgcggctgcagctctgcagtcgggccgttccttcgccgccgccaggggtagcggtgtagctgcgcagcgtcgcgcgcgctaccgcacccaggttcggcccgtaggcgtctggcagcccggcgccatcttcatcgagcgccatggccgcagcctgcgggccgggagcggccgggtactgcttgctcctcggcttgcatttgtttctgctgaccgcgggccctgccctgggctggaacgaccctgacagaatgttgctgcgggatgtaaaagctcttaccctccactatgaccgctataccacctcccgcaggctggatcccatcccacagttgaaatgtgttggaggcacagctggttgtgattcttataccccaaaagtcatacagtgtcagaacaaaggctgggatgggtatgatgtacagtgggaatgtaagacggacttagatattgcatacaaatttggaaaaactgtggtgagctgtgaaggctatgagtcctctgaagaccagtatgtactaagaggttcttgtggcttggagtataatttagattatacagaacttggcctgcagaaactgaaggagtctggaaagcagcacggctttgcctctttctctgattattattataagtggtcctcggcggattcctgtaacatgagtggattgattaccatcgtggtactccttgggatcgcctttgtagtctataagctgttcctgagtgacgggcagtattctcctccaccgtactctgagtatcctccattttcccaccgttaccagagattcaccaactcagcaggacctcctcccccaggctttaagtctgagttcacaggaccacagaatactggccatggtgcaacttctggttttggcagtgcttttacaggacaacaaggatatgaaaattcaggaccagggttctggacaggcttgggaactggtggaatactaggatatttgtttggcagcaatagagcggcaacacccttctcagactcgtggtactacccgtcctatcctccctcctaccctggcacgtggaatagggcttactcaccccttcatggaggctcgggcagctattcggtatgttcaaactcagacacgaaaaccagaactgcatcaggatatggtggtaccaggagacgataaagtagaaagttggagtcaaacactggatgcagaaattttggatttttcatcactttctctttagaaaaaaagtactacctgttaacaattgggaaaaggggatattcaaaagttctgtggtgttatgtccagtgtagctttttgtattctattatttgaggctaaaagttgatgtgtgacaaaatacttatgtgttgtatgtcagtgtaacatgcagatgtatattgcagtttttgaaagtgatcattactgtggaatgctaaaaatacattaatttctaaaacctgtgatgccctaagaagcattaagaatgaaggtgttgtactaatagaaactaagtacagaaaatttcagttttaggtggttgtagctgatgagttattacctcatagagactataatattctatttggtattatattatttgatgtttgctgttcttcaaacatttaaatcaagctttggactaattatgctaatttgtgagttctgatcacttttgagctctgaagctttgaatcattcagtggtggagatggccttctggtaactgaatattaccttctgtaggaaaaggtggaaaataagcatctagaaggttgttgtgaatgactctgtgctggcaaaaatgcttgaaacctctatatttctttcgttcataagaggtaaaggtcaaatttttcaacaaaagtcttttaataacaaaagcatgcagttctctgtgaaatctcaaatattgttgtaatagtctgtttcaatcttaaaaagaatcaataaaaacaaacaaggggtttagtctcattctttctatta

SEQ ID NO: 446273 - DNA, 2249 bp, Homo sapiens
tactttttttacaattattgaggttttaataatacataatttgactacatttcttagatttcgcgtcgtgacgttttcagcctctcaaactgcatcgcctacgcacagaagcttcccgaatctcagacgagacacaacaaagctgcgcgctgccctcgccccgcccgcgggcgcggcggcgacaggccctcggccccgcccacaccgcggcgccacgcctccaacccgcctccagccgtgcctccccaggcccttggccccgcccacaccgcctcgccccgccccaagccgcgctgtgctccaggggcgggggcccacggcggccactcactgagccccacgggccgcagcggagtgacgtagggttggcgcacggatccgttgcggctgcagctctgcagtcgggccgttccttcgccgccgccaggggtagcggtgtagctgcgcagcgtcgcgcgcgctaccgcacccaggttcggcccgtaggcgtctggcagcccggcgccatcttcatcgagcgccatggccgcagcctgcgggccgggagcggccgggtactgcttgctcctcggcttgcatttgtttctgctgaccgcgggccctgccctgggctggaacgaccctgacagaatgttgctgcgggatgtaaaagctcttaccctccactatgaccgctataccacctcccgcaggctggatcccatcccacagttgaaatgtgttggaggcacagctggttgtgattcttataccccaaaagtcatacagtgtcagaacaaaggctgggatgggtatgatgtacagtgggaatgtaagacggacttagatattgcatacaaatttggaaaaactgtggtgagctgtgaaggctatgagtcctctgaagaccagtatgtactaagaggttcttgtggcttggagtataatttagattatacagaacttggcctgcagaaactgaaggagtctggaaagcagcacggctttgcctctttctctgattattattataagtggtcctcggcggattcctgtaacatgagtggattgattaccatcgtggtactccttgggatcgcctttgtagtctataagctgttcctgagtgacgggcagtattctcctccaccgtactctgagtatcctccattttcccaccgttaccagagattcaccaactcagcaggacctcctcccccaggctttaagtctgagttcacaggaccacagaatactggccatggtgcaacttctggttttggcagtgcttttacaggacaacaaggatatgaaaattcaggaccagggttctggacaggcttgggaactggtggaatactaggatatttgtttggcagcaatagagcggcaacacccttctcagactcgtggtactacccgtcctatcctccctcctaccctggcacgtggaatagggcttactcaccccttcatggaggctcgggcagctattcggtatgttcaaactcagacacgaaaaccagaactgcatcaggatatggtggtaccaggagacgataaagtagaaagttggagtcaaacactggatgcagaaattttggatttttcatcactttctctttagaaaaaaagtactacctgttaacaattgggaaaaggggatattcaaaagttctgtggtgttatgtccagtgtagctttttgtattctattatttgaggctaaaagttgatgtgtgacaaaatacttatgtgttgtatgtcagtgtaacatgcagatgtatattgcagtttttgaaagtgatcattactgtggaatgctaaaaatacattaatttctaaaacctgtgatgccctaagaagcattaagaatgaaggtgttgtactaatagaaactaagtacagaaaatttcagttttaggtggttgtagctgatgagttattacctcatagagactataatattctatttggtattatattatttgatgtttgctgttcttcaaacatttaaatcaagctttggactaattatgctaatttgtgagttctgatcacttttgagctctgaagctttgaatcattcagtggtggagatggccttctggtaactgaatattaccttctgtaggaaaaggtggaaaataagcatctagaaggttgttgtgaatgactctgtgctggcaaaaatgcttgaaacctctatatttctttcgttcataagaggtaaaggtcaaattgtcgacgcggccgaagtttagtagtagt

SEQ ID NO: 446274 - DNA, 2242 bp, Homo sapiens
tactttttttacaattattgaggttttaataatacataatttgactacatttcttagatttcgcgtcgtgacgttttcagcctctcaaactgcatcgcctacgcacagaagcttcccgaatctcagacgagacacaacaaagctgcgcgctgccctcgccccgcccgcgggcgcggcggcgacaggccctcggccccgcccacaccgcggcgccacgcctccaacccgcctccagccgtgcctccccaggcccttggccccgcccacaccgcctcgccccgccccaagccgcgctgtgctccaggggcgggggcccacggcggccactcactgagccccacgggccgcagcggagtgacgtagggttggcgcacggatccgttgcggctgcagctctgcagtcgggccgttccttcgccgccgccaggggtagcggtgtagctgcgcagcgtcgcgcgcgctaccgcacccaggttcggcccgtaggcgtctggcagcccggcgccatcttcatcgagcgccatggccgcagcctgcgggccgggagcggccgggtactgcttgctcctcggcttgcatttgtttctgctgaccgcgggccctgccctgggctggaacgaccctgacagaatgttgctgcgggatgtaaaagctcttaccctccactatgaccgctataccacctcccgcaggctggatcccatcccacagttgaaatgtgttggaggcacagctggttgtgattcttataccccaaaagtcatacagtgtcagaacaaaggctgggatgggtatgatgtacagtgggaatgtaagacggacttagatattgcatacaaatttggaaaaactgtggtgagctgtgaaggctatgagtcctctgaagaccagtatgtactaagaggttcttgtggcttggagtataatttagattatacagaacttggcctgcagaaactgaaggagtctggaaagcagcacggctttgcctctttctctgattattattataagtggtcctcggcggattcctgtaacatgagtggattgattaccatcgtggtactccttgggatcgcctttgtagtctataagctgttcctgagtgacgggcagtattctcctccaccgtactctgagtatcctccattttcccaccgttaccagagattcaccaactcagcaggacctcctcccccaggctttaagtctgagttcacaggaccacagaatactggccatggtgcaacttctggttttggcagtgcttttacaggacaacaaggatatgaaaattcaggaccagggttctggacaggcttgggaactggtggaatactaggatatttgtttggcagcaatagagcggcaacacccttctcagactcgtggtactacccgtcctatcctccctcctaccctggcacgtggaatagggcttactcaccccttcatggaggctcgggcagctattcggtatgttcaaactcagacacgaaaaccagaactgcatcaggatatggtggtaccaggagacgataaagtagaaagttggagtcaaacattctgtggtgttatgtccagtgtagctttttgtattctattatttgaggctaaaagttgatgtgtgacaaaatacttatgtgttgtatgtcagtgtaacatgcagatgtatattgcagtttttgaaagtgatcattactgtggaatgctaaaaatacattaatttctaaaacctgtgatgccctaagaagcattaagaatgaaggtgttgtactaatagaaactaagtacagaaaatttcagttttaggtggttgtagctgatgagttattacctcatagagactataatattctatttggtattatattatttgatgtttgctgttcttcaaacatttaaatcaagctttggactaattatgctaatttgtgagttctgatcacttttgagctctgaagctttgaatcattcagtggtggagatggccttctggtaactgaatattaccttctgtaggaaaaggtggaaaataagcatctagaaggttgttgtgaatgactctgtgctggcaaaaatgcttgaaacctctatatttctttcgttcataagaggtaaaggtcaaatttttcaacaaaagtcttttaataacaaaagcatgcagttctctgtgaaatctcaaatattgttgtaatagtctgtttcaatcttaaaaagaatcaataaaaacaaacaaggg

SEQ ID NO: 446275 - DNA, 2292 bp, Homo sapiens
tactttttttacaattattgaggttttaataatacataatttgactacatttcttagatttcgcgtcgtgacgttttcagcctctcaaactgcatcgcctacgcacagaagcttcccgaatctcagacgagacacaacaaagctgcgcgctgccctcgccccgcccgcgggcgcggcggcgacaggccctcggccccgcccacaccgcggcgccacgcctccaacccgcctccagccgtgcctccccaggcccttggccccgcccacaccgcctcgccccgccccaagccgcgctgtgctccaggggcgggggcccacggcggccactcactgagccccacgggccgcagcggagtgacgtagggttggcgcacggatccgttgcggctgcagctctgcagtcgggccgttccttcgccgccgccaggggtagcggtgtagctgcgcagcgtcgcgcgcgctaccgcacccaggttcggcccgtaggcgtctggcagcccggcgccatcttcatcgagcgccatggccgcagcctgcgggccgggagcggccgggtactgcttgctcctcggcttgcatttgtttctgctgaccgcgggccctgccctgggctggaacgaccctgacagaatgttgctgcgggatgtaaaagctcttaccctccactatgaccgctataccacctcccgcaggctggatcccatcccacagttgaaatgtgttggaggcacagctggttgtgattcttataccccaaaagtcatacagtgtcagaacaaaggctgggatgggtatgatgtacagtgggaatgtaagacggacttagatattgcatacaaatttggaaaaactgtggtgagctgtgaaggctatgagtcctctgaagaccagtatgtactaagaggttcttgtggcttggagtataatttagattatacagaacttggcctgcagaaactgaaggagtctggaaagcagcacggctttgcctctttctctgattattattataagtggtcctcggcggattcctgtaacatgagtggattgattaccatcgtggtactccttgggatcgcctttgtagtctataagctgttcctgagtgacgggcagtattctcctccaccgtactctgagtatcctccattttcccaccgttaccagagattcaccaactcagcaggacctcctcccccaggctttaagtctgagttcacaggaccacagaatactggccatggtgcaacttctggttttggcagtgcttttacaggacaacaaggatatgaaaattcaggaccagggttctggacaggcttgggaactggtggaatactaggatatttgtttggcagcaatagagcggcaacacccttctcagactcgtggtactacccgtcctatcctccctcctaccctggcacgtggaatagggcttactcaccccttcatggaggctcgggcagctattcggatatggtggtaccaggagacgataaagtagaaagttggagtcaaacactggatgcagaaattttggatttttcatcactttctctttagaaaaaaagtactacctgttaacaattgggaaaaggggatattcaaaagttctgtggtgttatgtccagtgtagctttttgtattctattatttgaggctaaaagttgatgtgtgacaaaatacttatgtgttgtatgtcagtgtaacatgcagatgtatattgcagtttttgaaagtgatcattactgtggaatgctaaaaatacattaatttctaaaacctgtgatgccctaagaagcattaagaatgaaggtgttgtactaatagaaactaagtacagaaaatttcagttttaggtggttgtagctgatgagttattacctcatagagactataatattctatttggtattatattatttgatgtttgctgttcttcaaacatttaaatcaagctttggactaattatgctaatttgtgagttctgatcacttttgagctctgaagctttgaatcattcagtggtggagatggccttctggtaactgaatattaccttctgtaggaaaaggtggaaaataagcatctagaaggttgttgtgaatgactctgtgctggcaaaaatgcttgaaacctctatatttctttcgttcataagaggtaaaggtcaaatttttcaacaaaagtcttttaataacaaaagcatgcagttctctgtgaaatctcaaatattgttgtaatagtctgtttcaatcttaaaaagaatcaataaaaacaaacaaggg

SEQ ID NO: 446276 - DNA, 2261 bp, Homo sapiens
tactttttttacaattattgaggttttaataatacataatttgactacatttcttagatttcgcgtcgtgacgttttcagcctctcaaactgcatcgcctacgcacagaagcttcccgaatctcagacgagacacaacaaagctgcgcgctgccctcgccccgcccgcgggcgcggcggcgacaggccctcggccccgcccacaccgcggcgccacgcctccaacccgcctccagccgtgcctccccaggcccttggccccgcccacaccgcctcgccccgccccaagccgcgctgtgctccaggggcgggggcccacggcggccactcactgagccccacgggccgcagcggagtgacgtagggttggcgcacggatccgttgcggctgcagctctgcagtcgggccgttccttcgccgccgccaggggtagcggtgtagctgcgcagcgtcgcgcgcgctaccgcacccgggagcggccgggtactgcttgctcctcggcttgcatttgtttctgctgaccgcgggccctgccctgggctggaacgaccctgacagaatgttgctgcgggatgtaaaagctcttaccctccactatgaccgctataccacctcccgcaggctggatcccatcccacagttgaaatgtgttggaggcacagctggttgtgattcttataccccaaaagtcatacagtgtcagaacaaaggctgggatgggtatgatgtacagtgggaatgtaagacggacttagatattgcatacaaatttggaaaaactgtggtgagctgtgaaggctatgagtcctctgaagaccagtatgtactaagaggttcttgtggcttggagtataatttagattatacagaacttggcctgcagaaactgaaggagtctggaaagcagcacggctttgcctctttctctgattattattataagtggtcctcggcggattcctgtaacatgagtggattgattaccatcgtggtactccttgggatcgcctttgtagtctataagctgttcctgagtgacgggcagtattctcctccaccgtactctgagtatcctccattttcccaccgttaccagagattcaccaactcagcaggacctcctcccccaggctttaagtctgagttcacaggaccacagaatactggccatggtgcaacttctggttttggcagtgcttttacaggacaacaaggatatgaaaattcaggaccagggttctggacaggcttgggaactggtggaatactaggatatttgtttggcagcaatagagcggcaacacccttctcagactcgtggtactacccgtcctatcctccctcctaccctggcacgtggaatagggcttactcaccccttcatggaggctcgggcagctattcggtatgttcaaactcagacacgaaaaccagaactgcatcaggatatggtggtaccaggagacgataaagtagaaagttggagtcaaacactggatgcagaaattttggatttttcatcactttctctttagaaaaaaagtactacctgttaacaattgggaaaaggggatattcaaaagttctgtggtgttatgtccagtgtagctttttgtattctattatttgaggctaaaagttgatgtgtgacaaaatacttatgtgttgtatgtcagtgtaacatgcagatgtatattgcagtttttgaaagtgatcattactgtggaatgctaaaaatacattaatttctaaaacctgtgatgccctaagaagcattaagaatgaaggtgttgtactaatagaaactaagtacagaaaatttcagttttaggtggttgtagctgatgagttattacctcatagagactataatattctatttggtattatattatttgatgtttgctgttcttcaaacatttaaatcaagctttggactaattatgctaatttgtgagttctgatcacttttgagctctgaagctttgaatcattcagtggtggagatggccttctggtaactgaatattaccttctgtaggaaaaggtggaaaataagcatctagaaggttgttgtgaatgactctgtgctggcaaaaatgcttgaaacctctatatttctttcgttcataagaggtaaaggtcaaatttttcaacaaaagtcttttaataacaaaagcatgcagttctctgtgaaatctcaaatattgttgtaatagtctgtttcaatcttaaaaagaatcaataaaaacaaacaaggg

SEQ ID NO: 446277 - DNA, 2377 bp, Homo sapiens
tactttttttacaattattgaggttttaataatacataatttgactacatttcttagatttcgcgtcgtgacgttttcagcctctcaaactgcatcgcctacgcacagaagcttcccgaatctcagacgagacacaacaaagctgcgcgctgccctcgccccgcccgcgggcgcggcggcgacaggccctcggccccgcccacaccgcggcgccacgcctccaacccgcctccagccgtgcctccccaggcccttggccccgcccacaccgcctcgccccgccccaagccgcgctgtgctccaggggcgggggcccacggcggccactcactgagccccacgggccgcagcggagtgacgtagggttggcgcacggatccgttgcggctgcagctctgcagtcgggccgttccttcgccgccgccaggggtagcggtgtagctgcgcagcgtcgcgcgcgctaccgcacccaggttcggcccgtaggcgtctggcagcccggcgccatcttcatcgagcgccatggccgcagcctgcgggccgggagcggccgggtactgcttgctcctcggcttgcatttgtttctgctgaccgcgggccctgccctgggctggaacgaccctgaagcccttgttggatttttggactttctgaactggtcctgaactgacagaatgttgctgcgggatgtaaaagctcttaccctccactatgaccgctataccacctcccgcaggctggatcccatcccacagttgaaatgtgttggaggcacagctggttgtgattcttataccccaaaagtcatacagtgtcagaacaaaggctgggatgggtatgatgtacagtgggaatgtaagacggacttagatattgcatacaaatttggaaaaactgtggtgagctgtgaaggctatgagtcctctgaagaccagtatgtactaagaggttcttgtggcttggagtataatttagattatacagaacttggcctgcagaaactgaaggagtctggaaagcagcacggctttgcctctttctctgattattattataagtggtcctcggcggattcctgtaacatgagtggattgattaccatcgtggtactccttgggatcgcctttgtagtctataagctgttcctgagtgacgggcagtattctcctccaccgtactctgagtatcctccattttcccaccgttaccagagattcaccaactcagcaggacctcctcccccaggctttaagtctgagttcacaggaccacagaatactggccatggtgcaacttctggttttggcagtgcttttacaggacaacaaggatatgaaaattcaggaccagggttctggacaggcttgggaactggtggaatactaggatatttgtttggcagcaatagagcggcaacacccttctcagactcgtggtactacccgtcctatcctccctcctaccctggcacgtggaatagggcttactcaccccttcatggaggctcgggcagctattcggtatgttcaaactcagacacgaaaaccagaactgcatcaggatatggtggtaccaggagacgataaagtagaaagttggagtcaaacactggatgcagaaattttggatttttcatcactttctctttagaaaaaaagtactacctgttaacaattgggaaaaggggatattcaaaagttctgtggtgttatgtccagtgtagctttttgtattctattatttgaggctaaaagttgatgtgtgacaaaatacttatgtgttgtatgtcagtgtaacatgcagatgtatattgcagtttttgaaagtgatcattactgtggaatgctaaaaatacattaatttctaaaacctgtgatgccctaagaagcattaagaatgaaggtgttgtactaatagaaactaagtacagaaaatttcagttttaggtggttgtagctgatgagttattacctcatagagactataatattctatttggtattatattatttgatgtttgctgttcttcaaacatttaaatcaagctttggactaattatgctaatttgtgagttctgatcacttttgagctctgaagctttgaatcattcagtggtggagatggccttctggtaactgaatattaccttctgtaggaaaaggtggaaaataagcatctagaaggttgttgtgaatgactctgtgctggcaaaaatgcttgaaacctctatatttctttcgttcataagaggtaaaggtcaaatttttcaacaaaagtcttttaataacaaaagcatgcagttctctgtgaaatctcaaatattgttgtaatagtctgtttcaatcttaaaaagaatcaataaaaacaaacaaggg

SEQ ID NO: 446278 - DNA, 1694 bp, Homo sapiens
tacaatcgagccggtaccaggaaacagctatgaccgctataccacctcccgcaggctggatcccatcccacagttgaaatgtgttggaggcacagctggttgtgattcttataccccaaaagtcatacagtgtcagaacaaaggctgggatgggtatgatgtacagtgggaatgtaagacggacttagatattgcatacaaatttggaaaaactgtggtgagctgtgaaggctatgagtcctctgaagaccagtatgtactaagaggttcttgtggcttggagtataatttagattatacagaacttggcctgcagaaactgaaggagtctggaaagcagcacggctttgcctctttctctgattattattataagtggtcctcggcggattcctgtaacatgagtggattgattaccatcgtggtactccttgggatcgcctttgtagtctataagctgttcctgagtgacgggcagtattctcctccaccgtactctgagtatcctccattttcccaccgttaccagagattcaccaactcagcaggacctcctcccccaggctttaagtctgagttcacaggaccacagaatactggccatggtgcaacttctggttttggcagtgcttttacaggacaacaaggatatgaaaattcaggaccagggttctggacaggcttgggaactggtggaatactaggatatttgtttggcagcaatagagcggcaacacccttctcagactcgtggtactacccgtcctatcctccctcctaccctggcacgtggaatagggcttactcaccccttcatggaggctcgggcagctattcggtatgttcaaactcagacacgaaaaccagaactgcatcaggatatggtggtaccaggagacgataaagtagaaagttggagtcaaacactggatgcagaaattttggatttttcatcactttctctttagaaaaaaagtactacctgttaacaattgggaaaaggggatattcaaaagttctgtggtgttatgtccagtgtagctttttgtattctattatttgaggctaaaagttgatgtgtgacaaaatacttatgtgttgtatgtcagtgtaacatgcagatgtatattgcagtttttgaaagtgatcattactgtggaatgctaaaaatacattaatttctaaaacctgtgatgccctaagaagcattaagaatgaaggtgttgtactaatagaaactaagtacagaaaatttcagttttaggtggttgtagctgatgagttattacctcatagagactataatattctatttggtattatattatttgatgtttgctgttcttcaaacatttaaatcaagctttggactaattatgctaatttgtgagttctgatcacttttgagctctgaagctttgaatcattcagtggtggagatggccttctggtaactgaatattaccttctgtaggaaaaggtggaaaataagcatctagaaggttgttgtgaatgactctgtgctggcaaaaatgcttgaaacctctatatttctttcgttcataagaggtaaaggtcaaatttttcaacaaaagtcttttaataacaaaagcatgcagttctctgtgaaatctcaaatattgttgtaatagtctgtttcaatcttaaaaagaatcaataaaaacaaacaaggg

SEQ ID NO: 446279 - DNA, 1821 bp, Homo sapiens
tactttttttacaattattgaggttttaataatacataatttgactacatttcttagatttcgcgtcgtgacgttttcagcctctcaaactgcatcgcctacgcacagaagcttcccgaatctcagacgagacacaacaaagctgcgcgctgccctcgccccgcccgcgggcgcggcggcgacaggccctcggccccgcccacaccgcggcgccacgcctccaacccgcctccagccgtgcctccccaggcccttggccccgcccacaccgcctcgccccgccccaagccgcgctgtgctccaggggcgggggcccacggcggccactcactgagccccacgggccgcagcggagtgacgtagggttggcgcacggatccgttgcggctgcagctctgcagtcgggccgttccttcgccgccgccaggggtagcggtgtagctgcgcagcgtcgcgcgcgctaccgcacccaggttcggcccgtaggcgtctggcagcccggcgccatcttcatcgagcgccatggccgcagcctgcgggccgggagcggccgggtactgcttgctcctcggcttgcatttgtttctgctgaccgcgggccctgccctgggctggaacgaccctgacagaatgttgctgcgggatgtaaaagctcttaccctccactatgaccgctataccacctcccgcaggctggatcccatcccacagttgaaatgtgttggaggcacagctggttgtgattcttataccccaaaagtcatacagtgtcagaacaaaggctgggatgggtatgatgtacagtgggaatgtaagacggacttagatattgcatacaaatttggaaaaactgtggtgagctgtgaaggctatgagtcctctgaagaccagtatgtactaagaggttcttgtggcttggagtataatttagattatacagaacttggcctgcagaaactgaaggagtctggaaagcagcacggctttgcctctttctctgattattattataagtggtcctcggcggattcctgtaacatgagtggattgattaccatcgtggtactccttgggatcgcctttgtagtctataagctgttcctgagtgacgggcagtattctcctccaccgtactctgagtatcctccattttcccaccgttaccagagattcaccaactcagcaggacctcctcccccaggctttaagtctgagttcacaggaccacagaatactggccatggtgcaacttctggttttggcagtgcttttacaggacaacaaggatatgaaaattcaggaccagggttctggacaggcttgggaactggtggaatactaggatatttgtttggcagcaatagagcggcaacacccttctcagactcgtggtactacccgtcctatcctccctcctaccctggcacgtggaatagggcttactcaccccttcatggaggctcgggcagctattcggtatgttcaaactcagacacgaaaaccagaactgcatcaggatatggtggtaccaggagacgataaagtagaaagttggagtcaaacactggatgcagaaattttggatttttcatcactttctctttagaaaaaaagtactacctgttaacaattgggaaaaggggatattcaaaagttctgtggtgttatgtccagtgtagctttttgtattctattatttgaggctaaaagttgatgtgtgacaaaatacttatgtgttgtatgtcagtgtaacatgcagatgtatattgcagtttttgaaggtactatactctgcggttatcgtatatactcttttatcct

SEQ ID NO: 446280 - DNA, 1583 bp, Homo sapiens
gttctgaggatccctttaacgtatcagaacaaaggctgggatgggtatgatgtactgggaatgtaagacggacttagatattgcatacaaatttggaaaaactgtggtgagctgtgaaggctatgagtcctctgaagaccagtatgtactaagaggttcttgtggcttggagtataatttagattatacagaacttggcctgcagaaactgaaggagtctggaaagcagcacggctttgcctctttctctgattattattataagtggtcctcggcggattcctgtaacatgagtggattgattaccatcgtggtactccttgggatcgcctttgtagtctataagctgttcctgagtgacgggcagtattctcctccaccgtactctgagtatcctccattttcccaccgttaccagagattcaccaactcagcaggacctcctcccccaggctttaagtctgagttcacaggaccacagaatactggccatggtgcaacttctggttttggcagtgcttttacaggacaacaaggatatgaaaattcaggaccagggttctggacaggcttgggaactggtggaatactaggatatttgtttggcagcaatagagcggcaacacccttctcagactcgtggtactacccgtcctatcctccctcctaccctggcacgtggaatagggcttactcaccccttcatggaggctcgggcagctattcggtatgttcaaactcagacacgaaaaccagaactgcatcaggatatggtggtaccaggagacgataaagtagaaagttggagtcaaacactggatgcagaaattttggatttttcatcactttctctttagaaaaaaagtactacctgttaacaattgggaaaaggggatattcaaaagttctgtggtgttatgtccagtgtagctttttgtattctattatttgaggctaaaagttgatgtgtgacaaaatacttatgtgttgtatgtcagtgtaacatgcagatgtatattgcagtttttgaaagtgatcattactgtggaatgctaaaaatacattaatttctaaaacctgtgatgccctaagaagcattaagaatgaaggtgttgtactaatagaaactaagtacagaaaatttcagttttaggtggttgtagctgatgagttattacctcatagagactataatattctatttggtattatattatttgatgtttgctgttcttcaaacatttaaatcaagctttggactaattatgctaatttgtgagttctgatcacttttgagctctgaagctttgaatcattcagtggtggagatggccttctggtaactgaatattaccttctgtaggaaaaggtggaaaataagcatctagaaggttgttgtgaatgactctgtgctggcaaaaatgcttgaaacctctatatttctttcgttcataagaggtaaaggtcaaatttttcaacaaaagtcttttaataacaaaagcatgcagttctctgtgaaatctcaaatattgttgtaatagtctgtttcaatcttaaaaagaatcaataaaaacaaacaaggg

SEQ ID NO: 446281 - DNA, 2282 bp, Homo sapiens
tactttttttacaattattgaggttttaataatacataatttgactacatttcttagatttcgcgtcgtgacgttttcagcctctcaaactgcatcgcctacgcacagaagcttcccgaatctcagacgagacacaacaaagctgcgcgctgccctcgccccgcccgcgggcgcggcggcgacaggccctcggccccgcccacaccgcggcgccacgcctccaacccgcctccagccgtgcctccccaggcccttggccccgcccacaccgcctcgccccgccccaagccgcgctgtgctccaggggcgggggcccacggcggccactcactgagccccacgggccgcagcggagtgacgtagggttggcgcacggatccgttgcggctgcagctctgcagtcgggccgttccttcgccgccgccaggggtagcggtgtagctgcgcagcgtcgcgcgcgctaccgcacccaggttcggcccgtaggcgtctggcagcccggcgccatcttcatcgagcgccatggccgcagcctgcgggccgggagcggccgggtactgcttgctcctcggcttgcatttgtttctgctgaccgcgggccctgccctgggctggaacgaccctgacagaatgttgctgcgggatgtaaaagctcttaccctccactatgaccgctataccacctcccgcaggctggatcccatcccacagttgaaatgtgttggaggcacagctggttgtgattcttataccccaaaagtcatacagtgtcagaacaaaggctgggatgggtatgatgtacagtgggaatgtaagacggacttagatattgcatacaaatttggaaaaaagaggttcttgtggcttggagtataatttagattatacagaacttggcctgcagaaactgaaggagtctggaaagcagcacggctttgcctctttctctgattattattataagtggtcctcggcggattcctgtaacatgagtggattgattaccatcgtggtactccttgggatcgcctttgtagtctataagctgttcctgagtgacgggcagtattctcctccaccgtactctgagtatcctccattttcccaccgttaccagagattcaccaactcagcaggacctcctcccccaggctttaagtctgagttcacaggaccacagaatactggccatggtgcaacttctggttttggcagtgcttttacaggacaacaaggatatgaaaattcaggaccagggttctggacaggcttgggaactggtggaatactaggatatttgtttggcagcaatagagcggcaacacccttctcagactcgtggtactacccgtcctatcctccctcctaccctggcacgtggaatagggcttactcaccccttcatggaggctcgggcagctattcggtatgttcaaactcagacacgaaaaccagaactgcatcaggatatggtggtaccaggagacgataaagtagaaagttggagtcaaacactggatgcagaaattttggatttttcatcactttctctttagaaaaaaagtactacctgttaacaattgggaaaaggggatattcaaaagttctgtggtgttatgtccagtgtagctttttgtattctattatttgaggctaaaagttgatgtgtgacaaaatacttatgtgttgtatgtcagtgtaacatgcagatgtatattgcagtttttgaaagtgatcattactgtggaatgctaaaaatacattaatttctaaaacctgtgatgccctaagaagcattaagaatgaaggtgttgtactaatagaaactaagtacagaaaatttcagttttaggtggttgtagctgatgagttattacctcatagagactataatattctatttggtattatattatttgatgtttgctgttcttcaaacatttaaatcaagctttggactaattatgctaatttgtgagttctgatcacttttgagctctgaagctttgaatcattcagtggtggagatggccttctggtaactgaatattaccttctgtaggaaaaggtggaaaataagcatctagaaggttgttgtgaatgactctgtgctggcaaaaatgcttgaaacctctatatttctttcgttcataagaggtaaaggtcaaatttttcaacaaaagtcttttaataacaaaagcatgcagttctctgtgaaatctcaaatattgttgtaatagtctgtttcaatcttaaaaagaatcaataaaaacaaacaaggg

SEQ ID NO: 446282 - DNA, 2249 bp, Homo sapiens
tactttttttacaattattgaggttttaataatacataatttgactacatttcttagatttcgcgtcgtgacgttttcagcctctcaaactgcatcgcctacgcacagaagcttcccgaatctcagacgagacacaacaaagctgcgcgctgccctcgccccgcccgcgggcgcggcggcgacaggccctcggccccgcccacaccgcggcgccacgcctccaacccgcctccagccgtgcctccccaggcccttggccccgcccacaccgcctcgccccgccccaagccgcgctgtgctccaggggcgggggcccacggcggccactcactgagccccacgggccgcagcggagtgacgtagggttggcgcacggatccgttgcggctgcagctctgcagtcgggccgttccttcgccgccgccaggggtagcggtgtagctgcgcagcgtcgcgcgcgctaccgcacccaggttcggcccgtaggcgtctggcagcccggcgccatcttcatcgagcgccatggccgcagcctgcgggccgggagcggccgggtactgcttgctcctcggcttgcatttgtttctgctgaccgcgggccctgccctgggctggaacgaccctgacagaatgttgctgcgggatgtaaaagctcttaccctccactatgaccgctataccacctcccgcaggctggatcccatcccacagttgaaatgtgttggaggcacagctggttgtgattcttataccccaaaagtcatacagtgtcagaacaaaggctgggatgggtatgatgtacagtgggaatgtaagacggacttagatattgcatacaaatttggaaaaactgtggtgagctgtgaaggctatgagtcctctgaagaccagtatgtactaagaggttcttgtggcttggagtataatttagattatacagaacttggcctgtaacatgagtggattgattaccatcgtggtactccttgggatcgcctttgtagtctataagctgttcctgagtgacgggcagtattctcctccaccgtactctgagtatcctccattttcccaccgttaccagagattcaccaactcagcaggacctcctcccccaggctttaagtctgagttcacaggaccacagaatactggccatggtgcaacttctggttttggcagtgcttttacaggacaacaaggatatgaaaattcaggaccagggttctggacaggcttgggaactggtggaatactaggatatttgtttggcagcaatagagcggcaacacccttctcagactcgtggtactacccgtcctatcctccctcctaccctggcacgtggaatagggcttactcaccccttcatggaggctcgggcagctattcggtatgttcaaactcagacacgaaaaccagaactgcatcaggatatggtggtaccaggagacgataaagtagaaagttggagtcaaacactggatgcagaaattttggatttttcatcactttctctttagaaaaaaagtactacctgttaacaattgggaaaaggggatattcaaaagttctgtggtgttatgtccagtgtagctttttgtattctattatttgaggctaaaagttgatgtgtgacaaaatacttatgtgttgtatgtcagtgtaacatgcagatgtatattgcagtttttgaaagtgatcattactgtggaatgctaaaaatacattaatttctaaaacctgtgatgccctaagaagcattaagaatgaaggtgttgtactaatagaaactaagtacagaaaatttcagttttaggtggttgtagctgatgagttattacctcatagagactataatattctatttggtattatattatttgatgtttgctgttcttcaaacatttaaatcaagctttggactaattatgctaatttgtgagttctgatcacttttgagctctgaagctttgaatcattcagtggtggagatggccttctggtaactgaatattaccttctgtaggaaaaggtggaaaataagcatctagaaggttgttgtgaatgactctgtgctggcaaaaatgcttgaaacctctatatttctttcgttcataagaggtaaaggtcaaatttttcaacaaaagtcttttaataacaaaagcatgcagttctctgtgaaatctcaaatattgttgtaatagtctgtttcaatcttaaaaagaatcaataaaaacaaacaaggg

SEQ ID NO: 446283 - DNA, 1971 bp, Homo sapiens
tactttttttacaattattgaggttttaataatacataatttgactacatttcttagatttcgcgtcgtgacgttttcagcctctcaaactgcatcgcctacgcacagaagcttcccgaatctcagacgagacacaacaaagctgcgcgctgccctcgccccgcccgcgggcgcggcggcgacaggccctcggccccgcccacaccgcggcgccacgcctccaacccgcctccagccgtgcctccccaggcccttggccccgcccacaccgcctcgccccgccccaagccgcgctgtgctccaggggcgggggcccacggcggccactcactgagccccacgggccgcagcggagtgacgtagggttggcgcacggatccgttgcggctgcagctctgcagtcgggccgttccttcgccgccgccaggggtagcggtgtagctgcgcagcgtcgcgcgcgctaccgcacccaggttcggcccgtaggcgtctggcagcccggcgccatcttcatcgagcgccatggccgcagcctgcgggccgggagcggccgggtactgcttgctcctcggcttgcatttgtttctgctgaccgcgggccctgccctgggctggaacgaccctgacagaatgttgctgcgggatgtaaaagctcttaccctccactatgaccgctataccacctcccgcaggctggatcccatcccacagttgaaatgtgttggaggcacagctggttgtgattcttataccccaaaagtcatacagtgtcagaacaaaggctgggatgggtatgatgtacagtgggaatgtaagacggacttagatattgcatacaaatttggaaaaactgtggtgagctgtgaaggctatgagtcctctgaagaccagtatgtactaagaggttcttgtggcttggagtataatttagattatacagaacttggcctgcagaaactgaaggagtctggaaagcagcacggctttgcctctttctctgattattattataagtggtcctcggcggattcctgtaacatgagtggattgattaccatcgtggtactccttgggatcgcctttgtagtctataagctgttcctgagtgacgggcagtattctcctccaccgtactctgagtatcctccattttcccaccgttaccagagattcaccaactcagcaggacctcctcccccaggctttaagtctgagttcacaggaccacagaatactggccatggtgcaacttctggttttggcagtgcttttacaggacaacaaggatatgaaaattcaggaccagggttctggacaggcttgggaactggtggaatactaggatatttgtttggcagcaatagagcggcaacacccttctcagactcgtggtactacccgtcctatcctccctcctaccctggcacgtggaatagggcttactcaccccttcatggaggctcgggcagctattcggtatgttcaaactcagacacgaaaaccagaactgcatcaggtaagagcaaaaaatacaagttccttttacctaggagtaaagtacagaaatagtttgggaactttagaagatgattatctgtttagcaaccatggttttatttggtgtacctaccaaaaatattaatagcacagttaactgagatcccacttttaaacattctttaaaaatcaaacagggatttgatttaggcttagctctaccatagaccaaggttttaacttgaaccttactgggtgctagcttccccatatatttaattctgtgatctctagagatcctttaagttctaaactagacttttctaagtagaagcttaaacttaaaattcaataacattcaaaaaagatattgaggtatactttaattttcaaaaatatgattgtaatgtttattggaatgctcagaggatattttgtaaaaagcaaagatacaaaaaaaacaaaggaataact

SEQ ID NO: 446284 - DNA, 1471 bp, Homo sapiens
  misc_feature (95)..(95): n is a, c, g, or t
acagcgaaatctaaagcaggtcatgtcagtccctggcagggaaccctccaccagcttcccgtgttccccaggacaaaagccccactcctcactgnggctccacagccctgtgtccagggcccctgccagtgtccagcttcctcctgggaacttgccctcatctcatgactacctctgccccagtcacagttgcttttctcttttccccatccccttcctgtctcaggttattgtccctgcctcgtgccgaattcggcacgagctccaccgtactctgagtatcctccattttcccaccgttaccagagattcaccaactcagcaggacctcctcccccaggctttaagtctgagttcacaggaccacagaatactggccatggtgcaacttctggttttggcagtgcttttacaggacaacaaggatatgaaaattcaggaccagggttctggacaggcttgggaactggtggaatactaggatatttgtttggcagcaatagagcggcaacacccttctcagactcgtggtactacccgtcctatcctccctcctaccctggcacgtggaatagggcttactcaccccttcatggaggctcgggcagctattcggtatgttcaaactcagacacgaaaaccagaactgcatcaggatatggtggtaccaggagacgataaagtagaaagttggagtcaaacactggatgcagaaattttggatttttcatcactttctctttagaaaaaaagtactacctgttaacaattgggaaaaggggatattcaaaagttctgtggtgttatgtccagtgtagctttttgtattctattatttgaggctaaaagttgatgtgtgacaaaatacttatgtgttgtatgtcagtgtaacatgcagatgtatattgcagtttttgaaagtgatcattactgtggaatgctaaaaatacattaatttctaaaacctgtgatgccctaagaagcattaagaatgaaggtgttgtactaatagaaactaagtacagaaaatttcagttttaggtggttgtagctgatgagttattacctcatagagactataatattctatttggtattatattatttgatgtttgctgttcttcaaacatttaaatcaagctttggactaattatgctaatttgtgagttctgatcacttttgagctctgaagctttgaatcattcagtggtggagatggccttctggtaactgaatattaccttctgtaggaaaaggtggaaaataagcatctagaaggttgttgtgaatgactctgtgctggcaaaaatgcttgaaacctctatatttctttcgttcataagaggtaaaggtcaaatttttcaacaaaagtcttttaataacaaaagcatgcagttctctgtgaaatctcaaatattgttgtaatagtctgtttcaatcttaaaaagaatcaataaaaacaaacaaggg

SEQ ID NO: 446285 - DNA, 1553 bp, Homo sapiens
tactttttttacaattattgaggttttaataatacataatttgactacatttcttagatttcgcgtcgtgacgttttcagcctctcaaactgcatcgcctacgcacagaagcttcccgaatctcagacgagacacaacaaagctgcgcgctgccctcgccccgcccgcgggcgcggcggcgacaggccctcggccccgcccacaccgcggcgccacgcctccaacccgcctccagccgtgcctccccaggcccttggccccgcccacaccgcctcgccccgccccaagccgcgctgtgctccaggggcgggggcccacggcggccactcactgagccccacgggccgcagcggagtgacgtagggttggcgcacggatccgttgcggctgcagctctgcagtcgggccgttccttcgccgccgccaggggtagcggtgtagctgcgcagcgtcgcgcgcgctaccgcacccaggttcggcccgtaggcgtctggcagcccggcgccatcttcatcgagcgccatggccgcagcctgcgggccgggagcggccgggtactgcttgctcctcggcttgcatttgtttctgctgaccgcgggccctgccctgggctggaacgaccctgacagaatgttgctgcgggatgtaaaagctcttaccctccactatgaccgctataccacctcccgcaggctggatcccatcccacagttgaaatgtgttggaggcacagctggttgtgattcttataccccaaaagtcatacagtgtcagaacaaaggctgggatgggtatgatgtacagtgggaatgtaagacggacttagatattgcatacaaatttggaaaaactgtggtgagctgtgaaggctatgagtcctctgaagaccagtatgtactaagaggttcttgtggcttggagtataatttagattatacagaacttggcctgcagaaactgaaggagtctggaaagcagcacggctttgcctctttctctgattattattataagtggtcctcggcggattcctgtaacatgagtggattgattaccatcgtggtactccttgggatcgcctttgtagtctataagctgttcctgagtgacgggcagtattctcctccaccgtactctgagtatcctccattttcccaccgttaccagagattcaccaactcagcaggacctcctcccccaggctttaagtctgagttcacaggaccacagaatactggccatggtgcaacttctggttttggcagtgcttttacaggacaacaaggatatgaaaattcaggaccagggttctggacaggcttgggaactggtggaatactaggatatttgtttggcagcaataggttgtgaatgactctgtgctggcaaaaatgcttgaaacctctatatttctttcgttcataagaggtaaaggtcaaatttttcaacaaaagtcttttaataacaaaagcatgcagttctctgtgaaatctcaaatattgttgtaatagtctgtttcaatcttaaaaagaatcaataaaaacaaacaaggg

SEQ ID NO: 446286 - DNA, 1417 bp, Homo sapiens
tactttttttacaattattgaggttttaataatacataatttgactacatttcttagatttcgcgtcgtgacgttttcagcctctcaaactgcatcgcctacgcacagaagcttcccgaatctcagacgagacacaacaaagctgcgcgctgccctcgccccgcccgcgggcgcggcggcgacaggccctcggccccgcccacaccgcggcgccacgcctccaacccgcctccagccgtgcctccccaggcccttggccccgcccacaccgcctcgccccgccccaagccgcgctgtgctccaggggcgggggcccacggcggccactcactgagccccacgggccgcagcggagtgacgtagggttggcgcacggatccgttgcggctgcagctctgcagtcgggccgttccttcgccgccgccaggggtagcggtgtagctgcgcagcgtcgcgcgcgctaccgcacccaggttcggcccgtaggcgtctggcagcccggcgccatcttcatcgagcgccatggccgcagcctgcgggccgggagcggccgggtactgcttgctcctcggcttgcatttgtttctgctgaccgcgggccctgccctgggctggaacgaccctgacagaatgttgctgcgggatgtaaaagctcttaccctccactatgaccgctataccacctcccgcaggctggatcccatcccacagttgaaatgtgttggaggcacagctggttgtgattcttataccccaaaagtcatacagtgtcagaacaaaggctgggatgggtatgatgtacagtgggaatgtaagacggacttagatattgcatacaaatttggaaaaactgtggtgagctgtgaaggctatgagtcctctgaagaccagtatgtactaagaggttcttgtggcttggagtataatttagattatacagaacttggcctgcagaaactgaaggagtctggaaagcagcacggctttgcctctttctctgattattattataagtggtcctcggcggattcctgtaacatgagtggattgattaccatcgtggtactccttgggatcgcctttgtagtctataagctgttcctgagtgacgggcagtattctcctccaccgtactctgagtatcctccattttcccaccgttaccagagattcaccaactcagcaggacctcctcccccaggctttaagtctgagttcacaggaccacagaatactggccatggtgcaacttctggttttggcagtgcttttacaggacaacaaggatatgaaaattcaggaccagggttctggacaggcttgggaactggtggaatactaggatatttgtttggcagcaatagtagtaccacgagtctgagaagggtgttgccgctctattgctgccgtcgacgcg

SEQ ID NO: 446287 - DNA, 959 bp, Homo sapiens
tagaggatccactctctccacactggctctctctcctccctcctaccctggcacgtggaatagggcttactcaccccttcatggaggctcgggcagctattcggtatgttcaaactcagacacgaaaaccagaactgcatcaggatatggtggtaccaggagacgataaagtagaaagttggagtcaaacactggatgcagaaattttggatttttcatcactttctctttagaaaaaaagtactacctgttaacaattgggaaaaggggatattcaaaagttctgtggtgttatgtccagtgtagctttttgtattctattatttgaggctaaaagttgatgtgtgacaaaatacttatgtgttgtatgtcagtgtaacatgcagatgtatattgcagtttttgaaagtgatcattactgtggaatgctaaaaatacattaatttctaaaacctgtgatgccctaagaagcattaagaatgaaggtgttgtactaatagaaactaagtacagaaaatttcagttttaggtggttgtagctgatgagttattacctcatagagactataatattctatttggtattatattatttgatgtttgctgttcttcaaacatttaaatcaagctttggactaattatgctaatttgtgagttctgatcacttttgagctctgaagctttgaatcattcagtggtggagatggccttctggtaactgaatattaccttctgtaggaaaaggtggaaaataagcatctagaaggttgttgtgaatgactctgtgctggcaaaaatgcttgaaacctctatatttctttcgttcataagaggtaaaggtcaaatttttcaacaaaagtcttttaataacaaaagcatgcagttctctgtgaaatctcaaatattgttgtaatagtctgtttcaatcttaaaaagaatcaataaaaacaaacaaggg

SEQ ID NO: 446288 - DNA, 2242 bp, Homo sapiens
tactttttttacaattattgaggttttaataatacataatttgactacatttcttagatttcgcgtcgtgacgttttcagcctctcaaactgcatcgcctacgcacagaagcttcccgaatctcagacgagacacaacaaagctgcgcgctgccctcgccccgcccgcgggcgcggcggcgacaggccctcggccccgcccacaccgcggcgccacgcctccaacccgcctccagccgtgcctccccaggcccttggccccgcccacaccgcctcgccccgccccaagccgcgctgtgctccaggggcgggggcccacggcggccactcactgagccccacgggccgcagcggagtgacgtagggttggcgcacggatccgttgcggctgcagctctgcagtcgggccgttccttcgccgccgccaggggtagcggtgtagctgcgcagcgtcgcgcgcgctaccgcacccaggttcggcccgtaggcgtctggcagcccggcgccatcttcatcgagcgccatggccgcagcctgcgggccgggagcggccgggtactgcttgctcctcggcttgcatttgtttctgctgaccgcgggccctgccctgggctggaacgaccctgacagaatgttgctgcgggatgtaaaagctcttaccctccactatgaccgctataccacctcccgcaggctggatcccatcccacagttgaaatgtgttggaggcacagctggttgtgattcttataccccaaaagtcatacagtgtcagaacaaaggctgggatgggtatgatgtacagtgggaatgtaagacggacttagatattgcatacaaatttggaaaaaagaggttcttgtggcttggagtataatttagattatacagaacttggcctgcagaaactgaaggagtctggaaagcagcacggctttgcctctttctctgattattattataagtggtcctcggcggattcctgtaacatgagtggattgattaccatcgtggtactccttgggatcgcctttgtagtctataagctgttcctgagtgacgggcagtattctcctccaccgtactctgagtatcctccattttcccaccgttaccagagattcaccaactcagcaggacctcctcccccaggctttaagtctgagttcacaggaccacagaatactggccatggtgcaacttctggttttggcagtgcttttacaggacaacaaggatatgaaaattcaggaccagggttctggacaggcttgggaactggtggaatactaggatatttgtttggcagcaatagagcggcaacacccttctcagactcgtggtactacccgtcctatcctccctcctaccctggcacgtggaatagggcttactcaccccttcatggaggctcgggcagctattcggatatggtggtaccaggagacgataaagtagaaagttggagtcaaacactggatgcagaaattttggatttttcatcactttctctttagaaaaaaagtactacctgttaacaattgggaaaaggggatattcaaaagttctgtggtgttatgtccagtgtagctttttgtattctattatttgaggctaaaagttgatgtgtgacaaaatacttatgtgttgtatgtcagtgtaacatgcagatgtatattgcagtttttgaaagtgatcattactgtggaatgctaaaaatacattaatttctaaaacctgtgatgccctaagaagcattaagaatgaaggtgttgtactaatagaaactaagtacagaaaatttcagttttaggtggttgtagctgatgagttattacctcatagagactataatattctatttggtattatattatttgatgtttgctgttcttcaaacatttaaatcaagctttggactaattatgctaatttgtgagttctgatcacttttgagctctgaagctttgaatcattcagtggtggagatggccttctggtaactgaatattaccttctgtaggaaaaggtggaaaataagcatctagaaggttgttgtgaatgactctgtgctggcaaaaatgcttgaaacctctatatttctttcgttcataagaggtaaaggtcaaatttttcaacaaaagtcttttaataacaaaagcatgcagttctctgtgaaatctcaaatattgttgtaatagtctgtttcaatcttaaaaagaatcaataaaaacaaacaaggg

SEQ ID NO: 446289 - DNA, 887 bp, Homo sapiens
acccactactggctacccactactggcccactactggccaaactcagacacgaaaaccagaactgcatcaggatatggtggtaccaggagacgataaagtagaaagttggagtcaaacactggatgcagaaattttggatttttcatcactttctctttagaaaaaaagtactacctgttaacaattgggaaaaggggatattcaaaagttctgtggtgttatgtccagtgtagctttttgtattctattatttgaggctaaaagttgatgtgtgacaaaatacttatgtgttgtatgtcagtgtaacatgcagatgtatattgcagtttttgaaagtgatcattactgtggaatgctaaaaatacattaatttctaaaacctgtgatgccctaagaagcattaagaatgaaggtgttgtactaatagaaactaagtacagaaaatttcagttttaggtggttgtagctgatgagttattacctcatagagactataatattctatttggtattatattatttgatgtttgctgttcttcaaacatttaaatcaagctttggactaattatgctaatttgtgagttctgatcacttttgagctctgaagctttgaatcattcagtggtggagatggccttctggtaactgaatattaccttctgtaggaaaaggtggaaaataagcatctagaaggttgttgtgaatgactctgtgctggcaaaaatgcttgaaacctctatatttctttcgttcataagaggtaaaggtcaaatttttcaacaaaagtcttttaataacaaaagcatgcagttctctgtgaaatctcaaatattgttgtaatagtctgtttcaatcttaaaaagaatcaataaaaacaaacaaggg

SEQ ID NO: 446290 - DNA, 856 bp, Homo sapiens
ccggtgtttatcgatgccaccatatccagaactgcatcaggatatggtggtaccaggagacgataaagtagaaagttggagtcaaacactggatgcagaaattttggatttttcatcactttctctttagaaaaaaagtactacctgttaacaattgggaaaaggggatattcaaaagttctgtggtgttatgtccagtgtagctttttgtattctattatttgaggctaaaagttgatgtgtgacaaaatacttatgtgttgtatgtcagtgtaacatgcagatgtatattgcagtttttgaaagtgatcattactgtggaatgctaaaaatacattaatttctaaaacctgtgatgccctaagaagcattaagaatgaaggtgttgtactaatagaaactaagtacagaaaatttcagttttaggtggttgtagctgatgagttattacctcatagagactataatattctatttggtattatattatttgatgtttgctgttcttcaaacatttaaatcaagctttggactaattatgctaatttgtgagttctgatcacttttgagctctgaagctttgaatcattcagtggtggagatggccttctggtaactgaatattaccttctgtaggaaaaggtggaaaataagcatctagaaggttgttgtgaatgactctgtgctggcaaaaatgcttgaaacctctatatttctttcgttcataagaggtaaaggtcaaatttttcaacaaaagtcttttaataacaaaagcatgcagttctctgtgaaatctcaaatattgttgtaatagtctgtttcaatcttaaaaagaatcaataaaaacaaacaaggg

SEQ ID NO: 446291 - DNA, 1307 bp, Homo sapiens
tactttttttacaattattgaggttttaataatacataatttgactacatttcttagatttcgcgtcgtgacgttttcagcctctcaaactgcatcgcctacgcacagaagcttcccgaatctcagacgagacacaacaaagctgcgcgctgccctcgccccgcccgcgggcgcggcggcgacaggccctcggccccgcccacaccgcggcgccacgcctccaacccgcctccagccgtgcctccccaggcccttggccccgcccacaccgcctcgccccgccccaagccgcgctgtgctccaggggcgggggcccacggcggccactcactgagccccacgggccgcagcggagtgacgtagggttggcgcacggatccgttgcggctgcagctctgcagtcgggccgttccttcgccgccgccaggggtagcggtgtagctgcgcagcgtcgcgcgcgctaccgcacccaggttcggcccgtaggcgtctggcagcccggcgccatcttcatcgagcgccatggccgcagcctgcgggccgggagcggccgggtactgcttgctcctcggcttgcatttgtttctgctgaccgcgggccctgccctgggctggaacgaccctgacagaatgttgctgcgggatgtaaaagctcttaccctccactatgaccgctataccacctcccgcaggctggatcccatcccacagttgaaatgtgttggaggcacagctggttgtgattcttataccccaaaagtcatacagtgtcagaacaaaggctgggatgggtatgatgtacagtgggaatgtaagacggacttagatattgcatacaaatttggaaaaactgtggtgagctgtgaaggctatgagtcctctgaagaccagtatgtactaagaggttcttgtggcttggagtataatttagattatacagaacttggcctgcagaaactgaaggagtctggaaagcagcacggctttgcctctttctctgattattattataagtggtcctcggcggattcctgtaacatgagtggattgattaccatcgtggtactccttgggatcgcctttgtagtctataagctgttcctgagtgacgggcagtattctcctccaccgtactctgagtatcctccattttcctgtacatcatacccatcccagcctttgttctgacactgtatgacttttggggtataagaatcacaaccagctgtgcctccacacatttcaactgtgggatggatccgcctgcgggatggtggtatacggtcatagtggaagtaagagctttg

SEQ ID NO: 446292 - DNA, 1016 bp, Homo sapiens
tactttttttacaattattgaggttttaataatacataatttgactacatttcttagatttcgcgtcgtgacgttttcagcctctcaaactgcatcgcctacgcacagaagcttcccgaatctcagacgagacacaacaaagctgcgcgctgccctcgccccgcccgcgggcgcggcggcgacaggccctcggccccgcccacaccgcggcgccacgcctccaacccgcctccagccgtgcctccccaggcccttggccccgcccacaccgcctcgccccgccccaagccgcgctgtgctccaggggcgggggcccacggcggccactcactgagccccacgggccgcagcggagtgacgtagggttggcgcacggatccgttgcggctgcagctctgcagtcgggccgttccttcgccgccgccaggggtagcggtgtagctgcgcagcgtcgcgcgcgctaccgcacccaggttcggcccgtaggcgtctggcagcccggcgccatcttcatcgagcgccatggccgcagcctgcgggccgggagcggccgggtactgcttgctcctcggcttgcatttgtttctgctgaccgcgggccctgccctgggctggaacgaccctgacagaatgttgctgcgggatgtaaaagctcttaccctccactatgaccgctataccacctcccgcaggctggatcccatcccacagttgaaatgtgttggaggcacagctggttgtgattcttataccccaaaagtcatacagtgtcagaacaaaggctgggatgggtatgatgtacagtgggaatgtaagacggacttagatattgcatacaaatttggaaaaactgtggtgagctgtgaaggctatgagtcctctgaagaccagtatgtactaagaggttcttgtggcttggagtataatttagattatacagaacttggcctgcagaaactgaaggagtctgttttttcccaaggcaacggacggaaacagctaagagcgacagattg

SEQ ID NO: 446293 - DNA, 745 bp, Homo sapiens
tactttttttacaattattgaggttttaataatacataatttgactacatttcttagatttcgcgtcgtgacgttttcagcctctcaaactgcatcgcctacgcacagaagcttcccgaatctcagacgagacacaacaaagctgcgcgctgccctcgccccgcccgcgggcgcggcggcgacaggccctcggccccgcccacaccgcggcgccacgcctccaacccgcctccagccgtgcctccccaggcccttggccccgcccacaccgcctcgccccgccccaagccgcgctgtgctccaggggcgggggcccacggcggccactcactgagccccacgggccgcagcggagtgacgtagggttggcgcacggatccgttgcggctgcagctctgcagtcgggccgttccttcgccgccgccaggggtagcggtgtagctgcgcagcgtcgcgcgcgctaccgcacccaggttcggcccgtaggcgtctggcagcccggcgccatcttcatcgagcgccatggccgcagcctgcgggccgggagcggccgggtactgcttgctcctcggcttgcatttgtttctgctgaccgcgggccctgccctgggctggaacgaccctggtgagtgctgccagggccctcaggcgcttcgttcgcccttttccgccgccgtcagccggtgcaggctcccctgcgtttccgtgcgccgtctccccggagcctgggtgcccggatacccca

SEQ ID NO: 446294 - DNA, 330 bp, Homo sapiens
acagaatactggccatggtgcaacttctggttttggcagtgcttttacaggacaacaaggatatgaaaattcaggaccagggttctggacaggcttgggaactggtggaatactaggatatttgtttggcagcaatagaggtaagctttttgcattgatctcacttgctctttaattcaagaggcttgttttgcttacaatttaactgcatttagttttgctaaggaaaataaattgtggtgacgttagcctattaaataagattctctgggaagggggaaggtacactatatttgttttgatcagtattgtgtatgttattttctttca

SEQ ID NO: 446295 - DNA, 2368 bp, Homo sapiens
  misc_feature (2346)..(2346): n is a, c, g, or t
tactttttttacaattattgaggttttaataatacataatttgactacatttcttagatttcgcgtcgtgacgttttcagcctctcaaactgcatcgcctacgcacagaagcttcccgaatctcagacgagacacaacaaagctgcgcgctgccctcgccccgcccgcgggcgcggcggcgacaggccctcggccccgcccacaccgcggcgccacgcctccaacccgcctccagccgtgcctccccaggcccttggccccgcccacaccgcctcgccccgccccaagccgcgctgtgctccaggggcgggggcccacggcggccactcactgagccccacgggccgcagcggagtgacgtagggttggcgcacggatccgttgcggctgcagctctgcagtcgggccgttccttcgccgccgccaggggtagcggtgtagctgcgcagcgtcgcgcgcgctaccgcacccaggttcggcccgtaggcgtctggcagcccggcgccatcttcatcgagcgccatggccgcagcctgcgggccgggagcggccgggtactgcttgctcctcggcttgcatttgtttctgctgaccgcgggccctgccctgggctggaacgaccctgacagaatgttgctgcgggatgtaaaagctcttaccctccactatgaccgctataccacctcccgcaggctggatcccatcccacagttgaaatgtgttggaggcacagctggttgtgattcttataccccaaaagtcatacagtgtcagaacaaaggctgggatgggtatgatgtacagtgggaatgtaagacggacttagatattgcatacaaatttggaaaaactgtggtgagctgtgaaggctatgagtcctctgaagaccagtatgtactaagaggttcttgtggcttggagtataatttagattatacagaacttggcctgcagaaactgaaggagtctggaaagcagcacggctttgcctctttctctgattattattataagtggtcctcggcggattcctgtaacatgagtggattgattaccatcgtggtactccttgggatcgcctttgtagtctataagctgttcctgagtgacgggcagtattctcctccaccgtactctgagtatcctccattttcccaccgttaccagagattcaccaactcagcaggacctcctcccccaggctttaagtctgagttcacaggaccacagaatactggccatggtgcaacttctggttttggcagtgcttttacaggacaacaaggatatgaaaattcaggaccagggttctggacaggcttgggaactggtggaatactaggatatttgtttggcagcaatagagcggcaacacccttctcagactcgtggtactacccgtcctatcctccctcctaccctggcacgtggaatagggcttactcaccccttcatggaggctcgggcagctattcggtatgttcaaactcagacacgaaaaccagaactgcatcaggatatggtggtaccaggagacgataaagtagaaagttggagtcaaacactggatgcagaaattttggatttttcatcactttctctttagaaaaaaagtactacctgttaacaattgggaaaaggggatattcaaaagttctgtggtgttatgtccagtgtagctttttgtattctattatttgaggctaaaagttgatgtgtgacaaaatacttatgtgttgtatgtcagtgtaacatgcagatgtatattgcagtttttgaaagtgatcattactgtggaatgctaaaaatacattaatttctaaaacctgtgatgccctaagaagcattaagaatgaaggtgttgtactaatagaaactaagtacagaaaatttcagttttaggtggttgtagctgatgagttattacctcatagagactataatattctatttggtattatattatttgatgtttgctgttcttcaaacatttaaatcaagctttggactaattatgctaatttgtgagttctgatcacttttgagctctgaagctttgaatcattcagtggtggagatggccttctggtaactgaatattaccttctgtaggaaaaggtggaaaataagcatctagaaggttgttgtgaatgactctgtgctggcaaaaatgcttgaaacctctatatttctttcgttcataagaggtaaaggtcaaatttttcaacaaaagtcttttaataacaaaagcatgcagttctctgtgaaatctcaaatattgttgtaatagtctgtttcaatcttaaaaagaatcaataaaaacaaacaagggaaaaaaataatatncttaacaaacaaaaaaataaaa

SEQ ID NO: 446296 - DNA, 2315 bp, Homo sapiens
tactttttttacaattattgaggttttaataatacataatttgactacatttcttagatttcgcgtcgtgacgttttcagcctctcaaactgcatcgcctacgcacagaagcttcccgaatctcagacgagacacaacaaagctgcgcgctgccctcgccccgcccgcgggcgcggcggcgacaggccctcggccccgcccacaccgcggcgccacgcctccaacccgcctccagccgtgcctccccaggcccttggccccgcccacaccgcctcgccccgccccaagccgcgctgtgctccaggggcgggggcccacggcggccactcactgagccccacgggccgcagcggagtgacgtagggttggcgcacggatccgttgcggctgcagctctgcagtcgggccgttccttcgccgccgccaggggtagcggtgtagctgcgcagcgtcgcgcgcgctaccgcacccaggttcggcccgtaggcgtctggcagcccggcgccatcttcatcgagcgccatggccgcagcctgcgggccgggagcggccgggtactgcttgctcctcggcttgcatttgtttctgctgaccgcgggccctgccctgggctggaacgaccctgacagaatgttgctgcgggatgtaaaagctcttaccctccactatgaccgctataccacctcccgcaggctggatcccatcccacagttgaaatgtgttggaggcacagctggttgtgattcttataccccaaaagtcatacagtgtcagaacaaaggctgggatgggtatgatgtacagtgggaatgtaagacggacttagatattgcatacaaatttggaaaaactgtggtgagctgtgaaggctatgagtcctctgaagaccagtatgtactaagaggttcttgtggcttggagtataatttagattatacagaacttggcctgcagaaactgaaggagtctggaaagcagcacggctttgcctctttctctgattattattataagtggtcctcggcggattcctgtaacatgagtggattgattaccatcgtggtactccttgggatcgcctttgtagtctataagctgttcctgagtgacgggcagtattctcctccaccgtactctgagtatcctccattttcccaccgttaccagagattcaccaactcagcaggacctcctcccccaggctttaagtctgagttcacaggaccacagaatactggccatggtgcaacttctggttttggcagtgcttttacaggacaacaaggatatgaaaattcaggaccagggttctggacaggcttgggaactggtggaatactaggatatttgtttggcagcaatagagcggcaacacccttctcagactcgtggtactacccgtcctatcctccctcctaccctggcacgtggaatagggcttactcaccccttcatggaggctcgggcagctattcggtatgttcaaactcagacacgaaaaccagaactgcatcaggatatggtggtaccaggagacgataaagtagaaagttggagtcaaacactggatgcagaaattttggatttttcatcactttctctttagaaaaaaagtactacctgttaacaattgggaaaaggggatattcaaaagttctgtggtgttatgtccagtgtagctttttgtattctattatttgaggctaaaagttgatgtgtgacaaaatacttatgtgttgtatgtcagtgtaacatgcagatgtatattgcagtttttgaaagtgatcattactgtggaatgctaaaaatacattaatttctaaaacctgtgatgccctaagaagcattaagaatgaaggtgttgtactaatagaaactaagtacagaaaatttcagttttaggtggttgtagctgatgagttattacctcatagagactataatattctatttggtattatattatttgatgtttgctgttcttcaaacatttaaatcaagctttggactaattatgctaatttgtgagttctgatcacttttgagctctgaagctttgaatcattcagtggtggagatggccttctggtaactgaatattaccttctataagcatctagaaggttgttgtgaatgactctgtgctggcaaaaatgcttgaaacctctatatttctttcgttcataagaggtaaaggtcaaatttttcaacaaaagtcttttaataacaaaagcatgcagttctctgtgaaatctcaaatattgttgtaatagtctgtttcaatcttaaaaagaatcaataaaaacaaacaaggg

SEQ ID NO: 446297 - DNA, 2278 bp, Homo sapiens
tactttttttacaattattgaggttttaataatacataatttgactacatttcttagatttcgcgtcgtgacgttttcagcctctcaaactgcatcgcctacgcacagaagcttcccgaatctcagacgagacacaacaaagctgcgcgctgccctcgccccgcccgcgggcgcggcggcgacaggccctcggccccgcccacaccgcggcgccacgcctccaacccgcctccagccgtgcctccccaggcccttggccccgcccacaccgcctcgccccgccccaagccgcgctgtgctccaggggcgggggcccacggcggccactcactgagccccacgggccgcagcggagtgacgtagggttggcgcacggatccgttgcggctgcagctctgcagtcgggccgttccttcgccgccgccaggggtagcggtgtagctgcgcagcgtcgcgcgcgctaccgcacccaggttcggcccgtaggcgtctggcagcccggcgccatcttcatcgagcgccatggccgcagcctgcgggccgggagcggccgggtactgcttgctcctcggcttgcatttgtttctgctgaccgcgggccctgccctgggctggaacgaccctgacagaatgttgctgcgggatgtaaaagctcttaccctccactatgaccgctataccacctcccgcaggctggatcccatcccacagttgaaatgtgttggaggcacagctggttgtgattcttataccccaaaagtcatacagtgtcagaacaaaggctgggatgggtatgatgtacagtgggaatgtaagacggacttagatattgcatacaaatttggaaaaactgtggtgagctgtgaaggctatgagtcctctgaagaccagtatgtactaagaggttcttgtggcttggagtataatttagattatacagaacttggcctgcagaaactgaaggagtctggaaagcagcacggctttgcctctttctctgattattattataagtggtcctcggcggattcctgtaacatgagtggattgattaccatcgtggtactccttgggatcgcctttgtagtctataagctgttcctgagtgacgggcagtattctcctccaccgtactctgagtatcctccattttcccaccgttaccagagattcaccaactcagcaggacctcctcccccaggctttaagtctgagttcacaggaccacagaatactggccatggtgcaacttctggttttggcagtgcttttacaggacaacaaggatatgaaaattcaggaccagggttctggacaggcttgggaactggtggaatactaggatatttgtttggcagcaatagagcggcaacacccttctcagactcgtggtactacccgtcctatcctccctcctaccctggcacgtggaatagggcttactcaccccttcatggaggctcgggcagctattcggtatgttcaaactcagacacgaaaaccagaactgcatcaggatatggtggtaccaggagacgataaagtagaaagttggagtcaaacactggatgcagaaattttggatttttcatcactttctctttagaaaaaaagtactacctgttaacaattgggaaaaggggatattcaaaagttctgtggtgttatgtccagtgtagctttttgtattctattatttgaggctaaaagttgatgtgtgacaaaatacttatgtgttgtatgtcagtgtaacatgcagatgtatattgcagtttttgaaagtgatcattactgtggaatgctaaaaatacattaatttctaaaacctgtgatgccctaagaagcattaagaatgaaggtgttgtactaatagaaactaagtacagtaatattctatttggtattatattatttgatgtttgctgttcttcaaacatttaaatcaagctttggactaattatgctaatttgtgagttctgatcacttttgagctctgaagctttgaatcattcagtggtggagatggccttctggtaactgaatattaccttctgtaggaaaaggtggaaaataagcatctagaaggttgttgtgaatgactctgtgctggcaaaaatgcttgaaacctctatatttctttcgttcataagaggtaaaggtcaaatttttcaacaaaagtcttttaataacaaaagcatgcagttctctgtgaaatctcaaatattgttgtaatagtctgtttcaatcttaaaaagaatcaataaaaacaaacaaggg

SEQ ID NO: 446298 - DNA, 2256 bp, Homo sapiens
tactttttttacaattattgaggttttaataatacataatttgactacatttcttagatttcgcgtcgtgacgttttcagcctctcaaactgcatcgcctacgcacagaagcttcccgaatctcagacgagacacaacaaagctgcgcgctgccctcgccccgcccgcgggcgcggcggcgacaggccctcggccccgcccacaccgcggcgccacgcctccaacccgcctccagccgtgcctccccaggcccttggccccgcccacaccgcctcgccccgccccaagccgcgctgtgctccaggggcgggggcccacggcggccactcactgagccccacgggccgcagcggagtgacgtagggttggcgcacggatccgttgcggctgcagctctgcagtcgggccgttccttcgccgccgccaggggtagcggtgtagctgcgcagcgtcgcgcgcgctaccgcacccaggttcggcccgtaggcgtctggcagcccggcgccatcttcatcgagcgccatggccgcagcctgcgggccgggagcggccgggtactgcttgctcctcggcttgcatttgtttctgctgaccgcgggccctgccctgggctggaacgaccctgacagaatgttgctgcgggatgtaaaagctcttaccctccactatgaccgctataccacctcccgcaggctggatcccatcccacagttgaaatgtgttggaggcacagctggttgtgattcttataccccaaaagtcatacagtgtcagaacaaaggctgggatgggtatgatgtacagtgggaatgtaagacggacttagatattgcatacaaatttggaaaaactgtggtgagctgtgaaggctatgagtcctctgaagaccagtatgtactaagaggttcttgtggcttggagtataatttagattatacagaacttggcctgcagaaactgaaggagtctggaaagcagcacggctttgcctctttctctgattattattataagtggtcctcggcggattcctgtaacatgagtggattgattaccatcgtggtactccttgggatcgcctttgtagtctataagctgttcctgagtgacgggcagtattctcctccaccgtactctgagtatcctccattttcccaccgttaccagagattcaccaactcagcaggacctcctcccccaggctttaagtctgagttcacaggaccacagaatactggccatggtgcaacttctggttttggcagtgcttttacaggacaacaaggatagcggcaacacccttctcagactcgtggtactacccgtcctatcctccctcctaccctggcacgtggaatagggcttactcaccccttcatggaggctcgggcagctattcggtatgttcaaactcagacacgaaaaccagaactgcatcaggatatggtggtaccaggagacgataaagtagaaagttggagtcaaacactggatgcagaaattttggatttttcatcactttctctttagaaaaaaagtactacctgttaacaattgggaaaaggggatattcaaaagttctgtggtgttatgtccagtgtagctttttgtattctattatttgaggctaaaagttgatgtgtgacaaaatacttatgtgttgtatgtcagtgtaacatgcagatgtatattgcagtttttgaaagtgatcattactgtggaatgctaaaaatacattaatttctaaaacctgtgatgccctaagaagcattaagaatgaaggtgttgtactaatagaaactaagtacagaaaatttcagttttaggtggttgtagctgatgagttattacctcatagagactataatattctatttggtattatattatttgatgtttgctgttcttcaaacatttaaatcaagctttggactaattatgctaatttgtgagttctgatcacttttgagctctgaagctttgaatcattcagtggtggagatggccttctggtaactgaatattaccttctgtaggaaaaggtggaaaataagcatctagaaggttgttgtgaatgactctgtgctggcaaaaatgcttgaaacctctatatttctttcgttcataagaggtaaaggtcaaatttttcaacaaaagtcttttaataacaaaagcatgcagttctctgtgaaatctcaaatattgttgtaatagtctgtttcaatcttaaaaagaatcaataaaaacaaacaaggg

SEQ ID NO: 446299 - DNA, 2361 bp, Homo sapiens
tactttttttacaattattgaggttttaataatacataatttgactacatttcttagatttcgcgtcgtgacgttttcagcctctcaaactgcatcgcctacgcacagaagcttcccgaatctcagacgagacacaacaaagctgcgcgctgccctcgccccgcccgcgggcgcggcggcgacaggccctcggccccgcccacaccgcggcgccacgcctccaacccgcctccagccgtgcctccccaggcccttggctggagatccttaaggtcccctttctccctgccccggactcccggaatttgcccattgtcgtctttctcatctctgagtataactggagagctggacactcacctgcgcatctgctttgttgttatggctgtgtgatgtcatcgtggcctgctgttgtcatggctgcctgttgctatcgccggccgttgcctgccactggcagtctctgagtcacccttagcggacagggctgcagacctcgcaggtctgttagcagaatcgcagattgcactcttttttttttttggagtcggagtctcacattgtcgccccggccgcactgcaatgacgtgatctcggctcactgcaacctccgcctccgtgggttcaagagattctcctgcctcggcctcaccgacagaatgttgctgcgggatgtaaaagctcttaccctccactatgaccgctataccacctcccgcaggctggatcccatcccacagttgaaatgtgttggaggcacagctggttgtgattcttataccccaaaagtcatacagtgtcagaacaaaggctgggatgggtatgatgtacagtgggaatgtaagacggacttagatattgcatacaaatttggaaaaactgtggtgagctgtgaaggctatgagtcctctgaagaccagtatgtactaagaggttcttgtggcttggagtataatttagattatacagaacttggcctgcagaaactgaaggagtctggaaagcagcacggctttgcctctttctctgattattattataagtggtcctcggcggattcctgtaacatgagtggattgattaccatcgtggtactccttgggatcgcctttgtagtctataagctgttcctgagtgacgggcagtattctcctccaccgtactctgagtatcctccattttcccaccgttaccagagattcaccaactcagcaggacctcctcccccaggctttaagtctgagttcacaggaccacagaatactggccatggtgcaacttctggttttggcagtgcttttacaggacaacaaggatatgaaaattcaggaccagggttctggacaggcttgggaactggtggaatactaggatatttgtttggcagcaatagagcggcaacacccttctcagactcgtggtactacccgtcctatcctccctcctaccctggcacgtggaatagggcttactcaccccttcatggaggctcgggcagctattcggtatgttcaaactcagacacgaaaaccagaactgcatcaggatatggtggtaccaggagacgataaagtagaaagttggagtcaaacactggatgcagaaattttggatttttcatcactttctctttagaaaaaaagtactacctgttaacaattgggaaaaggggatattcaaaagttctgtggtgttatgtccagtgtagctttttgtattctattatttgaggctaaaagttgatgtgtgacaaaatacttatgtgttgtatgtcagtgtaacatgcagatgtatattgcagtttttgaaagtgatcattactgtggaatgctaaaaatacattaatttctaaaacctgtgatgccctaagaagcattaagaatgaaggtgttgtactaatagaaactaagtacagaaaatttcagttttaggtggttgtagctgatgagttattacctcatagagactataatattctatttggtattatattatttgatgtttgctgttcttcaaacatttaaatcaagctttggactaattatgctaatttgtgagttctgatcacttttgagctctgaagctttgaatcattcagtggtggagatggccttctggtaactgaatattaccttctgtaggaaaaggtggaaaataagcatctagaaggttgttgtgaatgactctgtgctggcaaaaatgcttgaaacctctatatttctttcgttcataagaggtaaaggtcaaatttttcaacaaaagtcttttaataacaaaagcatgcagttctctgtgaaatctcaaatattgttgtaatagtctgtttcaatcttaaaaagaatcaataaaaacaaacaaggg

SEQ ID NO: 446300 - DNA, 2153 bp, Homo sapiens
tactttttttacaattattgaggttttaataatacataatttgactacatttcttagatttcgcgtcgtgacgttttcagcctctcaaactgcatcgcctacgcacagaagcttcccgaatctcagacgagacacaacaaagctgcgcgctgccctcgccccgcccgcgggcgcggcggcgacaggccctcggccccgcccacaccgcggcgccacgcctccaacccgcctccagccgtgcctccccaggcccttggccccgcccacaccgcctcgccccgccccaagccgcgctgtgctccaggggcgggggcccacggcggccactcactgagccccacgggccgcagcggagtgacgtagggttggcgcacggatccgttgcggctgcagctctgcagtcgggccgttccttcgccgccgccaggggtagcggtgtagctgcgcagcgtcgcgcgcgctaccgcacccaggttcggcccgtaggcgtctggcagcccggcgccatcttcatcgagcgccatggccgcagcctgcgggccgggagcggccgggtactgcttgctcctcggcttgcatttgtttctgctgaccgcgggccctgccctgggctggaacgaccctgtgggaatgtaagacggacttagatattgcatacaaatttggaaaaactgtggtgagctgtgaaggctatgagtcctctgaagaccagtatgtactaagaggttcttgtggcttggagtataatttagattatacagaacttggcctgcagaaactgaaggagtctggaaagcagcacggctttgcctctttctctgattattattataagtggtcctcggcggattcctgtaacatgagtggattgattaccatcgtggtactccttgggatcgcctttgtagtctataagctgttcctgagtgacgggcagtattctcctccaccgtactctgagtatcctccattttcccaccgttaccagagattcaccaactcagcaggacctcctcccccaggctttaagtctgagttcacaggaccacagaatactggccatggtgcaacttctggttttggcagtgcttttacaggacaacaaggatatgaaaattcaggaccagggttctggacaggcttgggaactggtggaatactaggatatttgtttggcagcaatagagcggcaacacccttctcagactcgtggtactacccgtcctatcctccctcctaccctggcacgtggaatagggcttactcaccccttcatggaggctcgggcagctattcggtatgttcaaactcagacacgaaaaccagaactgcatcaggatatggtggtaccaggagacgataaagtagaaagttggagtcaaacactggatgcagaaattttggatttttcatcactttctctttagaaaaaaagtactacctgttaacaattgggaaaaggggatattcaaaagttctgtggtgttatgtccagtgtagctttttgtattctattatttgaggctaaaagttgatgtgtgacaaaatacttatgtgttgtatgtcagtgtaacatgcagatgtatattgcagtttttgaaagtgatcattactgtggaatgctaaaaatacattaatttctaaaacctgtgatgccctaagaagcattaagaatgaaggtgttgtactaatagaaactaagtacagaaaatttcagttttaggtggttgtagctgatgagttattacctcatagagactataatattctatttggtattatattatttgatgtttgctgttcttcaaacatttaaatcaagctttggactaattatgctaatttgtgagttctgatcacttttgagctctgaagctttgaatcattcagtggtggagatggccttctggtaactgaatattaccttctgtaggaaaaggtggaaaataagcatctagaaggttgttgtgaatgactctgtgctggcaaaaatgcttgaaacctctatatttctttcgttcataagaggtaaaggtcaaatttttcaacaaaagtcttttaataacaaaagcatgcagttctctgtgaaatctcaaatattgttgtaatagtctgtttcaatcttaaaaagaatcaataaaaacaaacaaggg

SEQ ID NO: 446301 - DNA, 1764 bp, Homo sapiens
agcggaccgattctacgacgatgtcaaggataaccgggtgtagctcgtgcacccgaccgtacgctcaaccgtcagcccaccgttccgggcacgtactgccagtctgcgacacgctgcggactcatcgagcgccatggccgcagcctgcgggccgggagcggccgggtactgcttgctcctcggcttgcatttgtttctgctgaccgcgggccctgccctgggctggaacgaccctgtgggaatgtaagacggacttagatattgcatacaaatttggaaaaactgtggtgagctgtgaaggctatgagtcctctgaagaccagtatgtactaagaggttcttgtggcttggagtataatttagattatacagaacttggcctgcagaaactgaaggagtctggaaagcagcacggctttgcctctttctctgattattattataagtggtcctcggcggattcctgtaacatgagtggattgattaccatcgtggtactccttgggatcgcctttgtagtctataagctgttcctgagtgacgggcagtattctcctccaccgtactctgagtatcctccattttcccaccgttaccagagattcaccaactcagcaggacctcctcccccaggctttaagtctgagttcacaggaccacagaatactggccatggtgcaacttctggttttggcagtgcttttacaggacaacaaggatatgaaaattcaggaccagggttctggacaggcttgggaactggtggaatactaggatatttgtttggcagcaatagagcggcaacacccttctcagactcgtggtactacccgtcctatcctccctcctaccctggcacgtggaatagggcttactcaccccttcatggaggctcgggcagctattcggtatgttcaaactcagacacgaaaaccagaactgcatcaggatatggtggtaccaggagacgataaagtagaaagttggagtcaaacactggatgcagaaattttggatttttcatcactttctctttagaaaaaaagtactacctgttaacaattgggaaaaggggatattcaaaagttctgtggtgttatgtccagtgtagctttttgtattctattatttgaggctaaaagttgatgtgtgacaaaatacttatgtgttgtatgtcagtgtaacatgcagatgtatattgcagtttttgaaagtgatcattactgtggaatgctaaaaatacattaatttctaaaacctgtgatgccctaagaagcattaagaatgaaggtgttgtactaatagaaactaagtacagaaaatttcagttttaggtggttgtagctgatgagttattacctcatagagactataatattctatttggtattatattatttgatgtttgctgttcttcaaacatttaaatcaagctttggactaattatgctaatttgtgagttctgatcacttttgagctctgaagctttgaatcattcagtggtggagatggccttctggtaactgaatattaccttctgtaggaaaaggtggaaaataagcatctagaaggttgttgtgaatgactctgtgctggcaaaaatgcttgaaacctctatatttctttcgttcataagaggtaaaggtcaaatttttcaacaaaagtcttttaataacaaaagcatgcagttctctgtgaaatctcaaatattgttgtaatagtctgtttcaatcttaaaaagaatcaataaaaacaaacaaggg

SEQ ID NO: 446302 - DNA, 1795 bp, Homo sapiens
cgagagagagagagagagtcaaatcatcgagcgccatggccgcagcctgcgggccgggagcggccgggtactgcttgctcctcggcttgcatttgtttctgctgaccgcgggccctgccctgggctggaacgaccctgacagaatgttgctgcgggatgtaaaagctcttaccctccactatgaccgctataccacctcccgcaggctggatcccatcccacagttgaaatgtgttggaggcacagctggttgtgattcttataccccaaaagtcatacagtgtcagaacaaaggctgggatgggtatgatgtacagtgggaatgtaagacggacttagatattgcatacaaatttggaaaaaagaggttcttgtggcttggagtataatttagattatacagaacttggcctgcagaaactgaaggagtctggaaagcagcacggctttgcctctttctctgattattattataagtggtcctcggcggattcctgtaacatgagtggattgattaccatcgtggtactccttgggatcgcctttgtagtctataagctgttcctgagtgacgggcagtattctcctccaccgtactctgagtatcctccattttcccaccgttaccagagattcaccaactcagcaggacctcctcccccaggctttaagtctgagttcacaggaccacagaatactggccatggtgcaacttctggttttggcagtgcttttacaggacaacaaggatatgaaaattcaggaccagggttctggacaggcttgggaactggtggaatactaggatatttgtttggcagcaatagagcggcaacacccttctcagactcgtggtactacccgtcctatcctccctcctaccctggcacgtggaatagggcttactcaccccttcatggaggctcgggcagctattcggtatgttcaaactcagacacgaaaaccagaactgcatcaggatatggtggtaccaggagacgataaagtagaaagttggagtcaaacactggatgcagaaattttggatttttcatcactttctctttagaaaaaaagtactacctgttaacaattgggaaaaggggatattcaaaagttctgtggtgttatgtccagtgtagctttttgtattctattatttgaggctaaaagttgatgtgtgacaaaatacttatgtgttgtatgtcagtgtaacatgcagatgtatattgcagtttttgaaagtgatcattactgtggaatgctaaaaatacattaatttctaaaacctgtgatgccctaagaagcattaagaatgaaggtgttgtactaatagaaactaagtacagaaaatttcagttttaggtggttgtagctgatgagttattacctcatagagactataatattctatttggtattatattatttgatgtttgctgttcttcaaacatttaaatcaagctttggactaattatgctaatttgtgagttctgatcacttttgagctctgaagctttgaatcattcagtggtggagatggccttctggtaactgaatattaccttctgtaggaaaaggtggaaaataagcatctagaaggttgttgtgaatgactctgtgctggcaaaaatgcttgaaacctctatatttctttcgttcataagaggtaaaggtcaaatttttcaacaaaagtcttttaataacaaaagcatgcagttctctgtgaaatctcaaatattgttgtaatagtctgtttcaatcttaaaaagaatcaataaaaacaaacaaggg

SEQ ID NO: 446303 - DNA, 2103 bp, Homo sapiens
tactttttttacaattattgaggttttaataatacataatttgactacatttcttagatttcgcgtcgtgacgttttcagcctctcaaactgcatcgcctacgcacagaagcttcccgaatctcagacgagacacaacaaagctgcgcgctgccctcgccccgcccgcgggcgcggcggcgacaggccctcggccccgcccacaccgcggcgccacgcctccaacccgcctccagccgtgcctccccaggcccttggccccgcccacaccgcctcgccccgccccaagccgcgctgtgctccaggggcgggggcccacggcggccactcactgagccccacgggccgcagcggagtgacgtagggttggcgcacggatccgttgcggctgcagctctgcagtcgggccgttccttcgccgccgccaggggtagcggtgtagctgcgcagcgtcgcgcgcgctaccgcacccaggttcggcccgtaggcgtctggcagcccggcgccatcttcatcgagcgccatggccgcagcctgcgggccgggagcggccgggtactgcttgctcctcggcttgcatttgtttctgctgaccgcgggccctgccctgggctggaacgaccctgtgggaatgtaagacggacttagatattgcatacaaatttggaaaaaagaggttcttgtggcttggagtataatttagattatacagaacttggcctgcagaaactgaaggagtctggaaagcagcacggctttgcctctttctctgattattattataagtggtcctcggcggattcctgtaacatgagtggattgattaccatcgtggtactccttgggatcgcctttgtagtctataagctgttcctgagtgacgggcagtattctcctccaccgtactctgagtatcctccattttcccaccgttaccagagattcaccaactcagcaggacctcctcccccaggctttaagtctgagttcacaggaccacagaatactggccatggtgcaacttctggttttggcagtgcttttacaggacaacaaggatatgaaaattcaggaccagggttctggacaggcttgggaactggtggaatactaggatatttgtttggcagcaatagagcggcaacacccttctcagactcgtggtactacccgtcctatcctccctcctaccctggcacgtggaatagggcttactcaccccttcatggaggctcgggcagctattcggtatgttcaaactcagacacgaaaaccagaactgcatcaggatatggtggtaccaggagacgataaagtagaaagttggagtcaaacactggatgcagaaattttggatttttcatcactttctctttagaaaaaaagtactacctgttaacaattgggaaaaggggatattcaaaagttctgtggtgttatgtccagtgtagctttttgtattctattatttgaggctaaaagttgatgtgtgacaaaatacttatgtgttgtatgtcagtgtaacatgcagatgtatattgcagtttttgaaagtgatcattactgtggaatgctaaaaatacattaatttctaaaacctgtgatgccctaagaagcattaagaatgaaggtgttgtactaatagaaactaagtacagaaaatttcagttttaggtggttgtagctgatgagttattacctcatagagactataatattctatttggtattatattatttgatgtttgctgttcttcaaacatttaaatcaagctttggactaattatgctaatttgtgagttctgatcacttttgagctctgaagctttgaatcattcagtggtggagatggccttctggtaactgaatattaccttctgtaggaaaaggtggaaaataagcatctagaaggttgttgtgaatgactctgtgctggcaaaaatgcttgaaacctctatatttctttcgttcataagaggtaaaggtcaaatttttcaacaaaagtcttttaataacaaaagcatgcagttctctgtgaaatctcaaatattgttgtaatagtctgtttcaatcttaaaaagaatcaataaaaacaaacaaggg

SEQ ID NO: 446304 - DNA, 1566 bp, Homo sapiens
tactttttttacaattattgaggttttaataatacataatttgactacatttcttagatttcgcgtcgtgacgttttcagcctctcaaactgcatcgcctacgcacagaagcttcccgaatctcagacgagacacaacaaagctgcgcgctgccctcgccccgcccgcgggcgcggcggcgacaggccctcggccccgcccacaccgcggcgccacgcctccaacccgcctccagccgtgcctccccaggcccttggccccgcccacaccgcctcgccccgccccaagccgcgctgtgctccaggggcgggggcccacggcggccactcactgagccccacgggccgcagcggagtgacgtagggttggcgcacggatccgttgcggctgcagctctgcagtcgggccgttccttcgccgccgccaggggtagcggtgtagctgcgcagcgtcgcgcgcgctaccgcacccaggttcggcccgtaggcgtctggcagcccggcgccatcttcatcgagcgccatggccgcagcctgcgggccgggagcggccgggtactgcttgctcctcggcttgcatttgtttctgctgaccgcgggccctgccctgggctggaacgaccctgacagaatgttgctgcgggatgtaaaagctcttaccctccactatgaccgctataccacctcccgcaggctggatcccatcccacagttgaaatgtgttggaggcacagctggttgtgattcttataccccaaaagtcatacagtgtcagaacaaaggctgggatgggtatgatgtacagtgggaatgtaagacggacttagatattgcatacaaatttggaaaaactgtggtgagctgtgaaggctatgagtcctctgaagaccagtatgtactaagaggttcttgtggcttggagtataatttagattatacagaacttggcctgcagaaactgaaggagtctggaaagcagcacggctttgcctctttctctgattattattataagtggtcctcggcggattcctgtaacatgagtggattgattaccatcgtggtactccttgggatcgcctttgtagtctataagctgttcctgagtgacgggcagtattctcctccaccgtactctgagtatcctccattttcccaccgttaccagagattcaccaactcagcaggacctcctcccccaggctttaagtctgagttcacaggaccacagaatactggccatggtgcaacttctggttttggcagtgcttttacaggacaacaaggatatgaaaattcaggaccagggttctggacaggcttgggaactggtggaatactaggatatttgtttggcagcaatagagcggcaacacccttctcagactcgtggtactacccgtcctatcctccctcctaccctggcacgtggaatagggcttactcaccccttcatggaggctcgggcagctattcggtatgttcaaactcagacacgaaaaccagaactgcatcagatatggtgcatccagtgtttgactccaactttctactttatcggtcgagc

SEQ ID NO: 446305 - DNA, 1397 bp, Homo sapiens
tactttttttacaattattgaggttttaataatacataatttgactacatttcttagatttcgcgtcgtgacgttttcagcctctcaaactgcatcgcctacgcacagaagcttcccgaatctcagacgagacacaacaaagctgcgcgctgccctcgccccgcccgcgggcgcggcggcgacaggccctcggccccgcccacaccgcggcgccacgcctccaacccgcctccagccgtgcctccccaggcccttggccccgcccacaccgcctcgccccgccccaagccgcgctgtgctccaggggcgggggcccacggcggccactcactgagccccacgggccgcagcggagtgacgtagggttggcgcacggatccgttgcggctgcagctctgcagtcgggccgttccttcgccgccgccaggggtagcggtgtagctgcgcagcgtcgcgcgcgctaccgcacccaggttcggcccgtaggcgtctggcagcccggcgccatcttcatcgagcgccatggccgcagcctgcgggccgggagcggccgggtactgcttgctcctcggcttgcatttgtttctgctgaccgcgggccctgccctgggctggaacgaccctgacagaatgttgctgcgggatgtaaaagctcttaccctccactatgaccgctataccacctcccgcaggctggatcccatcccacagttgaaatgtgttggaggcacagctggttgtgattcttataccccaaaagtcatacagtgtcagaacaaaggctgggatgggtatgatgtacagtgggaatgtaagacggacttagatattgcatacaaatttggaaaaactgtggtgagctgtgaaggctatgagtcctctgaagaccagtatgtactaagaggttcttgtggcttggagtataatttagattatacagaacttggcctgcagaaactgaaggagtctggaaagcagcacggctttgcctctttctctgattattattataagtggtcctcggcggattcctgtaacatgagtggattgattaccatcgtggtactccttgggatcgcctttgtagtctataagctgttcctgagtgacgggcagtattctcctccaccgtactctgagtatcctccattttcccaccgttaccagagattcaccaactcagcaggacctcctcccccaggctttaagtctgagttcacaggaccacagaatactggccatggtgcaacttctggttttggcagtgcttttacaggacaacaaggatatgaaaattcaggaccagggttctggacaggcttgggaactggtggaatactaggatatttgtttggcagcaatagtagagcgatcagagaaacggatcctcagatcac

SEQ ID NO: 446306 - DNA, 1944 bp, Homo sapiens
tactttttttacaattattgaggttttaataatacataatttgactacatttcttagatttcgcgtcgtgacgttttcagcctctcaaactgcatcgcctacgcacagaagcttcccgaatctcagacgagacacaacaaagctgcgcgctgccctcgccccgcccgcgggcgcggcggcgacaggccctcggccccgcccacaccgcggcgccacgcctccaacccgcctccagccgtgcctccccaggcccttggccccgcccacaccgcctcgccccgccccaagccgcgctgtgctccaggggcgggggcccacggcggccactcactgagccccacgggccgcagcggagtgacgtagggttggcgcacggatccgttgcggctgcagctctgcagtcgggccgttccttcgccgccgccaggggtagcggtgtagctgcgcagcgtcgcgcgcgctaccgcacccaggttcggcccgtaggcgtctggcagcccggcgccatcttcatcgagcgccatggccgcagcctgcgggccgggagcggccgggtactgcttgctcctcggcttgcatttgtttctgctgaccgcgggccctgccctgggctggaacgaccctgacagaatgttgctgcgggatgtaaaagctcttaccctccactatgaccgctataccacctcccgcaggctggatcccatcccacagttgaaatgtgttggaggcacagctggttgtgattcttataccccaaaagtcatacagtgtcagaacaaaggctgggatgggtatgatgtacagtgggaatgtaagacggacttagatattgcatacaaatttggaaaaactgtggtgagctgtgaaggctatgagtcctctgaagaccagtatgtactaatgaaaattcaggaccagggttctggacaggcttgggaactggtggaatactaggatatttgtttggcagcaatagagcggcaacacccttctcagactcgtggtactacccgtcctatcctccctcctaccctggcacgtggaatagggcttactcaccccttcatggaggctcgggcagctattcggtatgttcaaactcagacacgaaaaccagaactgcatcaggatatggtggtaccaggagacgataaagtagaaagttggagtcaaacactggatgcagaaattttggatttttcatcactttctctttagaaaaaaagtactacctgttaacaattgggaaaaggggatattcaaaagttctgtggtgttatgtccagtgtagctttttgtattctattatttgaggctaaaagttgatgtgtgacaaaatacttatgtgttgtatgtcagtgtaacatgcagatgtatattgcagtttttgaaagtgatcattactgtggaatgctaaaaatacattaatttctaaaacctgtgatgccctaagaagcattaagaatgaaggtgttgtactaatagaaactaagtacagaaaatttcagttttaggtggttgtagctgatgagttattacctcatagagactataatattctatttggtattatattatttgatgtttgctgttcttcaaacatttaaatcaagctttggactaattatgctaatttgtgagttctgatcacttttgagctctgaagctttgaatcattcagtggtggagatggccttctggtaactgaatattaccttctgtaggaaaaggtggaaaataagcatctagaaggttgttgtgaatgactctgtgctggcaaaaatgcttgaaacctctatatttctttcgttcataagaggtaaaggtcaaatttttcaacaaaagtcttttaataacaaaagcatgcagttctctgtgaaatctcaaatattgttgtaatagtctgtttcaatcttaaaaagaatcaataaaaacaaacaaggg

SEQ ID NO: 446307 - DNA, 1300 bp, Homo sapiens
  misc_feature (1182)..(1182): n is a, c, g, or t
  misc_feature (1196)..(1196): n is a, c, g, or t
  misc_feature (1207)..(1207): n is a, c, g, or t
  misc_feature (1216)..(1216): n is a, c, g, or t
  misc_feature (1232)..(1232): n is a, c, g, or t
  misc_feature (1250)..(1250): n is a, c, g, or t
  misc_feature (1265)..(1265): n is a, c, g, or t
  misc_feature (1284)..(1284): n is a, c, g, or t
  misc_feature (1293)..(1293): n is a, c, g, or t
tactttttttacaattattgaggttttaataatacataatttgactacatttcttagatttcgcgtcgtgacgttttcagcctctcaaactgcatcgcctacgcacagaagcttcccgaatctcagacgagacacaacaaagctgcgcgctgccctcgccccgcccgcgggcgcggcggcgacaggccctcggccccgcccacaccgcggcgccacgcctccaacccgcctccagccgtgcctccccaggcccttggccccgcccacaccgcctcgccccgccccaagccgcgctgtgctccaggggcgggggcccacggcggccactcactgagccccacgggccgcagcggagtgacgtagggttggcgcacggatccgttgcggctgcagctctgcagtcgggccgttccttcgccgccgccaggggtagcggtgtagctgcgcagcgtcgcgcgcgctaccgcacccaggttcggcccgtaggcgtctggcagcccggcgccatcttcatcgagcgccatggccgcagcctgcgggccgggagcggccgggtactgcttgctcctcggcttgcatttgtttctgctgaccgcgggccctgccctgggctggaacgaccctgacagaatgttgctgcgggatgtaaaagctcttaccctccactatgaccgctataccacctcccgcaggctggatcccatcccacagttgaaatgtgttggaggcacagctggttgtgattcttataccccaaaagtcatacagtgtcagaacaaaggctgggatgggtatgatgtacagtgggaatgtaagacggacttagatattgcatacaaatttggaaaaactgtggtgagctgtgaaggctatgagtcctctgaagaccagtatgtactaagaggttcttgtggcttggagtataatttagattatacagaacttggcctgcagaaactgaaggagtctggaaagcagcacggctttgcctctttctctgattattattataagtggtcctcggcggattcctgtaacatgagtggattgattaccatcgtggtactccttgggatcgcctttgtagtctataagctgttcctgagtgacgggcagtattctcctccaccgtactctgagtatcctccattttcctccccaaccggtaacccagggggtctnccaaaccccaggangggcctccctnccccaaggnttaaagccctggggtncaaagggccacaagaaanactggccaatggggnaattccggggtttggaagncgttaaaanggaaaaa

SEQ ID NO: 446308 - DNA, 829 bp, Homo sapiens
tactttttttacaattattgaggttttaataatacataatttgactacatttcttagatttcgcgtcgtgacgttttcagcctctcaaactgcatcgcctacgcacagaagcttcccgaatctcagacgagacacaacaaagctgcgcgctgccctcgccccgcccgcgggcgcggcggcgacaggccctcggccccgcccacaccgcggcgccacgcctccaacccgcctccagccgtgcctccccaggcccttggccccgcccacaccgcctcgccccgccccaagccgcgctgtgctccaggggcgggggcccacggcggccactcactgagccccacgggccgcagcggagtgacgtagggttggcgcacggatccgttgcggctgcagctctgcagtcgggccgttccttcgccgccgccaggggtagcggtgtagctgcgcagcgtcgcgcgcgctaccgcacccaggttcggcccgtaggcgtctggcagcccggcgccatcttcatcgagcgccatggccgcagcctgcgggccgggagcggccgggtactgcttgctcctcggcttgcatttgtttctgctgaccgcgggccctgccctgggctggaacgaccctgacagaatgttgctgcgggatgtaaaagctcttaccctccactatgaccgctataccacctcccgcaggctggatcccatcccacagttgaaatgtgttggaggcacagctggttgtgattcttataccccaaaagtcatacagtgtcagaacaaaggctgggatgggtatgatgtacaggtaatatccactacagtaatggcag

SEQ ID NO: 446309 - DNA, 471 bp, Homo sapiens
tgtaatcccagctacttgggaggctgaggcgggagaatcgccagaacctgggaggcagaggttgcggtgagttgagatcaccccattccaccccagcctgggcgacaagagcgaaactccatctccgaaaaaagaaaccccagagttcatgtgagcgcagcatgcgatgactggtctgggaagaactggccattccttgggcctcctggccccttggtgctgtctggcccagtgtccacagttccagggctgtagtgacagctttttatcattacaggtgtaggtggagcttttgctggaatcccaggtgaggcaaggctggtgggagaagcagggtggccagccaggcagaggctctggcgttgggaggggttgggcacccaagatcccatccaagcctgcccaatttctcccacgcctgcagagccaggtcttgcagtggctgtagcacaaagtggcacccatcccagg

SEQ ID NO: 446310 - DNA, 436 bp, Homo sapiens
ctgcagggcaggctggatggaaggacagatgggtagtggggacacaggagttccccgatgcaggtgaaggggaggggactgagtcaagagatatctgcaaggaagcagaagagagacctcactggcctggggtgaggtctcgctcacggactctgctctgtcccagcccttgctgaaagccctgctgaatcttgttagccagcagggcttctaggagaagcacaggcctggcccaggcttgttagggatcggtgcaatgacacctgcactgcacatagtagtcgctcactaaactactggtggatgctattttatcaggatcgaccctgagcatcacaggcttagggaccagcctagggacctgagtggctgatcacagcactgccctaactccaggagacatttcccactctgggcctaggaacactgcctacac

SEQ ID NO: 446311 - DNA, 3242 bp, Homo sapiens
cgacgaggcaacaattaggctttggggataaaacgaggtgcggagagcgggctggggcatttctccccgagatggcgggtctgacggcggcggccccgcggcccggagtcctcctgctcctgctgtccatcctccacccctctcggcctggaggggtccctggggccattcctggtggagttcctggaggagtcttttatccaggggctggtctcggagcccttggaggaggagcgctggggcctggaggcaaacctcttaagccagttcccggagggcttgcgggtgctggccttggggcagggctcggcgccttccccgcagttacctttccgggggctctggtgcctggtggagtggctgacgctgctgcagcctataaagctgctaaggctggcgctgggcttggtggtgtcccaggagttggtggcttaggagtgtctgcaggtgcggtggttcctcagcctggagccggagtgaagcctgggaaagtgccgggtgtggggctgccaggtgtatacccaggtggcgtgctcccaggagctcggttccccggtgtgggggtgctccctggagttcccactggagcaggagttaagcccaaggctccaggtgtaggtggagcttttgctggaatcccaggagttggaccctttgggggaccgcaacctggagtcccactggggtatcccatcaaggcccccaagctgcctggtggctatggactgccctacaccacagggaaactgccctatggctatgggcccggaggagtggctggtgcagcgggcaaggctggttacccaacagggacaggggttggcccccaggcagcagcagcagcggcagctaaagcagcagcaaagttcggtgctggagcagccggagtcctccctggtgttggaggggctggtgttcctggcgtgcctggggcaattcctggaattggaggcatcgcaggcgttgggactccagctgcagctgcagctgcagcagcagccgctaaggcagccaagtatggagctgctgcaggcttagtgcctggtgggccaggctttggcccgggagtagttggtgtcccaggagctggcgttccaggtgttggtgtcccaggagctgggattccagttgtcccaggtgctgggatcccaggtgctgcggttccaggggttgtgtcaccagaagcagctgctaaggcagctgcaaaggcagccaaatacggggccaggcccggagtcggagttggaggcattcctacttacggggttggagctgggggctttcccggctttggtgtcggagtcggaggtatccctggagtcgcaggtgtccctggtgtcggaggtgttcccggagtcggaggtgtcccgggagttggcatttcccccgaagctcaggcagcagctgccgccaaggctgccaagtacggagtggggaccccagcagctgcagctgctaaagcagccgccaaagccgcccagtttgctcttctcaatcttgcagggttagttcctggtgtcggcgtggctcctggagttggcgtggctcctggtgtcggtgtggctcctggagttggcttggctcctggagttggcgtggctcctggagttggtgtggctcctggcgttggcgtggctcccggcattggccctggtggagttgcagctgcagcaaaatccgctgccaaggtggctgccaaagcccagctccgagctgcagctgggcttggtgctggcatccctggacttggagttggtgtcggcgtccctggacttggagttggtgctggtgttcctggacttggagttggtgctggtgttcctggcttcggggcagtacctggagccctggctgccgctaaagcagccaaatatggagcagcagtgcctggggtccttggagggctcggggctctcggtggagtaggcatcccaggcggtgtggtgggagccggacccgccgccgccgctgccgcagccaaagctgctgccaaagccgcccagtttggcctagtgggagccgctgggctcggaggactcggagtcggagggcttggagttccaggtgttgggggccttggaggtatacctccagctgcagccgctaaagcagctaaatacggtgctgctggccttggaggtgtcctagggggtgccgggcagttcccacttggaggagtggcagcaagacctggcttcggattgtctcccattttcccaggtggggcctgcctggggaaagcttgtggccggaagagaaaatgagcttcctaggacccctgactcacgacctcatcaacgttggtgctactgcttggtggagaatgtaaaccctttgtaaccccatcccatgcccctccgactccccaccccaggagggaacgggcaggccgggcggccttgcagatccacagggcaaggaaacaagaggggagcggccaagtgccccgaccaggaggccccctacttcagaggcaagggccatgtggtcctggccccccaccccatcccttcccacctaggagctccccctccacacagcctccatctccaggggaacttggtgctacacgctggtgctcttatcttcctggggggagggaggagggaagggtggcccctcggggaaccccctacctggggctcctctaaagatggtgcagacacttcctgggcagtcccagctccccctgcccaccaggacccaccgttggctgccatccagttggtacccaagcacctgaagcctcaaagctggattcgctctagcatccctcctctcctgggtccacttggccgtctcctccccaccgatcgctgttccccacatctggggcgcttttgggttggaaaaccaccccacactgggaatagccaccttgcccttgtagaatccatccgcccatccgtccattcatccatcggtccgtccatccatgtccccagttgaccgcccggcaccactagctggctgggtgcacccaccatcaacctggttgacctgtcatggccgcctgtgccctgcctccacccccatcctacactcccccagggcgtgcggggctgtgcagactggggtgccaggcatctcctccccacccggggtgtccccacatgcagtactgtataccccccatccctccctcggtccactgaacttcagagcagttcccattcctgccccgcccatctttttgtgtctcgctgtgatagatcaataaatattttattttttgtcctgga

SEQ ID NO: 446312 - DNA, 3560 bp, Homo sapiens
cgacgaggcaacaattaggctttggggataaaacgaggtgcggagagcgggctggggcatttctccccgagatggcgggtctgacggcggcggccccgcggcccggagtcctcctgctcctgctgtccatcctccacccctctcggcctggaggggtccctggggccattcctggtggagttcctggaggagtcttttatccaggggctggtctcggagcccttggaggaggagcgctggggcctggaggcaaacctcttaagccagttcccggagggcttgcgggtgctggccttggggcagggctcggcgccttccccgcagttacctttccgggggctctggtgcctggtggagtggctgacgctgctgcagcctataaagctgctaaggctggcgctgggcttggtggtgtcccaggagttggtggcttaggagtgtctgcaggtgcggtggttcctcagcctggagccggagtgaagcctgggaaagtgccgggtgtggggctgccaggtgtatacccaggtggcgtgctcccaggagctcggttccccggtgtgggggtgctccctggagttcccactggagcaggagttaagcccaaggctccaggtgtaggtggagcttttgctggaatcccaggagttggaccctttgggggaccgcaacctggagtcccactggggtatcccatcaaggcccccaagctgcctggtggctatggactgccctacaccacagggaaactgccctatggctatgggcccggaggagtggctggtgcagcgggcaaggctggttacccaacagggacaggggttggcccccaggcagcagcagcagcggcagctaaagcagcagcaaagttcggtgctggagcagccggagtcctccctggtgttggaggggctggtgttcctggcgtgcctggggcaattcctggaattggaggcatcgcaggcgttgggactccagctgcagctgcagctgcagcagcagccgctaaggcagccaagtatggagctgctgcaggcttagtgcctggtgggccaggctttggcccgggagtagttggtgtcccaggagctggcgttccaggtgttggtgtcccaggagctgggattccagttgtcccaggtgctgggatcccaggtgctgcggttccaggggttgtgtcaccagaagcagctgctaaggcagctgcaaaggcagccaaatacggggccaggcccggagtcggagttggaggcattcctacttacggggttggagctgggggctttcccggctttggtgtcggagtcggaggtatccctggagtcgcaggtgtccctggtgtcggaggtgttcccggagtcggaggtgtcccgggagttggcatttcccccgaagctcaggcagcagctgccgccaaggctgccaagtacggagtggggaccccagcagctgcagctgctaaagcagccgccaaagccgcccagtttgggttagttcctggtgtcggcgtggctcctggagttggcgtggctcctggtgtcggtgtggctcctggagttggcttggctcctggagttggcgtggctcctggagttggtgtggctcctggcgttggcgtggctcccggcattggccctggtggagttgcagctgcagcaaaatccgctgccaaggtggctgccaaagcccagctccgagctgcagctgggcttggtgctggcatccctggacttggagttggtgtcggcgtccctggacttggagttggtgctggtgttcctggacttggagttggtgctggtgttcctggcttcggggcaggtgcagatgagggagttaggcggagcctgtcccctgagctcagggaaggagatccctcctcctctcagcacctccccagcaccccctcatcacccagggtacctggagccctggctgccgctaaagcagccaaatatggagcagcagtgcctggggtccttggagggctcggggctctcggtggagtaggcatcccaggcggtgtggtgggagccggacccgccgccgccgctgccgcagccaaagctgctgccaaagccgcccagtttggcctagtgggagccgctgggctcggaggactcggagtcggagggcttggagttccaggtgttgggggccttggaggtatacctccagctgcagccgctaaagcagctaaatacggtgctgctggccttggaggtgtcctagggggtgccgggcagttcccacttggaggagtggcagcaagacctggcttcggattgtctcccattttcccaggtggggcctgcctggggaaagcttgtggccggaagagaaaatgagcttcctaggacccctgactcacgacctcatcaacgttggtgctactgcttggtggagaatgtaaaccctttgtaaccccatcccatgcccctccgactccccaccccaggagggaacgggcaggccgggcggccttgcagatccacagggcaaggaaacaagaggggagcggccaagtgccccgaccaggaggccccctacttcagaggcaagggccatgtggtcctggccccccaccccatcccttcccacctaggagctccccctccacacagcctccatctccaggggaacttggtgctacacgctggtgctcttatcttcctggggggagggaggagggaagggtggcccctcggggaaccccctacctggggctcctctaaagatggtgcagacacttcctgggcagtcccagctccccctgcccaccaggacccaccgttggctgccatccagttggtacccaagcacctgaagcctcaaagctggattcgctctagcatccctcctctcctgggtccacttggccgtctcctccccaccgatcgctgttccccacatctggggcgcttttgggttggaaaaccaccccacactgggaatagccaccttgcccttgtagaatccatccgcccatccgtccattcatccatcggtccgtccatccatgtccccagttgaccgcccggcaccactagctggctgggtgcacccaccatcaacctggttgacctgtcatggccgcctgtgccctgcctccacccccatcctacactcccccagggcgtgcggggctgtgcagactggggtgccaggcatctcctccccacccggggtgtccccacatgcagtactgtataccccccatccctccctcggtccactgaacttcagagcagttcccattcctgccccgcccatctttttgtgtctcgctgtgatagatcaataaatattttattttttgtcctggatatttggggattatttttgattgttgatattctcttttggttttattgttgtggttcattgaaaaaaaaagataatttttttttctgatccggggagctgtatccccagtagaaaaaacattttaatcactctaatataactctggatgaaacacacctttttttttaataagaaaagagaattaactgcttcagaaatgactaataaatgaaaaacctttaaaggaaaaaaaaaaa

SEQ ID NO: 446313 - DNA, 3461 bp, Homo sapiens
cgacgaggcaacaattaggctttggggataaaacgaggtgcggagagcgggctggggcatttctccccgagatggcgggtctgacggcggcggccccgcggcccggagtcctcctgctcctgctgtccatcctccacccctctcggcctggaggggtccctggggccattcctggtggagttcctggaggagtcttttatccaggggctggtctcggagcccttggaggaggagcgctggggcctggaggcaaacctcttaagccagttcccggagggcttgcgggtgctggccttggggcagggctcggcgccttccccgcagttacctttccgggggctctggtgcctggtggagtggctgacgctgctgcagcctataaagctgctaaggctggcgctgggcttggtggtgtcccaggagttggtggcttaggagtgtctgcaggtgcggtggttcctcagcctggagccggagtgaagcctgggaaagtgccgggtgtggggctgccaggtgtatacccaggtggcgtgctcccaggagctcggttccccggtgtgggggtgctccctggagttcccactggagcaggagttaagcccaaggctccaggtgtaggtggagcttttgctggaatcccaggagttggaccctttgggggaccgcaacctggagtcccactggggtatcccatcaaggcccccaagctgcctggtggctatggactgccctacaccacagggaaactgccctatggctatgggcccggaggagtggctggtgcagcgggcaaggctggttacccaacagggacaggggttggcccccaggcagcagcagcagcggcagctaaagcagcagcaaagttcggtgctggagcagccggagtcctccctggtgttggaggggctggtgttcctggcgtgcctggggcaattcctggaattggaggcatcgcaggcgttgggactccagctgcagctgcagctgcagcagcagccgctaaggcagccaagtatggagctgctgcaggcttagtgcctggtgggccaggctttggcccgggagtagttggtgtcccaggagctggcgttccaggtgttggtgtcccaggagctgggattccagttgtcccaggtgctgggatcccaggtgctgcggttccaggggttgtgtcaccagaagcagctgctaaggcagctgcaaaggcagccaaatacggggccaggcccggagtcggagttggaggcattcctacttacggggttggagctgggggctttcccggctttggtgtcggagtcggaggtatccctggagtcgcaggtgtccctggtgtcggaggtgttcccggagtcggaggtgtcccgggagttggcatttcccccgaagctcaggcagcagctgccgccaaggctgccaagtacggagtggggaccccagcagctgcagctgctaaagcagccgccaaagccgcccagtttgggttagttcctggtgtcggcgtggctcctggagttggcgtggctcctggtgtcggtgtggctcctggagttggcttggctcctggagttggcgtggctcctggagttggtgtggctcctggcgttggcgtggctcccggcattggccctggtggagttgcagctgcagcaaaatccgctgccaaggtggctgccaaagcccagctccgagctgcagctgggcttggtgctggcatccctggacttggagttggtgtcggcgtccctggacttggagttggtgctggtgttcctggacttggagttggtgctggtgttcctggcttcggggcagtacctggagccctggctgccgctaaagcagccaaatatggagcagcagtgcctggggtccttggagggctcggggctctcggtggagtaggcatcccaggcggtgtggtgggagccggacccgccgccgccgctgccgcagccaaagctgctgccaaagccgcccagtttggcctagtgggagccgctgggctcggaggactcggagtcggagggcttggagttccaggtgttgggggccttggaggtatacctccagctgcagccgctaaagcagctaaatacggtgctgctggccttggaggtgtcctagggggtgccgggcagttcccacttggaggagtggcagcaagacctggcttcggattgtctcccattttcccaggtggggcctgcctggggaaagcttgtggccggaagagaaaatgagcttcctaggacccctgactcacgacctcatcaacgttggtgctactgcttggtggagaatgtaaaccctttgtaaccccatcccatgcccctccgactccccaccccaggagggaacgggcaggccgggcggccttgcagatccacagggcaaggaaacaagaggggagcggccaagtgccccgaccaggaggccccctacttcagaggcaagggccatgtggtcctggccccccaccccatcccttcccacctaggagctccccctccacacagcctccatctccaggggaacttggtgctacacgctggtgctcttatcttcctggggggagggaggagggaagggtggcccctcggggaaccccctacctggggctcctctaaagatggtgcagacacttcctgggcagtcccagctccccctgcccaccaggacccaccgttggctgccatccagttggtacccaagcacctgaagcctcaaagctggattcgctctagcatccctcctctcctgggtccacttggccgtctcctccccaccgatcgctgttccccacatctggggcgcttttgggttggaaaaccaccccacactgggaatagccaccttgcccttgtagaatccatccgcccatccgtccattcatccatcggtccgtccatccatgtccccagttgaccgcccggcaccactagctggctgggtgcacccaccatcaacctggttgacctgtcatggccgcctgtgccctgcctccacccccatcctacactcccccagggcgtgcggggctgtgcagactggggtgccaggcatctcctccccacccggggtgtccccacatgcagtactgtataccccccatccctccctcggtccactgaacttcagagcagttcccattcctgccccgcccatctttttgtgtctcgctgtgatagatcaataaatattttattttttgtcctggatatttggggattatttttgattgttgatattctcttttggttttattgttgtggttcattgaaaaaaaaagataatttttttttctgatccggggagctgtatccccagtagaaaaaacattttaatcactctaatataactctggatgaaacacacctttttttttaataagaaaagagaattaactgcttcagaaatgactaataaatgaaaaacctttaaaggaaaaaaaaaaa

SEQ ID NO: 446314 - DNA, 3490 bp, Homo sapiens
cgacgaggcaacaattaggctttggggataaaacgaggtgcggagagcgggctggggcatttctccccgagatggcgggtctgacggcggcggccccgcggcccggagtcctcctgctcctgctgtccatcctccacccctctcggcctggaggggtccctggggccattcctggtggagttcctggaggagtcttttatccaggggctggtctcggagcccttggaggaggagcgctggggcctggaggcaaacctcttaagccagttcccggagggcttgcgggtgctggccttggggcagggctcggcgccttccccgcagttacctttccgggggctctggtgcctggtggagtggctgacgctgctgcagcctataaagctgctaaggctggcgctgggcttggtggtgtcccaggagttggtggcttaggagtgtctgcaggtgcggtggttcctcagcctggagccggagtgaagcctgggaaagtgccgggtgtggggctgccaggtgtatacccaggtggcgtgctcccaggagctcggttccccggtgtgggggtgctccctggagttcccactggagcaggagttaagcccaaggctccaggtgtaggtggagcttttgctggaatcccaggagttggaccctttgggggaccgcaacctggagtcccactggggtatcccatcaaggcccccaagctgcctggtggctatggactgccctacaccacagggaaactgccctatggctatgggcccggaggagtggctggtgcagcgggcaaggctggttacccaacagggacaggggttggcccccaggcagcagcagcagcggcagctaaagcagcagcaaagttcggtgctggagcagccggagtcctccctggtgttggaggggctggtgttcctggcgtgcctggggcaattcctggaattggaggcatcgcaggcgttgggactccagctgcagctgcagctgcagcagcagccgctaaggcagccaagtatggagctgctgcaggcttagtgcctggtgggccaggctttggcccgggagtagttggtgtcccaggagctggcgttccaggtgttggtgtcccaggagctgggattccagttgtcccaggtgctgggatcccaggtgctgcggttccaggggttgtgtcaccagaagcagctgctaaggcagctgcaaaggcagccaaatacggggccaggcccggagtcggagttggaggcattcctacttacggggttggagctgggggctttcccggctttggtgtcggagtcggaggtatccctggagtcgcaggtgtccctggtgtcggaggtgttcccggagtcggaggtgtcccgggagttggcatttcccccgaagctcaggcagcagctgccgccaaggctgccaagtacggagtggggaccccagcagctgcagctgctaaagcagccgccaaagccgcccagtttgctcttctcaatcttgcagggttagttcctggtgtcggcgtggctcctggagttggcgtggctcctggtgtcggtgtggctcctggagttggcttggctcctggagttggcgtggctcctggagttggtgtggctcctggcgttggcgtggctcccggcattggccctggtggagttgcagctgcagcaaaatccgctgccaaggtggctgccaaagcccagctccgagctgcagctgggcttggtgctggcatccctggacttggagttggtgtcggcgtccctggacttggagttggtgctggtgttcctggacttggagttggtgctggtgttcctggcttcggggcagtacctggagccctggctgccgctaaagcagccaaatatggagcagcagtgcctggggtccttggagggctcggggctctcggtggagtaggcatcccaggcggtgtggtgggagccggacccgccgccgccgctgccgcagccaaagctgctgccaaagccgcccagtttggcctagtgggagccgctgggctcggaggactcggagtcggagggcttggagttccaggtgttgggggccttggaggtatacctccagctgcagccgctaaagcagctaaatacggtgctgctggccttggaggtgtcctagggggtgccgggcagttcccacttggaggagtggcagcaagacctggcttcggattgtctcccattttcccaggtggggcctgcctggggaaagcttgtggccggaagagaaaatgagcttcctaggacccctgactcacgacctcatcaacgttggtgctactgcttggtggagaatgtaaaccctttgtaaccccatcccatgcccctccgactccccaccccaggagggaacgggcaggccgggcggccttgcagatccacagggcaaggaaacaagaggggagcggccaagtgccccgaccaggaggccccctacttcagaggcaagggccatgtggtcctggccccccaccccatcccttcccacctaggagctccccctccacacagcctccatctccaggggaacttggtgctacacgctggtgctcttatcttcctggggggagggaggagggaagggtggcccctcggggaaccccctacctggggctcctctaaagatggtgcagacacttcctgggcagtcccagctccccctgcccaccaggacccaccgttggctgccatccagttggtacccaagcacctgaagcctcaaagctggattcgctctagcatccctcctctcctgggtccacttggccgtctcctccccaccgatcgctgttccccacatctggggcgcttttgggttggaaaaccaccccacactgggaatagccaccttgcccttgtagaatccatccgcccatccgtccattcatccatcggtccgtccatccatgtccccagttgaccgcccggcaccactagctggctgggtgcacccaccatcaacctggttgacctgtcatggccgcctgtgccctgcctccacccccatcctacactcccccagggcgtgcggggctgtgcagactggggtgccaggcatctcctccccacccggggtgtccccacatgcagtactgtataccccccatccctccctcggtccactgaacttcagagcagttcccattcctgccccgcccatctttttgtgtctcgctgtgatagatcaataaatattttattttttgtcctggaaaaaaaaaaaaaaaaaaaaaaaaaaaaacaaaaaagaaaaaacaaaaaaaaaaaaaacgagaaaaacagagaaacaaaaacacacgacaacgaaaaaaaaaaaaacagagaacacacaagaagaggaacaaaacagcacaaaaccaccaacaaagcaagaccacagcgccgccaacactgcacagaaaacagcgaggagaggaaacacacacacgcacgccccaaggagaaaacgaagagccaaaaaa

SEQ ID NO: 446315 - DNA, 3404 bp, Homo sapiens
cgacgaggcaacaattaggctttggggataaaacgaggtgcggagagcgggctggggcatttctccccgagatggcgggtctgacggcggcggccccgcggcccggagtcctcctgctcctgctgtccatcctccacccctctcggcctggaggggtccctggggccattcctggtggagttcctggaggagtcttttatccaggggctggtctcggagcccttggaggaggagcgctggggcctggaggcaaacctcttaagccagttcccggagggcttgcgggtgctggccttggggcagggctcggcgccttccccgcagttacctttccgggggctctggtgcctggtggagtggctgacgctgctgcagcctataaagctgctaaggctggcgctgggcttggtggtgtcccaggagttggtggcttaggagtgtctgcaggtgcggtggttcctcagcctggagccggagtgaagcctgggaaagtgccgggtgtggggctgccaggtgtatacccaggtggcgtgctcccaggagctcggttccccggtgtgggggtgctccctggagttcccactggagcaggagttaagcccaaggctccaggtgtaggtggagcttttgctggaatcccaggagttggaccctttgggggaccgcaacctggagtcccactggggtatcccatcaaggcccccaagctgcctggtggctatggactgccctacaccacagggaaactgccctatggctatgggcccggaggagtggctggtgcagcgggcaaggctggttacccaacagggacaggggttggcccccaggcagcagcagcagcggcagctaaagcagcagcaaagttcggtgctggagcagccggagtcctccctggtgttggaggggctggtgttcctggcgtgcctggggcaattcctggaattggaggcatcgcaggcgttgggactccagctgcagctgcagctgcagcagcagccgctaaggcagccaagtatggagctgctgcaggcttagtgcctggtgggccaggctttggcccgggagtagttggtgtcccaggagctggcgttccaggtgttggtgtcccaggagctgggattccagttgtcccaggtgctgggatcccaggtgctgcggttccaggggttgtgtcaccagaagcagctgctaaggcagctgcaaaggcagccaaatacggggccaggcccggagtcggagttggaggcattcctacttacggggttggagctgggggctttcccggctttggtgtcggagtcggaggtatccctggagtcgcaggtgtccctggtgtcggaggtgttcccggagtcggaggtgtcccgggagttggcatttcccccgaagctcaggcagcagctgccgccaaggctgccaagtacgggttagttcctggtgtcggcgtggctcctggagttggcgtggctcctggtgtcggtgtggctcctggagttggcttggctcctggagttggcgtggctcctggagttggtgtggctcctggcgttggcgtggctcccggcattggccctggtggagttgcagctgcagcaaaatccgctgccaaggtggctgccaaagcccagctccgagctgcagctgggcttggtgctggcatccctggacttggagttggtgtcggcgtccctggacttggagttggtgctggtgttcctggacttggagttggtgctggtgttcctggcttcggggcagtacctggagccctggctgccgctaaagcagccaaatatggagcagcagtgcctggggtccttggagggctcggggctctcggtggagtaggcatcccaggcggtgtggtgggagccggacccgccgccgccgctgccgcagccaaagctgctgccaaagccgcccagtttggcctagtgggagccgctgggctcggaggactcggagtcggagggcttggagttccaggtgttgggggccttggaggtatacctccagctgcagccgctaaagcagctaaatacggtgctgctggccttggaggtgtcctagggggtgccgggcagttcccacttggaggagtggcagcaagacctggcttcggattgtctcccattttcccaggtggggcctgcctggggaaagcttgtggccggaagagaaaatgagcttcctaggacccctgactcacgacctcatcaacgttggtgctactgcttggtggagaatgtaaaccctttgtaaccccatcccatgcccctccgactccccaccccaggagggaacgggcaggccgggcggccttgcagatccacagggcaaggaaacaagaggggagcggccaagtgccccgaccaggaggccccctacttcagaggcaagggccatgtggtcctggccccccaccccatcccttcccacctaggagctccccctccacacagcctccatctccaggggaacttggtgctacacgctggtgctcttatcttcctggggggagggaggagggaagggtggcccctcggggaaccccctacctggggctcctctaaagatggtgcagacacttcctgggcagtcccagctccccctgcccaccaggacccaccgttggctgccatccagttggtacccaagcacctgaagcctcaaagctggattcgctctagcatccctcctctcctgggtccacttggccgtctcctccccaccgatcgctgttccccacatctggggcgcttttgggttggaaaaccaccccacactgggaatagccaccttgcccttgtagaatccatccgcccatccgtccattcatccatcggtccgtccatccatgtccccagttgaccgcccggcaccactagctggctgggtgcacccaccatcaacctggttgacctgtcatggccgcctgtgccctgcctccacccccatcctacactcccccagggcgtgcggggctgtgcagactggggtgccaggcatctcctccccacccggggtgtccccacatgcagtactgtataccccccatccctccctcggtccactgaacttcagagcagttcccattcctgccccgcccatctttttgtgtctcgctgtgatagatcaataaatattttattttttgtcctggatatttggggattatttttgattgttgatattctcttttggttttattgttgtggttcattgaaaaaaaaagataatttttttttctgatccggggagctgtatccccagtagaaaaaacattttaatcactctaatataactctggatgaaacacacctttttttttaataagaaaagagaattaactgcttcagaaatgactaataaatgaaaaacctttaaaggaaaaaaaaaaa

SEQ ID NO: 446316 - DNA, 3489 bp, Homo sapiens
cgacgaggcaacaattaggctttggggataaaacgaggtgcggagagcgggctggggcatttctccccgagatggcgggtctgacggcggcggccccgcggcccggagtcctcctgctcctgctgtccatcctccacccctctcggcctggaggggtccctggggccattcctggtggagttcctggaggagtcttttatccaggggctggtctcggagcccttggaggaggagcgctggggcctggaggcaaacctcttaagccagttcccggagggcttgcgggtgctggccttggggcagggctcggcgccttccccgcagttacctttccgggggctctggtgcctggtggagtggctgacgctgctgcagcctataaagctgctaaggctggcgctgggcttggtggtgtcccaggagttggtggcttaggagtgtctgcaggtgcggtggttcctcagcctggagccggagtgaagcctgggaaagtgccgggtgtggggctgccaggtgtatacccaggtggcgtgctcccaggagctcggttccccggtgtgggggtgctccctggagttcccactggagcaggagttaagcccaaggctccaggtgtaggtggagcttttgctggaatcccaggagttggaccctttgggggaccgcaacctggagtcccactggggtatcccatcaaggcccccaagctgcctggtggctatggactgccctacaccacagggaaactgccctatggctatgggcccggaggagtggctggtgcagcgggcaaggctggttacccaacagggacaggggttggcccccaggcagcagcagcagcggcagctaaagcagcagcaaagttcggtgctggagcagccggagtcctccctggtgttggaggggctggtgttcctggcgtgcctggggcaattcctggaattggaggcatcgcaggcgttgggactccagctgcagctgcagctgcagcagcagccgctaaggcagccaagtatggagctgctgcaggcttagtgcctggtgggccaggctttggcccgggagtagttggtgtcccaggagctggcgttccaggtgttggtgtcccaggagctgggattccagttgtcccaggtgctgggatcccaggtgctgcggttccaggggttgtgtcaccagaagcagctgctaaggcagctgcaaaggcagccaaatacggggccaggcccggagtcggagttggaggcattcctacttacggggttggagctgggggctttcccggctttggtgtcggagtcggaggtatccctggagtcgcaggtgtccctggtgtcggaggtgttcccggagtcggaggtgtcccgggagttggcatttcccccgaagctcaggcagcagctgccgccaaggctgccaagtacgggttagttcctggtgtcggcgtggctcctggagttggcgtggctcctggtgtcggtgtggctcctggagttggcttggctcctggagttggcgtggctcctggagttggtgtggctcctggcgttggcgtggctcccggcattggccctggtggagttgcagctgcagcaaaatccgctgccaaggtggctgccaaagcccagctccgagctgcagctgggcttggtgctggcatccctggacttggagttggtgtcggcgtccctggacttggagttggtgctggtgttcctggacttggagttggtgctggtgttcctggcttcggggcagtacctggagccctggctgccgctaaagcagccaaatatggagcagcagtgcctggggtccttggagggctcggggctctcggtggagtaggcatcccaggcggtgtggtgggtgagttgaaaccccaggaggggcagggtggggagggaatctaaccagtacagagtgcctccctgaactcggtctgtgttcccaggagccggacccgccgccgccgctgccgcagccaaagctgctgccaaagccgcccagtttggcctagtgggagccgctgggctcggaggactcggagtcggagggcttggagttccaggtgttgggggccttggaggtatacctccagctgcagccgctaaagcagctaaatacggtgctgctggccttggaggtgtcctagggggtgccgggcagttcccacttggaggagtggcagcaagacctggcttcggattgtctcccattttcccaggtggggcctgcctggggaaagcttgtggccggaagagaaaatgagcttcctaggacccctgactcacgacctcatcaacgttggtgctactgcttggtggagaatgtaaaccctttgtaaccccatcccatgcccctccgactccccaccccaggagggaacgggcaggccgggcggccttgcagatccacagggcaaggaaacaagaggggagcggccaagtgccccgaccaggaggccccctacttcagaggcaagggccatgtggtcctggccccccaccccatcccttcccacctaggagctccccctccacacagcctccatctccaggggaacttggtgctacacgctggtgctcttatcttcctggggggagggaggagggaagggtggcccctcggggaaccccctacctggggctcctctaaagatggtgcagacacttcctgggcagtcccagctccccctgcccaccaggacccaccgttggctgccatccagttggtacccaagcacctgaagcctcaaagctggattcgctctagcatccctcctctcctgggtccacttggccgtctcctccccaccgatcgctgttccccacatctggggcgcttttgggttggaaaaccaccccacactgggaatagccaccttgcccttgtagaatccatccgcccatccgtccattcatccatcggtccgtccatccatgtccccagttgaccgcccggcaccactagctggctgggtgcacccaccatcaacctggttgacctgtcatggccgcctgtgccctgcctccacccccatcctacactcccccagggcgtgcggggctgtgcagactggggtgccaggcatctcctccccacccggggtgtccccacatgcagtactgtataccccccatccctccctcggtccactgaacttcagagcagttcccattcctgccccgcccatctttttgtgtctcgctgtgatagatcaataaatattttattttttgtcctggatatttggggattatttttgattgttgatattctcttttggttttattgttgtggttcattgaaaaaaaaagataatttttttttctgatccggggagctgtatccccagtagaaaaaacattttaatcactctaatataactctggatgaaacacacctttttttttaataagaaaagagaattaactgcttcagaaatgactaataaatgaaaaacctttaaaggaaaaaaaaaaa

SEQ ID NO: 446317 - DNA, 2816 bp, Homo sapiens
cgacgaggcaacaattaggctttggggataaaacgaggtgcggagagcgggctggggcatttctccccgagatggcgggtctgacggcggcggccccgcggcccggagtcctcctgctcctgctgtccatcctccacccctctcggcctggaggggtccctggggccattcctggtggagttcctggaggagtcttttatccaggggctggtctcggagcccttggaggaggagcgctggggcctggaggcaaacctcttaagccagttcccggagggcttgcgggtgctggccttggggcagggctcggcgccttccccgcagttacctttccgggggctctggtgcctggtggagtggctgacgctgctgcagcctataaagctgctaaggctggcgctgggcttggtggtgtcccaggagttggtggcttaggagtgtctgcaggtgcggtggttcctcagcctggagccggagtgaagcctgggaaagtgccgggtgtggggctgccaggtgtatacccaggtggcgtgctcccaggagctcggttccccggtgtgggggtgctccctggagttcccactggagcaggagttaagcccaaggctccaggtgtaggtggagcttttgctggaatcccaggagttggaccctttgggggaccgcaacctggagtcccactggggtatcccatcaaggcccccaagctgcctggtggctatggactgccctacaccacagggaaactgccctatggctatgggcccggaggagtggctggtgcagcgggcaaggctggttacccaacagggacaggggttggcccccaggcagcagcagcagcggcagctaaagcagcagcaaagttcggtgctggagcagccggagtcctccctggtgttggaggggctggtgttcctggcgtgcctggggcaattcctggaattggaggcatcgcaggcgttgggactccagctgcagctgcagctgcagcagcagccgctaaggcagccaagtatggagctgctgcaggcttagtgcctggtgggccaggctttggcccgggagtagttggtgtcccaggagctggcgttccaggtgttggtgtcccaggagctgggattccagttgtcccaggtgctgggatcccaggtgctgcggttccaggggttgtgtcaccagaagcagctgctaaggcagctgcaaaggcagccaaatacggggccaggcccggagtcggagttggaggcattcctacttacggggttggagctgggggctttcccggctttggtgtcggagtcggaggtatccctggagtcgcaggtgtccctggtgtcggaggtgttcccggagtcggaggtgtcccgggagttggcatttcccccgaagctcaggcagcagctgccgccaaggctgccaagtacggagtggggaccccagcagctgcagctgctaaagcagccgccaaagccgcccagtttgctcttctcaatcttgcagggttagttcctggtgtcggcgtggctcctggagttggcgtggctcctggtgtcggtgtggctcctggagttggcttggctcctggagttggcgtggctcctggagttggtgtggctcctggcgttggcgtggctcccggcattggccctggtggagttgcagctgcagcaaaatccgctgccaaggtggctgccaaagcccagctccgagctgcagctgggcttggtgctggcatccctggacttggagttggtgtcggcgtccctggacttggagttggtgctggtgttcctggacttggagttggtgctggtgttcctggcttcggggcagtacctggagccctggctgccgctaaagcagccaaatatggagcagcagtgcctggggtccttggagggctcggggctctcggtggagtaggcatcccaggcggtgtggtgggagccggacccgccgccgccgctgccgcagccaaagctgctgccaaagccgcccagtttggcctagtgggagccgctgggctcggaggactcggagtcggagggcttggagttccaggtgttgggggccttggaggtatacctccagctgcagccgctaaagcagctaaatacggtgctgctggccttggaggtgtcctagggggtgccgggcagttcccacttggaggagtggcagcaagacctggcttcggattgtctcccattttcccaggtggggcctgcctggggaaagcttgtggccggaagagaaaatgagcttcctaggacccctgactcacgacctcatcaacgttggtgctactgcttggtggagaatgtaaaccctttgtaaccccatcccatgcccctccgactccccaccccaggagggaacgggcaggccgggcggccttgcagatccacagggcaaggaaacaagaggggagcggctgggaatagccaccttgcccttgtagaatccatccgcccatccgtccattcatccatcggtccgtccatccatgtccccagttgaccgcccggcaccactagctggctgggtgcacccaccatcaacctggttgacctgtcatggccgcctgtgccctgcctccacccccatcctacactcccccagggcgtgcggggctgtgcagactggggtgccaggcatctcctccccacccggggtgtccccacatgcagtactgtataccccccatccctccctcggtccactgaacttcagagcagttcccattcctgccccgcccatctttttgtgtctcgctgtgatagatcaataaatattttattttttgtcctgga

SEQ ID NO: 446318 - DNA, 2696 bp, Homo sapiens
gagggagagagaaagaaagaaagagagagagagagagagaaagaaagaaagaaagagaaaggaagaaaagaaaagaaaagaaaaagaaagagatcacattcctccagctcactgattcaaatcctagagctctttagggaccctcttagtctctccacatctctctgatgagtaggatccatgcagaggaaatgtcaacccacctgcaatcctgcattcaggaccaactgtcacttccatactctactaaccacccttctagcccctctgaggttcccataggttaggggaacaatgctttttcttccacaggagctgctgcaggcttagtgcctggtgggccaggctttggcccgggagtagttggtgtcccaggagctggcgttccaggtgttggtgtcccaggagctgggattccagttgtcccaggtgctgggatcccaggtgctgcggttccaggggttgtgtcaccagaagcagctgctaaggcagctgcaaaggcagccaaatacggggccaggcccggagtcggagttggaggcattcctacttacggggttggagctgggggctttcccggctttggtgtcggagtcggaggtatccctggagtcgcaggtgtccctggtgtcggaggtgttcccggagtcggaggtgtcccgggagttggcatttcccccgaagctcaggcagcagctgccgccaaggctgccaagtacgggttagttcctggtgtcggcgtggctcctggagttggcgtggctcctggtgtcggtgtggctcctggagttggcttggctcctggagttggcgtggctcctggagttggtgtggctcctggcgttggcgtggctcccggcattggccctggtggagttgcagctgcagcaaaatccgctgccaaggtggctgccaaagcccagctccgagctgcagctgggcttggtgctggcatccctggacttggagttggtgtcggcgtccctggacttggagttggtgctggtgttcctggacttggagttggtgctggtgttcctggcttcggggcagtacctggagccctggctgccgctaaagcagccaaatatggagcagcagtgcctggggtccttggagggctcggggctctcggtggagtaggcatcccaggcggtgtggtgggagccggacccgccgccgccgctgccgcagccaaagctgctgccaaagccgcccagtttggcctagtgggagccgctgggctcggaggactcggagtcggagggcttggagttccaggtgttgggggccttggaggtatacctccagctgcagccgctaaagcagctaaatacggtgctgctggccttggaggtgtcctagggggtgccgggcagttcccacttggaggagtggcagcaagacctggcttcggattgtctcccattttcccaggtggggcctgcctggggaaagcttgtggccggaagagaaaatgagcttcctaggacccctgactcacgacctcatcaacgttggtgctactgcttggtggagaatgtaaaccctttgtaaccccatcccatgcccctccgactccccaccccaggagggaacgggcaggccgggcggccttgcagatccacagggcaaggaaacaagaggggagcggccaagtgccccgaccaggaggccccctacttcagaggcaagggccatgtggtcctggccccccaccccatcccttcccacctaggagctccccctccacacagcctccatctccaggggaacttggtgctacacgctggtgctcttatcttcctggggggagggaggagggaagggtggcccctcggggaaccccctacctggggctcctctaaagatggtgcagacacttcctgggcagtcccagctccccctgcccaccaggacccaccgttggctgccatccagttggtacccaagcacctgaagcctcaaagctggattcgctctagcatccctcctctcctgggtccacttggccgtctcctccccaccgatcgctgttccccacatctggggcgcttttgggttggaaaaccaccccacactgggaatagccaccttgcccttgtagaatccatccgcccatccgtccattcatccatcggtccgtccatccatgtccccagttgaccgcccggcaccactagctggctgggtgcacccaccatcaacctggttgacctgtcatggccgcctgtgccctgcctccacccccatcctacactcccccagggcgtgcggggctgtgcagactggggtgccaggcatctcctccccacccggggtgtccccacatgcagtactgtataccccccatccctccctcggtccactgaacttcagagcagttcccattcctgccccgcccatctttttgtgtctcgctgtgatagatcaataaatattttattttttgtcctggatatttggggattatttttgattgttgatattctcttttggttttattgttgtggttcattgaaaaaaaaagataatttttttttctgatccggggagctgtatccccagtagaaaaaacattttaatcactctaatataactctggatgaaacacacctttttttttaataagaaaagagaattaactgcttcagaaatgactaataaatgaaaaacctttaaaggaaaaaaaaaaa

SEQ ID NO: 446319 - DNA, 2404 bp, Homo sapiens
tgctaggattacaggcatgagccactgcacccggccccacattttttttaaatggcttcatggtggaggtgctggggacccaggcatcccagttttctgtcttttatggacaaggcctgggggaaatttacatcctctttcccaatccatcagcatccctcagagcccgcccagcctctctcactgagcttcttttctacttggctcccttccctctgcaggggccaggcccggagtcggagttggaggcattcctacttacggggttggagctgggggctttcccggctttggtgtcggagtcggaggtatccctggagtcgcaggtgtccctggtgtcggaggtgttcccggagtcggaggtgtcccgggagttggcatttcccccgaagctcaggcagcagctgccgccaaggctgccaagtacgggttagttcctggtgtcggcgtggctcctggagttggcgtggctcctggtgtcggtgtggctcctggagttggcttggctcctggagttggcgtggctcctggagttggtgtggctcctggcgttggcgtggctcccggcattggccctggtggagttgcagctgcagcaaaatccgctgccaaggtggctgccaaagcccagctccgagctgcagctgggcttggtgctggcatccctggacttggagttggtgtcggcgtccctggacttggagttggtgctggtgttcctggacttggagttggtgctggtgttcctggcttcggggcagtacctggagccctggctgccgctaaagcagccaaatatggagcagcagtgcctggggtccttggagggctcggggctctcggtggagtaggcatcccaggcggtgtggtgggagccggacccgccgccgccgctgccgcagccaaagctgctgccaaagccgcccagtttggcctagtgggagccgctgggctcggaggactcggagtcggagggcttggagttccaggtgttgggggccttggaggtatacctccagctgcagccgctaaagcagctaaatacggtgctgctggccttggaggtgtcctagggggtgccgggcagttcccacttggaggagtggcagcaagacctggcttcggattgtctcccattttcccaggtggggcctgcctggggaaagcttgtggccggaagagaaaatgagcttcctaggacccctgactcacgacctcatcaacgttggtgctactgcttggtggagaatgtaaaccctttgtaaccccatcccatgcccctccgactccccaccccaggagggaacgggcaggccgggcggccttgcagatccacagggcaaggaaacaagaggggagcggccaagtgccccgaccaggaggccccctacttcagaggcaagggccatgtggtcctggccccccaccccatcccttcccacctaggagctccccctccacacagcctccatctccaggggaacttggtgctacacgctggtgctcttatcttcctggggggagggaggagggaagggtggcccctcggggaaccccctacctggggctcctctaaagatggtgcagacacttcctgggcagtcccagctccccctgcccaccaggacccaccgttggctgccatccagttggtacccaagcacctgaagcctcaaagctggattcgctctagcatccctcctctcctgggtccacttggccgtctcctccccaccgatcgctgttccccacatctggggcgcttttgggttggaaaaccaccccacactgggaatagccaccttgcccttgtagaatccatccgcccatccgtccattcatccatcggtccgtccatccatgtccccagttgaccgcccggcaccactagctggctgggtgcacccaccatcaacctggttgacctgtcatggccgcctgtgccctgcctccacccccatcctacactcccccagggcgtgcggggctgtgcagactggggtgccaggcatctcctccccacccggggtgtccccacatgcagtactgtataccccccatccctccctcggtccactgaacttcagagcagttcccattcctgccccgcccatctttttgtgtctcgctgtgatagatcaataaatattttattttttgtcctggatatttggggattatttttgattgttgatattctcttttggttttattgttgtggttcattgaaaaaaaaagataatttttttttctgatccggggagctgtatccccagtagaaaaaacattttaatcactctaatataactctggatgaaacacacctttttttttaataagaaaagagaattaactgcttcagaaatgactaataaatgaaaaacctttaaaggaaaaaaaaaaa

SEQ ID NO: 446320 - DNA, 2751 bp, Homo sapiens
cgacgaggcaacaattaggctttggggataaaacgaggtgcggagagcgggctggggcatttctccccgagatggcgggtctgacggcggcggccccgcggcccggagtcctcctgctcctgctgtccatcctccacccctctcggcctggaggggtccctggggccattcctggtggagttcctggaggagtcttttatccaggggctggtctcggagcccttggaggaggagcgctggggcctggaggcaaacctcttaagccagttcccggagggcttgcgggtgctggccttggggcagggctcggcgccttccccgcagttacctttccgggggctctggtgcctggtggagtggctgacgctgctgcagcctataaagctgctaaggctggcgctgggcttggtggtgtcccaggagttggtggcttaggagtgtctgcaggtgcggtggttcctcagcctggagccggagtgaagcctgggaaagtgccgggtgtggggctgccaggtgtatacccaggtggcgtgctcccaggagctcggttccccggtgtgggggtgctccctggagttcccactggagcaggagttaagcccaaggctccaggtgtaggtggagcttttgctggaatcccaggagttggaccctttgggggaccgcaacctggagtcccactggggtatcccatcaaggcccccaagctgcctggtggctatggactgccctacaccacagggaaactgccctatggctatgggcccggaggagtggctggtgcagcgggcaaggctggttacccaacagggacaggggttggcccccaggcagcagcagcagcggcagctaaagcagcagcaaagttcggtgctggagcagccggagtcctccctggtgttggaggggctggtgttcctggcgtgcctggggcaattcctggaattggaggcatcgcaggcgttgggactccagctgcagctgcagctgcagcagcagccgctaaggcagccaagtatggagctgctgcaggcttagtgcctggtgggccaggctttggcccgggagtagttggtgtcccaggagctggcgttccaggtgttggtgtcccaggagctgggattccagttgtcccaggtgctgggatcccaggtgctgcggttccaggggttgtgtcaccagaagcagctgctaaggcagctgcaaaggcagccaaatacggggccaggcccggagtcggagttggaggcattcctacttacggggttggagctgggggctttcccggctttggtgtcggagtcggaggtatccctggagtcgcaggtgtccctggtgtcggaggtgttcccggagtcggaggtgtcccgggagttggcatttcccccgaagctcaggcagcagctgccgccaaggctgccaagtacggagtggggaccccagcagctgcagctgctaaagcagccgccaaagccgcccagtttgctcttctcaatcttgcagggttagttcctggtgtcggcgtggctcctggagttggcgtggctcctggtgtcggtgtggctcctggagttggcttggctcctggagttggcgtggctcctggagttggtgtggctcctggcgttggcgtggctcccggcattggccctggtggagttgcagctgcagcaaaatccgctgccaaggtggctgccaaagcccagctccgagctgcagctgggcttggtgctggcatccctggacttggagttggtgtcggcgtccctggacttggagttggtgctggtgttcctggacttggagttggtgctggtgttcctggcttcggggcagtacctggagccctggctgccgctaaagcagccaaatatggagcagcagtgcctggggtccttggagggctcggggctctcggtggagtaggcatcccaggcggtgtggtgggagccggacccgccgccgccgctgccgcagccaaagctgctgccaaagccgcccagtttggcctagtgggagccgctgggctcggaggactcggagtcggagggcttggagttccaggtgttgggggccttggaggtatacctccagctgcagccgctaaagcagctaaatacggtgctgctggccttggaggtgtcctagggggtgccgggcagttcccacttggaggagtggcagcaagacctggcttcggattgtctcccattttcccaggtggggcctgcctggggaaagcttgtggccggaagagaaaatgagcttcctaggacccctgactcacgacctcatcaacgttggtgctactgcttggtggagaatgtaaaccctttgtaaccccatcccatgcccctccgactccccaccccaggagggaacgggcaggccgggcggccttgcagatccacagggcaaggaaacaagaggggagcggccaagtgccccgaccaggaggccccctacttcagaggcaagggccatgtggtcctggccccccaccccatcccttcccacctaggagctccccctccacacagcctccatctccaggggaacttggtgctacacgctggtgctcttatcttcctggggggagaataggtctttttttcacttatgattaatggagaactgggagcgtattttcctgactaatgcgtggatgtttattctaatcattgtcatactcacttgtgtaggaacttgtatcaccttgggaattcattgatatatttcctattataaagg

SEQ ID NO: 446321 - DNA, 2346 bp, Homo sapiens
gttcctttataacatagtagtgaaggctgcatggaggaagccccatggaccaaggaagcccaagggagtcgcttaactcagcaggggttcaggaaggcattctagaggaggtgggtggggaaatttgaccccaaaagatccatgcagttttcaggaaggctggagtgcagtggctcagtctcagctccccgcacctggtgcagttgatctcagctcaccacaacctccacctccccggttcaagtgattcttgtgtctcagcctcccaaatactgggattacaggcgcccgccaccacgcctggctaatttttgtatttttcgtagaaacagggtttcaccgtgttggccaggctggtctcaaactcctgacctcaggtgatctgccacctcagcctcccaaagtgctgggattacaggtgtgagccaccgcacccggcttacaaaagaacttttaaggccaggcacagtggttcacaccttcgggaggctaaggcaggaggatcgcatgagcccaggagttggaggctgcagtgaactatgattgtaccactgcactccagccggggtgacagagcaaaaccccatctcaaaatgaaacaaaatatggactggacttcctgtccactgctcctccacagtgtcacatggcccctgccacctgtctgcttgccttgtgtccctggggcagggagacccatcgttcagaaatggaacactcattttccctcctctccccgcaggagcagcagtgcctggggtccttggagggctcggggctctcggtggagtaggcatcccaggcggtgtggtgggagccggacccgccgccgccgctgccgcagccaaagctgctgccaaagccgcccagtttggcctagtgggagccgctgggctcggaggactcggagtcggagggcttggagttccaggtgttgggggccttggaggtatacctccagctgcagccgctaaagcagctaaatacggtgctgctggccttggaggtgtcctagggggtgccgggcagttcccacttggaggagtggcagcaagacctggcttcggattgtctcccattttcccaggtggggcctgcctggggaaagcttgtggccggaagagaaaatgagcttcctaggacccctgactcacgacctcatcaacgttggtgctactgcttggtggagaatgtaaaccctttgtaaccccatcccatgcccctccgactccccaccccaggagggaacgggcaggccgggcggccttgcagatccacagggcaaggaaacaagaggggagcggccaagtgccccgaccaggaggccccctacttcagaggcaagggccatgtggtcctggccccccaccccatcccttcccacctaggagctccccctccacacagcctccatctccaggggaacttggtgctacacgctggtgctcttatcttcctggggggagggaggagggaagggtggcccctcggggaaccccctacctggggctcctctaaagatggtgcagacacttcctgggcagtcccagctccccctgcccaccaggacccaccgttggctgccatccagttggtacccaagcacctgaagcctcaaagctggattcgctctagcatccctcctctcctgggtccacttggccgtctcctccccaccgatcgctgttccccacatctggggcgcttttgggttggaaaaccaccccacactgggaatagccaccttgcccttgtagaatccatccgcccatccgtccattcatccatcggtccgtccatccatgtccccagttgaccgcccggcaccactagctggctgggtgcacccaccatcaacctggttgacctgtcatggccgcctgtgccctgcctccacccccatcctacactcccccagggcgtgcggggctgtgcagactggggtgccaggcatctcctccccacccggggtgtccccacatgcagtactgtataccccccatccctccctcggtccactgaacttcagagcagttcccattcctgccccgcccatctttttgtgtctcgctgtgatagatcaataaatattttattttttgtcctggatatttggggattatttttgattgttgatattctcttttggttttattgttgtggttcattgaaaaaaaaagataatttttttttctgatccggggagctgtatccccagtagaaaaaacattttaatcactctaatataactctggatgaaacacacctttttttttaataagaaaagagaattaactgcttcagaaatgactaataaatgaaaaacctttaaaggaaaaaaaaaaa

SEQ ID NO: 446322 - DNA, 1624 bp, Homo sapiens
ccagacacctcctggctccactgtgccatcgaaggccaggggagacctcaggctccacctgtgtccccagaggacacctccgccctccacaggccgaggcttcagtcccacctttctgaccagcggagtctaatgctcagctgtctccacaggcctagtgggagccgctgggctcggaggactcggagtcggagggcttggagttccaggtgttgggggccttggaggtatacctccagctgcagccgctaaagcagctaaatacggtgctgctggccttggaggtgtcctagggggtgccgggcagttcccacttggaggagtggcagcaagacctggcttcggattgtctcccattttcccaggtggggcctgcctggggaaagcttgtggccggaagagaaaatgagcttcctaggacccctgactcacgacctcatcaacgttggtgctactgcttggtggagaatgtaaaccctttgtaaccccatcccatgcccctccgactccccaccccaggagggaacgggcaggccgggcggccttgcagatccacagggcaaggaaacaagaggggagcggccaagtgccccgaccaggaggccccctacttcagaggcaagggccatgtggtcctggccccccaccccatcccttcccacctaggagctccccctccacacagcctccatctccaggggaacttggtgctacacgctggtgctcttatcttcctggggggagggaggagggaagggtggcccctcggggaaccccctacctggggctcctctaaagatggtgcagacacttcctgggcagtcccagctccccctgcccaccaggacccaccgttggctgccatccagttggtacccaagcacctgaagcctcaaagctggattcgctctagcatccctcctctcctgggtccacttggccgtctcctccccaccgatcgctgttccccacatctggggcgcttttgggttggaaaaccaccccacactgggaatagccaccttgcccttgtagaatccatccgcccatccgtccattcatccatcggtccgtccatccatgtccccagttgaccgcccggcaccactagctggctgggtgcacccaccatcaacctggttgacctgtcatggccgcctgtgccctgcctccacccccatcctacactcccccagggcgtgcggggctgtgcagactggggtgccaggcatctcctccccacccggggtgtccccacatgcagtactgtataccccccatccctccctcggtccactgaacttcagagcagttcccattcctgccccgcccatctttttgtgtctcgctgtgatagatcaataaatattttattttttgtcctggatatttggggattatttttgattgttgatattctcttttggttttattgttgtggttcattgaaaaaaaaagataatttttttttctgatccggggagctgtatccccagtagaaaaaacattttaatcactctaatataactctggatgaaacacacctttttttttaataagaaaagagaattaactgcttcagaaatgactaataaatgaaaaacctttaaaggaaaaaaaaaaa

SEQ ID NO: 446323 - DNA, 2687 bp, Homo sapiens
cgacgaggcaacaattaggctttggggataaaacgaggtgcggagagcgggctggggcatttctccccgagatggcgggtctgacggcggcggccccgcggcccggagtcctcctgctcctgctgtccatcctccacccctctcggcctggaggggtccctggggccattcctggtggagttcctggaggagtcttttatccaggggctggtctcggagcccttggaggaggagcgctggggcctggaggcaaacctcttaagccagttcccggagggcttgcgggtgctggccttggggcagggctcggcgccttccccgcagttacctttccgggggctctggtgcctggtggagtggctgacgctgctgcagcctataaagctgctaaggctggcgctgggcttggtggtgtcccaggagttggtggcttaggagtgtctgcaggtgcggtggttcctcagcctggagccggagtgaagcctgggaaagtgccgggtgtggggctgccaggtgtatacccaggtggcgtgctcccaggagctcggttccccggtgtgggggtgctccctggagttcccactggagcaggagttaagcccaaggctccaggtgtaggtggagcttttgctggaatcccaggagttggaccctttgggggaccgcaacctggagtcccactggggtatcccatcaaggcccccaagctgcctggtggctatggactgccctacaccacagggaaactgccctatggctatgggcccggaggagtggctggtgcagcgggcaaggctggttacccaacagggacaggggttggcccccaggcagcagcagcagcggcagctaaagcagcagcaaagttcggtgctggagcagccggagtcctccctggtgttggaggggctggtgttcctggcgtgcctggggcaattcctggaattggaggcatcgcaggcgttgggactccagctgcagctgcagctgcagcagcagccgctaaggcagccaagtatggagctgctgcaggcttagtgcctggtgggccaggctttggcccgggagtagttggtgtcccaggagctggcgttccaggtgttggtgtcccaggagctgggattccagttgtcccaggtgctgggatcccaggtgctgcggttccaggggttgtgtcaccagaagcagctgctaaggcagctgcaaaggcagccaaatacggggccaggcccggagtcggagttggaggcattcctacttacggggttggagctgggggctttcccggctttggtgtcggagtcggaggtatccctggagtcgcaggtgtccctggtgtcggaggtgttcccggagtcggaggtgtcccgggagttggcatttcccccgaagctcaggcagcagctgccgccaaggctgccaagtacgggttagttcctggtgtcggcgtggctcctggagttggcgtggctcctggtgtcggtgtggctcctggagttggcttggctcctggagttggcgtggctcctggagttggtgtggctcctggcgttggcgtggctcccggcattggccctggtggagttgcagctgcagcaaaatccgctgccaaggtggctgccaaagcccagctccgagctgcagctgggcttggtgctggcatccctggacttggagttggtgtcggcgtccctggacttggagttggtgctggtgttcctggacttggagttggtgctggtgttcctggcttcggggcagtacctggagccctggctgccgctaaagcagccaaatatggagcagcagtgcctggggtccttggagggctcggggctctcggtggagtaggcatcccaggcggtgtggtgggagccggacccgccgccgccgctgccgcagccaaagctgctgccaaagccgcccagtttggcctagtgggagccgctgggctcggaggactcggagtcggagggcttggagttccaggtgttgggggccttggaggtatacctccagctgcagccgctaaagcagctaaatacggagtggcagcaagacctggcttcggattgtctcccattttcccaggtggggcctgcctggggaaagcttgtggccggaagagaaaatgagcttcctaggacccctgactcacgacctcatcaacgttggtgctactgcttggtggagaatgtaaaccctttgtaaccccatcccatgcccctccgactccccaccccaggagggaacgggcaggccgggcggccttgcagatccacagggcaaggaaacaagaggggagcggctgggaatagccaccttgcccttgtagaatccatccgcccatccgtccattcatccatcggtccgtccatccatgtccccagttgaccgcccggcaccactagctggctgggtgcacccaccatcaacctggttgacctgtcatggccgcctgtgccctgcctccacccccatcctacactcccccagggcgtgcggggctgtgcagactggggtgccaggcatctcctccccacccggggtgtccccacatgcagtactgtataccccccatccctccctcggtccactgaacttcagagcagttcccattcctgccccgcccatctttttgtgtctcgctgtgatagatcaataaatattttattttttgtcctgga

SEQ ID NO: 446324 - DNA, 1166 bp, Homo sapiens
cgacgaggcaacaattaggctttggggataaaacgaggtgcggagagcgggctggggcatttctccccgagatggcgggtctgacggcggcggccccgcggcccggagtcctcctgctcctgctgtccatcctccacccctctcggcctggaggggtccctggggccattcctggtggagttcctggaggagtcttttatccaggggctggtctcggagcccttggaggaggagcgctggggcctggaggcaaacctcttaagccagttcccggagggcttgcgggtgctggccttggggcagggctcggcgccttccccgcagttacctttccgggggctctggtgcctggtggagtggctgacgctgctgcagcctataaagctgctaaggctggcgctgggcttggtggtgtcccaggagttggtggcttaggagtgtctgcaggtgcggtggttcctcagcctggagccggagtgaagcctgggaaagtgccgggtgtggggctgccaggtgtatacccaggtggcgtgctcccaggagctcggttccccggtgtgggggtgctccctggagttcccactggagcaggagttaagcccaaggctccaggtgtaggtggagcttttgctggaatcccaggagttggaccctttgggggaccgcaacctggagtcccactggggtatcccatcaaggcccccaagctgcctggtggctatggactgccctacaccacagggaaactgccctatggctatgggcccggaggagtggctggtgcagcgggcaaggctggttacccaacagggacaggggttggcccccaggcagcagcagcagcggcagctaaagcagcagcaaagttcggtgctggagcagccggagtcctccctggtgttggaggggctggtgttcctggcgtgcctggggcaattcctggaattggaggcatcgcaggcgttgggactccagctgcagctgcagctgcagcagcagccgctaaggcagccaagtatggtgagtgcctcccggggtggcaagtccacggctcgggcccctgcatagacctcggagaccctagccgcaaagccagatggacttggcctttgttccttcccaaatatgcattgttcatgcctccttacctttgccccttctgatca

SEQ ID NO: 446325 - DNA, 735 bp, Homo sapiens
cacggactctgctctgtcccagcccttgctgaaagccctgctgaatcttgttagccagcagggcttctaggagaagcacaggcctggcccaggcttgttagggatcggtgcaatgacacctgcactgcacatagtagtcgctcactaaactactggtggatgctattttatcaggatcgaccctgagcatcacaggcttagggaccagcctagggacctgagtggctgatcacagcactgccctaactccaggagacatttcccactctgggcctaggaacactgcctacactcctgtctctgtttcttatccacagttcccggagggcttgcgggtgctggccttggggcaggtgagtgctgacacccaagaaagatatcccctgtggggaccagcccctgagctcaacccagggctggtatgcagcacggtcatggaacaagggtgcaggccaggttccgtcctgggcactgacggggactgatgctgataccaactgccccaagcagctgcccaggacatgaggaaatcacagctgagtacctgggttcctttataacatagtagtgaaggctgcatggaggaagccccatggaccaaggaagcccaagggagtcgcttaactcagcaggggttcaggaaggcattctagaggaggtgggtggggaaatttgaccccaaaagatccatgcagttttcaggaaggctgaagtgagaggatcccttgagcccag

SEQ ID NO: 446326 - DNA, 617 bp, Homo sapiens
aggattacaggcgtgagccaccacccccagcccatcatccccttttgaggctgagactctgggactcagagagtataaaccacgagttagaagtagagctaggttcccaggggctccaagtctgagcgggaggacctggggtgtgtgattccacactgcccacactttgcccgggttgggggttggataagtagtagatggataagctgggccaccccattcactatcttctcttccctctgcagcgctggggcctggaggcaaacctcttaagccaggtaagacccaaggcctcggagcattgagagacagcgagggagctggggagggaggagcctacccagctgggaatgggacaaggaaactaggaacaggacaaggaagccaacgggcaggaggaaggagggaggtgtggacaccgattagcctcccaaggatgagtaggccggggccaggtcccagggcttccaggaacaagaggctggaagcagctccatgtcctccctgtgtgagggcgtctagcatctaccctacatgtgcatgtgtgttcacccagctgtccagagactcctctctgcaaaggagaggctgttagaggcaacatcagggattgctcc

SEQ ID NO: 446327 - DNA, 3479 bp, Homo sapiens
cgacgaggcaacaattaggctttggggataaaacgaggtgcggagagcgggctggggcatttctccccgagatggcgggtctgacggcggcggccccgcggcccggagtcctcctgctcctgctgtccatcctccacccctctcggcctggaggggtccctggggccattcctggtggagttcctggaggagtcttttatccaggggctggtctcggagcccttggaggaggagcgctggggcctggaggcaaacctcttaagccagttcccggagggcttgcgggtgctggccttggggcagggctcggcgccttccccgcagttacctttccgggggctctggtgcctggtggagtggctgacgctgctgcagcctataaagctgctaaggctggcgctgggcttggtggtgtcccaggagttggtggcttaggagtgtctgcaggtgcggtggttcctcagcctggagccggagtgaagcctgggaaagtgccgggtgtggggctgccaggtgtatacccaggtggcgtgctcccaggagctcggttccccggtgtgggggtgctccctggagttcccactggagcaggagttaagcccaaggctccaggtgtaggtggagcttttgctggaatcccaggagttggaccctttgggggaccgcaacctggagtcccactggggtatcccatcaaggcccccaagctgcctggtggctatggactgccctacaccacagggaaactgccctatggctatgggcccggaggagtggctggtgcagcgggcaaggctggttacccaacagggacaggggttggcccccaggcagcagcagcagcggcagctaaagcagcagcaaagttcggtgctggagcagccggagtcctccctggtgttggaggggctggtgttcctggcgtgcctggggcaattcctggaattggaggcatcgcaggcgttgggactccagctgcagctgcagctgcagcagcagccgctaaggcagccaagtatggagctgctgcaggcttagtgcctggtgggccaggctttggcccgggagtagttggtgtcccaggagctggcgttccaggtgttggtgtcccaggagctgggattccagttgtcccaggtgctgggatcccaggtgctgcggttccaggggttgtgtcaccagaagcagctgctaaggcagctgcaaaggcagccaaatacggggccaggcccggagtcggagttggaggcattcctacttacggggttggagctgggggctttcccggctttggtgtcggagtcggaggtatccctggagtcgcaggtgtccctggtgtcggaggtgttcccggagtcggaggtgtcccgggagttggcatttcccccgaagctcaggcagcagctgccgccaaggctgccaagtacggagtggggaccccagcagctgcagctgctaaagcagccgccaaagccgcccagtttgctcttctcaatcttgcagggttagttcctggtgtcggcgtggctcctggagttggcgtggctcctggtgtcggtgtggctcctggagttggcttggctcctggagttggcgtggctcctggagttggtgtggctcctggcgttggcgtggctcccggcattggccctggtggagttgcagctgcagcaaaatccgctgccaaggtggctgccaaagcccagctccgagctgcagctgggcttggtgctggcatccctggacttggagttggtgtcggcgtccctggacttggagttggtgctggtgttcctggacttggagttggtgctggtgttcctggcttcggggcagtacctggagccctggctgccgctaaagcagccaaatatggagcagcagtgcctggggtccttggagggctcggggctctcggtggagtaggcatcccaggcggtgtggtgggagccggacccgccgccgccgctgccgcagccaaagctgctgccaaagccgcccagtttggcctagtgggagccgctgggctcggaggactcggagtcggagggcttggagttccaggtgttgggggccttggaggtatacctccagctgcagccgctaaagcagctaaatacggtgctgctggccttggaggtgtcctagggggtgccgggcagttcccacttggaggagtggcagcaagacctggcttcggattgtctcccattttcccaggtggggcctgcctggggaaagcttgtggccggaagagaaaatgagcttcctaggacccctgactcacgacctcatcaacgttggtgctactgcttggtggagaatgtaaaccctttgtaaccccatcccatgcccctccgactccccaccccaggagggaacgggcaggccgggcggccttgcagatccacagggcaaggaaacaagaggggagcggccaagtgccccgaccaggaggccccctacttcagaggcaagggccatgtggtcctggccccccaccccatcccttcccacctaggagctccccctccacacagcctccatctccaggggaacttggtgctacacgctggtgctcttatcttcctggggggagggaggagggaagggtggcccctcggggaaccccctacctggggctcctctaaagatggtgcagacacttcctgggcagtcccagctccccctgcccaccaggacccaccgttggctgccatccagttggtacccaagcacctgaagcctcaaagctggattcgctctagcatccctcctctcctgggtccacttggccgtctcctccccaccgatcgctgttccccacatctggggcgcttttgggttggaaaaccaccccacactgggaatagccaccttgcccttgtagaatccatccgcccatccgtccattcatccatcggtccgtccatccatgtccccagttgaccgcccggcaccactagctggctgggtgcacccaccatcaacctggttgacctgtcatggccgcctgtgccctgcctccacccccatcctacactcccccagggcgtgcggggctgtgcagactggggtgccaggcatctcctccccacccggggtgtccccacatgcagtactgtataccccccatccctccctcggtccactgaacttcagagcagttcccattcctgccccgcccatctttttgtgtctcgctgtgatagatcaataaatattttattttttgtcctggatatttggggattatttttgattgttgatattctcttttggttttattgttgtggttcattgaaaaaaaaagataatttttttttctgatccggggagctgtatccccagtagaaaaaacattttaatcactctaatataactctggatgaaacacacctttttttttaataagaaaagagaattaactgcttcagaaatgactaataaatgaaaaacctttaaaggaaaaaaaaaaa

SEQ ID NO: 446328 - DNA, 3451 bp, Homo sapiens
cgacgaggcaacaattaggctttggggataaaacgaggtgcggagagcgggctggggcatttctccccgagatggcgggtctgacggcggcggccccgcggcccggagtcctcctgctcctgctgtccatcctccacccctctcggcctggaggggtccctggggccattcctggtggagttcctggaggagtcttttatccaggggctggtctcggagcccttggaggaggagcgctggggcctggaggcaaacctcttaagccagttcccggagggcttgcgggtgctggccttggggcagggctcggcgccttccccgcagttacctttccgggggctctggtgcctggtggagtggctgacgctgctgcagcctataaagctgctaaggctggcgctgggcttggtggtgtcccaggagttggtggcttaggagtgtctgcaggtgcggtggttcctcagcctggagccggagtgaagcctgggaaagtgccgggtgtggggctgccaggtgtatacccaggtggcgtgctcccaggagctcggttccccggtgtgggggtgctccctggagttcccactggagcaggagttaagcccaaggctccaggtgtaggtggagcttttgctggaatcccaggagttggaccctttgggggaccgcaacctggagtcccactggggtatcccatcaaggcccccaagctgcctggtggctatggactgccctacaccacagggaaactgccctatggctatgggcccggaggagtggctggtgcagcgggcaaggctggttacccaacagggacaggggttggcccccaggcagcagcagcagcggcagctaaagcagcagcaaagttcggtgctggagcagccggagtcctccctggtgttggaggggctggtgttcctggcgtgcctggggcaattcctggaattggaggcatcgcaggcgttgggactccagctgcagctgcagctgcagcagcagccgctaaggcagccaagtatggagctgctgcaggcttagtgcctggtgggccaggctttggcccgggagtagttggtgtcccaggagctggcgttccaggtgttggtgtcccaggagctgggattccagttgtcccaggtgctgggatcccaggtgctgcggttccaggggttgtgtcaccagaagcagctgctaaggcagctgcaaaggcagccaaatacggggccaggcccggagtcggagttggaggcattcctacttacggggttggagctgggggctttcccggctttggtgtcggagtcggaggtatccctggagtcgcaggtgtccctggtgtcggaggtgttcccggagtcggaggtgtcccgggagttggcatttcccccgaagctcaggcagcagctgccgccaaggctgccaagtacggagtggggaccccagcagctgcagctgctaaagcagccgccaaagccgcccagtttgctcttctcaatcttgcagggttagttcctggtgtcggcgtggctcctggagttggcgtggctcctggtgtcggtgtggctcctggagttggcttggctcctggagttggcgtggctcctggagttggtgtggctcctggcgttggcgtggctcccggcattggccctggtggagttgcagctgcagcaaaatccgctgccaaggtggctgccaaagcccagctccgagctgcagctgggcttggtgctggcatccctggacttggagttggtgtcggcgtccctggacttggagttggtgctggtgttcctggacttggagttggtgctggtgttcctggcttcggggcagtacctggagccctggctgccgctaaagcagccaaatatggagcagcagtgcctggggtccttggagggctcggggctctcggtggagtaggcatcccaggcggtgtggtgggagccggacccgccgccgccgctgccgcagccaaagctgctgccaaagccgcccagtttggcctagtgggagccgctgggctcggaggactcggagtcggagggcttggagttccaggtgttgggggccttggaggtatacctccagctgcagccgctaaagcagctaaatacggtgctgctggccttggaggtgtcctagggggtgccgggcagttcccacttggaggagtggcagcaagacctggcttcggattgtctcccattttcccaggtggggcctgcctggggaaagcttgtggccggaagagaaaatgagcttcctaggacccctgactcacgacctcatcaacgttggtgctactgcttggtggagaatgtaaaccctttgtaaccccatcccatgcccctccgactccccaccccaggagggaacgggcaggccgggcggccttgcagatccacagggcaaggaaacaagaggggagcggccaagtgccccgaccaggaggccccctacttcagaggcaagggccatgtggtcctggccccccaccccatcccttcccacctaggagctccccctccacacagcctccatctccaggggaacttggtgctacacgctggtgctcttatcttcctggggggagggaggagggaagggtggcccctcggggaaccccctacctggggctcctctaaagatggtgcagacacttcctgggcagtcccagctctgccatccagttggtacccaagcacctgaagcctcaaagctggattcgctctagcatccctcctctcctgggtccacttggccgtctcctccccaccgatcgctgttccccacatctggggcgcttttgggttggaaaaccaccccacactgggaatagccaccttgcccttgtagaatccatccgcccatccgtccattcatccatcggtccgtccatccatgtccccagttgaccgcccggcaccactagctggctgggtgcacccaccatcaacctggttgacctgtcatggccgcctgtgccctgcctccacccccatcctacactcccccagggcgtgcggggctgtgcagactggggtgccaggcatctcctccccacccggggtgtccccacatgcagtactgtataccccccatccctccctcggtccactgaacttcagagcagttcccattcctgccccgcccatctttttgtgtctcgctgtgatagatcaataaatattttattttttgtcctggatatttggggattatttttgattgttgatattctcttttggttttattgttgtggttcattgaaaaaaaaagataatttttttttctgatccggggagctgtatccccagtagaaaaaacattttaatcactctaatataactctggatgaaacacacctttttttttaataagaaaagagaattaactgcttcagaaatgactaataaatgaaaaacctttaaaggaaaaaaaaaaa

SEQ ID NO: 446329 - DNA, 3445 bp, Homo sapiens
cgacgaggcaacaattaggctttggggataaaacgaggtgcggagagcgggctggggcatttctccccgagatggcgggtctgacggcggcggccccgcggcccggagtcctcctgctcctgctgtccatcctccacccctctcggcctggaggggtccctggggccattcctggtggagttcctggaggagtcttttatccaggggctggtctcggagcccttggaggaggagcgctggggcctggaggcaaacctcttaagccagttcccggagggcttgcgggtgctggccttggggcagggctcggcgccttccccgcagttacctttccgggggctctggtgcctggtggagtggctgacgctgctgcagcctataaagctgctaaggctggcgctgggcttggtggtgtcccaggagttggtggcttaggagtgtctgcaggtgcggtggttcctcagcctggagccggagtgaagcctgggaaagtgccgggtgtggggctgccaggtgtatacccaggtggcgtgctcccaggagctcggttccccggtgtgggggtgctccctggagttcccactggagcaggagttaagcccaaggctccaggtgtaggtggagcttttgctggaatcccaggagttggaccctttgggggaccgcaacctggagtcccactggggtatcccatcaaggcccccaagctgcctggtggctatggactgccctacaccacagggaaactgccctatggctatgggcccggaggagtggctggtgcagcgggcaaggctggttacccaacagggacaggggttggcccccaggcagcagcagcagcggcagctaaagcagcagcaaagttcggtgctggagcagccggagtcctccctggtgttggaggggctggtgttcctggcgtgcctggggcaattcctggaattggaggcatcgcaggcgttgggactccagctgcagctgcagctgcagcagcagccgctaaggcagccaagtatggagctgctgcaggcttagtgcctggtgggccaggctttggcccgggagtagttggtgtcccaggagctggcgttccaggtgttggtgtcccaggagctgggattccagttgtcccaggtgctgggatcccaggtgctgcggttccaggggttgtgtcaccagaagcagctgctaaggcagctgcaaaggcagccaaatacggggccaggcccggagtcggagttggaggcattcctacttacggggttggagctgggggctttcccggctttggtgtcggagtcggaggtatccctggagtcgcaggtgtccctggtgtcggaggtgttcccggagtcggaggtgtcccgggagttggcatttcccccgaagctcaggcagcagctgccgccaaggctgccaagtacggagtggggaccccagcagctgcagctgctaaagcagccgccaaagccgcccagtttgctcttctcaatcttgcagggttagttcctggtgtcggcgtggctcctggagttggcgtggctcctggtgtcggtgtggctcctggagttggcttggctcctggagttggcgtggctcctggagttggtgtggctcctggcgttggcgtggctcccggcattggccctggtggagttgcagctgcagcaaaatccgctgccaaggtggctgccaaagcccagctccgagctgcagctgggcttggtgctggcatccctggacttggagttggtgtcggcgtccctggacttggagttggtgctggtgttcctggacttggagttggtgctggtgttcctggcttcggggcagtacctggagccctggctgccgctaaagcagccaaatatggagcagcagtgcctggggtccttggagggctcggggctctcggtggagtaggcatcccaggcggtgtggtgggagccggacccgccgccgccgctgccgcagccaaagctgctgccaaagccgcccagtttggcctagtgggagccgctgggctcggaggactcggagtcggagggcttggagttccaggtgttgggggccttggaggtatacctccagctgcagccgctaaagcagctaaatacggtgctgctggccttggaggtgtcctagggggtgccgggcagttcccacttggaggagtggcagcaagacctggcttcggattgtctcccattttcccaggtggggcctgcctggggaaagcttgtggccggaagagaaaatgagcttcctaggacccctgactcacgacctcatcaacgttggtgctactgcttggtggagaatgtaaaccctttgtaaccccatcccatgcccctccgactccccaccccaggagggaacgggcaggccgggcggccttgcagatccacagggcaaggaaacaagaggggagcggccaagtgccccgaccaggaggccccctacttcagaggcaagggccatgtggtcctggccccccaccccatcccttcccacctaggagctccccctccacacagcctccatctccaggggaacttggtgctacacgctggtgctcttatcttcctggggggagggaggagggaagggtggcccctcggggaaccccctacctggggctcctctaaagatggtgcagacacttcctgggcagtcccagctccccctgcccaccaggacccaccgttggctgccatccagttggtacccaagcacctgaagcctcaaagctggattcgctctagcatccctcctctcctgggtccacttggccgtctcctccccaccgatcgctgttccccacatctggggcgcttttgggttggaaaaccaccccacactgggaatagccaccttgcccttgtagaatccatccgcccatccgtccattcatccatcggtccgtccatccatgtccccagttgaccgcccggcaccactagctggctgggtgcacccaccatcaacctggttgacctgtcatggccgcctgtgccctgcctccacccccatcctacactcccccagggcgtgcggggctgtgcagactggggtgccaggcatctcctccccacccggggtgtccccacatgcagtactgtataccccccatccctccctcggtccactgaacttcagagcagttcccattcctgccccgcccatctttttgtgtctcgctgtgatagatcaataaatattttattttttgtcctggaaagaacacaaacacacacccccccaggggccacctatgccggggggccggagacaggagggcccaccgcacggggcacatggcaagagacggaacccgcgaaccacacaacctggtaccaaaggggaacaaacgacggatacccaagagagacgccgaatcaacaccgagtcagccgggaaaacgtgcccacgacccggcaaa

SEQ ID NO: 446330 - DNA, 3159 bp, Homo sapiens
cgacgaggcaacaattaggctttggggataaaacgaggtgcggagagcgggctggggcatttctccccgagatggcgggtctgacggcggcggccccgcggcccggagtcctcctgctcctgctgtccatcctccacccctctcggcctggaggggtccctggggccattcctggtggagttcctggaggagtcttttatccaggggctggtctcggagcccttggaggaggagcgctggggcctggaggcaaacctcttaagccagttcccggagggcttgcgggtgctggccttggggcagggctcggcgccttccccgcagttacctttccgggggctctggtgcctggtggagtggctgacgctgctgcagcctataaagctgctaaggctggcgctgggcttggtggtgtcccaggagttggtggcttaggagtgtctgcaggtgcggtggttcctcagcctggagccggagtgaagcctgggaaagtgccgggtgtggggctgccaggtgtatacccaggtggcgtgctcccaggagctcggttccccggtgtgggggtgctccctggagttcccactggagcaggagttaagcccaaggctccaggtgtaggtggagcttttgctggaatcccaggagttggaccctttgggggaccgcaacctggagtcccactggggtatcccatcaaggcccccaagctgcctggtggctatggactgccctacaccacagggaaactgccctatggctatgggcccggaggagtggctggtgcagcgggcaaggctggttacccaacagggacaggggttggcccccaggcagcagcagcagcggcagctaaagcagcagcaaagttcggtgctggagcagccggagtcctccctggtgttggaggggctggtgttcctggcgtgcctggggcaattcctggaattggaggcatcgcaggcgttgggactccagctgcagctgcagctgcagcagcagccgctaaggcagccaagtatggagctgctgcaggcttagtgcctggtgggccaggctttggcccgggagtagttggtgtcccaggagctggcgttccaggtgttggtgtcccaggagctgggattccagttgtcccaggtgctgggatcccaggtgctgcggttccaggggttgtgtcaccagaagcagctgctaaggcagctgcaaaggcagccaaatacggggccaggcccggagtcggagttggaggcattcctacttacggggttggagctgggggctttcccggctttggtgtcggagtcggaggtatccctggagtcgcaggtgtccctggtgtcggaggtgttcccggagtcggaggtgtcccgggagttggcatttcccccgaagctcaggcagcagctgccgccaaggctgccaagtacggagtggggaccccagcagctgcagctgctaaagcagccgccaaagccgcccagtttgctcttctcaatcttgcagggttagttcctggtgtcggcgtggctcctggagttggcgtggctcctggtgtcggtgtggctcctggagttggcttggctcctggagttggcgtggctcctggagttggtgtggctcctggcgttggcgtggctcccggcattggccctggtggagttgcagctgcagcaaaatccgctgccaaggtggctgccaaagcccagctccgagctgcagctgggcttggtgctggcatccctggacttggagttggtgtcggcgtccctggacttggagttggtgctggtgttcctggacttggagttggtgctggtgttcctggcttcggggcagtacctggagccctggctgccgctaaagcagccaaatatggagcagcagtgcctggggtccttggagggctcggggctctcggtggagtaggcatcccaggcggtgtggtgggagccggacccgccgccgccgctgccgcagccaaagctgctgccaaagccgcccagtttggcctagtgggagccgctgggctcggaggactcggagtcggagggcttggagttccaggtgttgggggccttggaggtatacctccagctgcagccgctaaagcagctaaatacggtgctgctggccttggaggtgtcctagggggtgccgggcagttcccacttggaggagtggcagcaagacctggcttcggattgtctcccattttcccaggtggggcctgcctggggaaagcttgtggccggaagagaaaatgagcttcctaggacccctgactcacgacctcatcaacgttggtgctactgcttggtggagaatgtaaaccctttgtaaccccatcccatgcccctccgactccccaccccaggagggaacgggcaggccgggcggccttgcagatccacagggcaaggaaacaagaggggagcggccaagtgccccgaccaggaggccccctacttcagaggcaagggccatgtggtcctggccccccaccccatcccttcccacctaggagctccccctccacacagcctccatctccaggggaacttggtgctacacgctggtgctcttatcttcctggggggagggaggagggaagggtggcccctcggggaaccccctacctggggctcctctaaagatggtgcagacacttcctgggcagtcccagctccccctgcccaccaggacccaccgttggctgccatccagttggtacccaagcacctgaagcctcaaagctggattcgctctagcatccctcctctcctgggtccacttggccgtctcctccccaccgatcgctgttccccacatctggggcgcttttgggttggaaaaccaccccacactgggaatagccaccttgcccttgtagaatccatccaccatcaacctggttgacctgtcatggccgcctgtgccctgcctccacccccatcctacactcccccagggcgtgcggggctgtgcagactggggtgccaggcatctcctccccacccggggtgtccccacatgcagtactgtataccccccatccctccctcggtccactgaacttcagagcagttcccattcctgccccgcccatctttttgtgtctcgctgtgatagatcaataaatattttattttttgtcctgga

SEQ ID NO: 446331 - DNA, 3350 bp, Homo sapiens
cgacgaggcaacaattaggctttggggataaaacgaggtgcggagagcgggctggggcatttctccccgagatggcgggtctgacggcggcggccccgcggcccggagtcctcctgctcctgctgtccatcctccacccctctcggcctggaggggtccctggggccattcctggtggagttcctggaggagtcttttatccaggggctggtctcggagcccttggaggaggagcgctggggcctggaggcaaacctcttaagccagttcccggagggcttgcgggtgctggccttggggcagggctcggcgccttccccgcagttacctttccgggggctctggtgcctggtggagtggctgacgctgctgcagcctataaagctgctaaggctggcgctgggcttggtggtgtcccaggagttggtggcttaggagtgtctgcaggtgcggtggttcctcagcctggagccggagtgaagcctgggaaagtgccgggtgtggggctgccaggtgtatacccaggtggcgtgctcccaggagctcggttccccggtgtgggggtgctccctggagttcccactggagcaggagttaagcccaaggctccaggtgtaggtggagcttttgctggaatcccaggagttggaccctttgggggaccgcaacctggagtcccactggggtatcccatcaaggcccccaagctgcctggtggctatggactgccctacaccacagggaaactgccctatggctatgggcccggaggagtggctggtgcagcgggcaaggctggttacccaacagggacaggggttggcccccaggcagcagcagcagcggcagctaaagcagcagcaaagttcggtgctggagcagccggagtcctccctggtgttggaggggctggtgttcctggcgtgcctggggcaattcctggaattggaggcatcgcaggcgttgggactccagctgcagctgcagctgcagcagcagccgctaaggcagccaagtatggagctgctgcaggcttagtgcctggtgggccaggctttggcccgggagtagttggtgtcccaggagctggcgttccaggtgttggtgtcccaggagctgggattccagttgtcccaggtgctgggatcccaggtgctgcggttccaggggttgtgtcaccagaagcagctgctaaggcagctgcaaaggcagccaaatacggggccaggcccggagtcggagttggaggcattcctacttacggggttggagctgggggctttcccggctttggtgtcggagtcggaggtatccctggagtcgcaggtgtccctggtgtcggaggtgttcccggagtcggaggtgtcccgggagttggcatttcccccgaagctcaggcagcagctgccgccaaggctgccaagtacgggttagttcctggtgtcggcgtggctcctggagttggcgtggctcctggtgtcggtgtggctcctggagttggcttggctcctggagttggcgtggctcctggagttggtgtggctcctggcgttggcgtggctcccggcattggccctggtggagttgcagctgcagcaaaatccgctgccaaggtggctgccaaagcccagctccgagctgcagctgggcttggtgctggcatccctggacttggagttggtgtcggcgtccctggacttggagttggtgctggtgttcctggacttggagttggtgctggtgttcctggcttcggggcagtacctggagccctggctgccgctaaagcagccaaatatggagcagcagtgcctggggtccttggagggctcggggctctcggtggagtaggcatcccaggcggtgtggtgggagccggacccgccgccgccgctgccgcagccaaagctgctgccaaagccgcccagtttggcctagtgggagccgctgggctcggaggactcggagtcggagggcttggagttccaggtgttgggggccttggaggtatacctccagctgcagccgctaaagcagctaaatacggagtggcagcaagacctggcttcggattgtctcccattttcccaggtggggcctgcctggggaaagcttgtggccggaagagaaaatgagcttcctaggacccctgactcacgacctcatcaacgttggtgctactgcttggtggagaatgtaaaccctttgtaaccccatcccatgcccctccgactccccaccccaggagggaacgggcaggccgggcggccttgcagatccacagggcaaggaaacaagaggggagcggccaagtgccccgaccaggaggccccctacttcagaggcaagggccatgtggtcctggccccccaccccatcccttcccacctaggagctccccctccacacagcctccatctccaggggaacttggtgctacacgctggtgctcttatcttcctggggggagggaggagggaagggtggcccctcggggaaccccctacctggggctcctctaaagatggtgcagacacttcctgggcagtcccagctccccctgcccaccaggacccaccgttggctgccatccagttggtacccaagcacctgaagcctcaaagctggattcgctctagcatccctcctctcctgggtccacttggccgtctcctccccaccgatcgctgttccccacatctggggcgcttttgggttggaaaaccaccccacactgggaatagccaccttgcccttgtagaatccatccgcccatccgtccattcatccatcggtccgtccatccatgtccccagttgaccgcccggcaccactagctggctgggtgcacccaccatcaacctggttgacctgtcatggccgcctgtgccctgcctccacccccatcctacactcccccagggcgtgcggggctgtgcagactggggtgccaggcatctcctccccacccggggtgtccccacatgcagtactgtataccccccatccctccctcggtccactgaacttcagagcagttcccattcctgccccgcccatctttttgtgtctcgctgtgatagatcaataaatattttattttttgtcctggatatttggggattatttttgattgttgatattctcttttggttttattgttgtggttcattgaaaaaaaaagataatttttttttctgatccggggagctgtatccccagtagaaaaaacattttaatcactctaatataactctggatgaaacacacctttttttttaataagaaaagagaattaactgcttcagaaatgactaataaatgaaaaacctttaaaggaaaaaaaaaaa

SEQ ID NO: 446332 - DNA, 3302 bp, Homo sapiens
cgacgaggcaacaattaggctttggggataaaacgaggtgcggagagcgggctggggcatttctccccgagatggcgggtctgacggcggcggccccgcggcccggagtcctcctgctcctgctgtccatcctccacccctctcggcctggaggggtccctggggccattcctggtggagttcctggaggagtcttttatccaggggctggtctcggagcccttggaggaggagcgctggggcctggaggcaaacctcttaagccagttcccggagggcttgcgggtgctggccttggggcagggctcggcgccttccccgcagttacctttccgggggctctggtgcctggtggagtggctgacgctgctgcagcctataaagctgctaaggctggcgctgggcttggtggtgtcccaggagttggtggcttaggagtgtctgcaggtgcggtggttcctcagcctggagccggagtgaagcctgggaaagtgccgggtgtggggctgccaggtgtatacccaggtggcgtgctcccaggagttggaccctttgggggaccgcaacctggagtcccactggggtatcccatcaaggcccccaagctgcctggtggctatggactgccctacaccacagggaaactgccctatggctatgggcccggaggagtggctggtgcagcgggcaaggctggttacccaacagggacaggggttggcccccaggcagcagcagcagcggcagctaaagcagcagcaaagttcggtgctggagcagccggagtcctccctggtgttggaggggctggtgttcctggcgtgcctggggcaattcctggaattggaggcatcgcaggcgttgggactccagctgcagctgcagctgcagcagcagccgctaaggcagccaagtatggagctgctgcaggcttagtgcctggtgggccaggctttggcccgggagtagttggtgtcccaggagctggcgttccaggtgttggtgtcccaggagctgggattccagttgtcccaggtgctgggatcccaggtgctgcggttccaggggttgtgtcaccagaagcagctgctaaggcagctgcaaaggcagccaaatacggggccaggcccggagtcggagttggaggcattcctacttacggggttggagctgggggctttcccggctttggtgtcggagtcggaggtatccctggagtcgcaggtgtccctggtgtcggaggtgttcccggagtcggaggtgtcccgggagttggcatttcccccgaagctcaggcagcagctgccgccaaggctgccaagtacgggttagttcctggtgtcggcgtggctcctggagttggcgtggctcctggtgtcggtgtggctcctggagttggcttggctcctggagttggcgtggctcctggagttggtgtggctcctggcgttggcgtggctcccggcattggccctggtggagttgcagctgcagcaaaatccgctgccaaggtggctgccaaagcccagctccgagctgcagctgggcttggtgctggcatccctggacttggagttggtgtcggcgtccctggacttggagttggtgctggtgttcctggacttggagttggtgctggtgttcctggcttcggggcagtacctggagccctggctgccgctaaagcagccaaatatggagcagcagtgcctggggtccttggagggctcggggctctcggtggagtaggcatcccaggcggtgtggtgggagccggacccgccgccgccgctgccgcagccaaagctgctgccaaagccgcccagtttggcctagtgggagccgctgggctcggaggactcggagtcggagggcttggagttccaggtgttgggggccttggaggtatacctccagctgcagccgctaaagcagctaaatacggtgctgctggccttggaggtgtcctagggggtgccgggcagttcccacttggaggagtggcagcaagacctggcttcggattgtctcccattttcccaggtggggcctgcctggggaaagcttgtggccggaagagaaaatgagcttcctaggacccctgactcacgacctcatcaacgttggtgctactgcttggtggagaatgtaaaccctttgtaaccccatcccatgcccctccgactccccaccccaggagggaacgggcaggccgggcggccttgcagatccacagggcaaggaaacaagaggggagcggccaagtgccccgaccaggaggccccctacttcagaggcaagggccatgtggtcctggccccccaccccatcccttcccacctaggagctccccctccacacagcctccatctccaggggaacttggtgctacacgctggtgctcttatcttcctggggggagggaggagggaagggtggcccctcggggaaccccctacctggggctcctctaaagatggtgcagacacttcctgggcagtcccagctccccctgcccaccaggacccaccgttggctgccatccagttggtacccaagcacctgaagcctcaaagctggattcgctctagcatccctcctctcctgggtccacttggccgtctcctccccaccgatcgctgttccccacatctggggcgcttttgggttggaaaaccaccccacactgggaatagccaccttgcccttgtagaatccatccgcccatccgtccattcatccatcggtccgtccatccatgtccccagttgaccgcccggcaccactagctggctgggtgcacccaccatcaacctggttgacctgtcatggccgcctgtgccctgcctccacccccatcctacactcccccagggcgtgcggggctgtgcagactggggtgccaggcatctcctccccacccggggtgtccccacatgcagtactgtataccccccatccctccctcggtccactgaacttcagagcagttcccattcctgccccgcccatctttttgtgtctcgctgtgatagatcaataaatattttattttttgtcctggatatttggggattatttttgattgttgatattctcttttggttttattgttgtggttcattgaaaaaaaaagataatttttttttctgatccggggagctgtatccccagtagaaaaaacattttaatcactctaatataactctggatgaaacacacctttttttttaataagaaaagagaattaactgcttcagaaatgactaataaatgaaaaacctttaaaggaaaaaaaaaaa

SEQ ID NO: 446333 - DNA, 3338 bp, Homo sapiens
cgacgaggcaacaattaggctttggggataaaacgaggtgcggagagcgggctggggcatttctccccgagatggcgggtctgacggcggcggccccgcggcccggagtcctcctgctcctgctgtccatcctccacccctctcggcctggaggggtccctggggccattcctggtggagttcctggaggagtcttttatccaggggctggtctcggagcccttggaggaggagcgctggggcctggaggcaaacctcttaagccagggctcggcgccttccccgcagttacctttccgggggctctggtgcctggtggagtggctgacgctgctgcagcctataaagctgctaaggctggcgctgggcttggtggtgtcccaggagttggtggcttaggagtgtctgcaggtgcggtggttcctcagcctggagccggagtgaagcctgggaaagtgccgggtgtggggctgccaggtgtatacccaggtggcgtgctcccaggagctcggttccccggtgtgggggtgctccctggagttcccactggagcaggagttaagcccaaggctccaggagttggaccctttgggggaccgcaacctggagtcccactggggtatcccatcaaggcccccaagctgcctggtggctatggactgccctacaccacagggaaactgccctatggctatgggcccggaggagtggctggtgcagcgggcaaggctggttacccaacagggacaggggttggcccccaggcagcagcagcagcggcagctaaagcagcagcaaagttcggtgctggagcagccggagtcctccctggtgttggaggggctggtgttcctggcgtgcctggggcaattcctggaattggaggcatcgcaggcgttgggactccagctgcagctgcagctgcagcagcagccgctaaggcagccaagtatggagctgctgcaggcttagtgcctggtgggccaggctttggcccgggagtagttggtgtcccaggagctggcgttccaggtgttggtgtcccaggagctgggattccagttgtcccaggtgctgggatcccaggtgctgcggttccaggggttgtgtcaccagaagcagctgctaaggcagctgcaaaggcagccaaatacggggccaggcccggagtcggagttggaggcattcctacttacggggttggagctgggggctttcccggctttggtgtcggagtcggaggtatccctggagtcgcaggtgtccctggtgtcggaggtgttcccggagtcggaggtgtcccgggagttggcatttcccccgaagctcaggcagcagctgccgccaaggctgccaagtacgggttagttcctggtgtcggcgtggctcctggagttggcgtggctcctggtgtcggtgtggctcctggagttggcttggctcctggagttggcgtggctcctggagttggtgtggctcctggcgttggcgtggctcccggcattggccctggtggagttgcagctgcagcaaaatccgctgccaaggtggctgccaaagcccagctccgagctgcagctgggcttggtgctggcatccctggacttggagttggtgtcggcgtccctggacttggagttggtgctggtgttcctggacttggagttggtgctggtgttcctggcttcggggcagtacctggagccctggctgccgctaaagcagccaaatatggagcagcagtgcctggggtccttggagggctcggggctctcggtggagtaggcatcccaggcggtgtggtgggagccggacccgccgccgccgctgccgcagccaaagctgctgccaaagccgcccagtttggcctagtgggagccgctgggctcggaggactcggagtcggagggcttggagttccaggtgttgggggccttggaggtatacctccagctgcagccgctaaagcagctaaatacggtgctgctggccttggaggtgtcctagggggtgccgggcagttcccacttggaggagtggcagcaagacctggcttcggattgtctcccattttcccaggtggggcctgcctggggaaagcttgtggccggaagagaaaatgagcttcctaggacccctgactcacgacctcatcaacgttggtgctactgcttggtggagaatgtaaaccctttgtaaccccatcccatgcccctccgactccccaccccaggagggaacgggcaggccgggcggccttgcagatccacagggcaaggaaacaagaggggagcggccaagtgccccgaccaggaggccccctacttcagaggcaagggccatgtggtcctggccccccaccccatcccttcccacctaggagctccccctccacacagcctccatctccaggggaacttggtgctacacgctggtgctcttatcttcctggggggagggaggagggaagggtggcccctcggggaaccccctacctggggctcctctaaagatggtgcagacacttcctgggcagtcccagctccccctgcccaccaggacccaccgttggctgccatccagttggtacccaagcacctgaagcctcaaagctggattcgctctagcatccctcctctcctgggtccacttggccgtctcctccccaccgatcgctgttccccacatctggggcgcttttgggttggaaaaccaccccacactgggaatagccaccttgcccttgtagaatccatccgcccatccgtccattcatccatcggtccgtccatccatgtccccagttgaccgcccggcaccactagctggctgggtgcacccaccatcaacctggttgacctgtcatggccgcctgtgccctgcctccacccccatcctacactcccccagggcgtgcggggctgtgcagactggggtgccaggcatctcctccccacccggggtgtccccacatgcagtactgtataccccccatccctccctcggtccactgaacttcagagcagttcccattcctgccccgcccatctttttgtgtctcgctgtgatagatcaataaatattttattttttgtcctggatatttggggattatttttgattgttgatattctcttttggttttattgttgtggttcattgaaaaaaaaagataatttttttttctgatccggggagctgtatccccagtagaaaaaacattttaatcactctaatataactctggatgaaacacacctttttttttaataagaaaagagaattaactgcttcagaaatgactaataaatgaaaaacctttaaaggaaaaaaaaaaa

SEQ ID NO: 446334 - DNA, 2800 bp, Homo sapiens
ggtgctgggacctgaacttgctctctttattcccacaggagttggaccctttgggggaccgcaacctggagtcccactggggtatcccatcaaggcccccaagctgcctggtggctatggactgccctacaccacagggaaactgccctatggctatgggcccggaggagtggctggtgcagcgggcaaggctggttacccaacagggacaggggttggcccccaggcagcagcagcagcggcagctaaagcagcagcaaagttcggtgctggagcagccggagtcctccctggtgttggaggggctggtgttcctggcgtgcctggggcaattcctggaattggaggcatcgcaggcgttgggactccagctgcagctgcagctgcagcagcagccgctaaggcagccaagtatggagctgctgcaggcttagtgcctggtgggccaggctttggcccgggagtagttggtgtcccaggagctggcgttccaggtgttggtgtcccaggagctgggattccagttgtcccaggtgctgggatcccaggtgctgcggttccaggggttgtgtcaccagaagcagctgctaaggcagctgcaaaggcagccaaatacggggccaggcccggagtcggagttggaggcattcctacttacggggttggagctgggggctttcccggctttggtgtcggagtcggaggtatccctggagtcgcaggtgtccctggtgtcggaggtgttcccggagtcggaggtgtcccgggagttggcatttcccccgaagctcaggcagcagctgccgccaaggctgccaagtacgggttagttcctggtgtcggcgtggctcctggagttggcgtggctcctggtgtcggtgtggctcctggagttggcttggctcctggagttggcgtggctcctggagttggtgtggctcctggcgttggcgtggctcccggcattggccctggtggagttgcagctgcagcaaaatccgctgccaaggtggctgccaaagcccagctccgagctgcagctgggcttggtgctggcatccctggacttggagttggtgtcggcgtccctggacttggagttggtgctggtgttcctggacttggagttggtgctggtgttcctggcttcggggcagtacctggagccctggctgccgctaaagcagccaaatatggagcagcagtgcctggggtccttggagggctcggggctctcggtggagtaggcatcccaggcggtgtggtgggagccggacccgccgccgccgctgccgcagccaaagctgctgccaaagccgcccagtttggcctagtgggagccgctgggctcggaggactcggagtcggagggcttggagttccaggtgttgggggccttggaggtatacctccagctgcagccgctaaagcagctaaatacggtgctgctggccttggaggtgtcctagggggtgccgggcagttcccacttggaggagtggcagcaagacctggcttcggattgtctcccattttcccaggtggggcctgcctggggaaagcttgtggccggaagagaaaatgagcttcctaggacccctgactcacgacctcatcaacgttggtgctactgcttggtggagaatgtaaaccctttgtaaccccatcccatgcccctccgactccccaccccaggagggaacgggcaggccgggcggccttgcagatccacagggcaaggaaacaagaggggagcggccaagtgccccgaccaggaggccccctacttcagaggcaagggccatgtggtcctggccccccaccccatcccttcccacctaggagctccccctccacacagcctccatctccaggggaacttggtgctacacgctggtgctcttatcttcctggggggagggaggagggaagggtggcccctcggggaaccccctacctggggctcctctaaagatggtgcagacacttcctgggcagtcccagctccccctgcccaccaggacccaccgttggctgccatccagttggtacccaagcacctgaagcctcaaagctggattcgctctagcatccctcctctcctgggtccacttggccgtctcctccccaccgatcgctgttccccacatctggggcgcttttgggttggaaaaccaccccacactgggaatagccaccttgcccttgtagaatccatccgcccatccgtccattcatccatcggtccgtccatccatgtccccagttgaccgcccggcaccactagctggctgggtgcacccaccatcaacctggttgacctgtcatggccgcctgtgccctgcctccacccccatcctacactcccccagggcgtgcggggctgtgcagactggggtgccaggcatctcctccccacccggggtgtccccacatgcagtactgtataccccccatccctccctcggtccactgaacttcagagcagttcccattcctgccccgcccatctttttgtgtctcgctgtgatagatcaataaatattttattttttgtcctggatatttggggattatttttgattgttgatattctcttttggttttattgttgtggttcattgaaaaaaaaagataatttttttttctgatccggggagctgtatccccagtagaaaaaacattttaatcactctaatataactctggatgaaacacacctttttttttaataagaaaagagaattaactgcttcagaaatgactaataaatgaaaaacctttaaaggaaaaaaaaaaa

SEQ ID NO: 446335 - DNA, 2431 bp, Homo sapiens
gttcctttataacatagtagtgaaggctgcatggaggaagccccatggaccaaggaagcccaagggagtcgcttaactcagcaggggttcaggaaggcattctagaggaggtgggtggggaaatttgaccccaaaagatccatgcagttttcaggaaggctggagtgcagtggctcagtctcagctccccgcacctggtgcagttgatctcagctcaccacaacctccacctccccggttcaagtgattcttgtgtctcagcctcccaaatactgggattacaggcgcccgccaccacgcctggctaatttttgtatttttcgtagaaacagggtttcaccgtgttggccaggctggtctcaaactcctgacctcaggtgatctgccacctcagcctcccaaagtgctgggattacaggtgtgagccaccgcacccggcttacaaaagaacttttaaggccaggcacagtggttcacaccttcgggaggctaaggcaggaggatcgcatgagcccaggagttggaggctgcagtgaactatgattgtaccactgcactccagccggggtgacagagcaaaaccccatctcaaaatgaaacaaaatatggactggacttcctgtccactgctcctccacagtgtcacatggcccctgccacctgtctgcttgccttgtgtccctggggcagggagacccatcgttcagaaatggaacactcattttccctcctctccccgcaggagcagcagtgcctggggtccttggagggctcggggctctcggtggagtaggcatcccaggcggtgtggtgggtgagttgaaaccccaggaggggcagggtggggagggaatctaaccagtacagagtgcctccctgaactcggtctgtgttcccaggagccggacccgccgccgccgctgccgcagccaaagctgctgccaaagccgcccagtttggcctagtgggagccgctgggctcggaggactcggagtcggagggcttggagttccaggtgttgggggccttggaggtatacctccagctgcagccgctaaagcagctaaatacggtgctgctggccttggaggtgtcctagggggtgccgggcagttcccacttggaggagtggcagcaagacctggcttcggattgtctcccattttcccaggtggggcctgcctggggaaagcttgtggccggaagagaaaatgagcttcctaggacccctgactcacgacctcatcaacgttggtgctactgcttggtggagaatgtaaaccctttgtaaccccatcccatgcccctccgactccccaccccaggagggaacgggcaggccgggcggccttgcagatccacagggcaaggaaacaagaggggagcggccaagtgccccgaccaggaggccccctacttcagaggcaagggccatgtggtcctggccccccaccccatcccttcccacctaggagctccccctccacacagcctccatctccaggggaacttggtgctacacgctggtgctcttatcttcctggggggagggaggagggaagggtggcccctcggggaaccccctacctggggctcctctaaagatggtgcagacacttcctgggcagtcccagctccccctgcccaccaggacccaccgttggctgccatccagttggtacccaagcacctgaagcctcaaagctggattcgctctagcatccctcctctcctgggtccacttggccgtctcctccccaccgatcgctgttccccacatctggggcgcttttgggttggaaaaccaccccacactgggaatagccaccttgcccttgtagaatccatccgcccatccgtccattcatccatcggtccgtccatccatgtccccagttgaccgcccggcaccactagctggctgggtgcacccaccatcaacctggttgacctgtcatggccgcctgtgccctgcctccacccccatcctacactcccccagggcgtgcggggctgtgcagactggggtgccaggcatctcctccccacccggggtgtccccacatgcagtactgtataccccccatccctccctcggtccactgaacttcagagcagttcccattcctgccccgcccatctttttgtgtctcgctgtgatagatcaataaatattttattttttgtcctggatatttggggattatttttgattgttgatattctcttttggttttattgttgtggttcattgaaaaaaaaagataatttttttttctgatccggggagctgtatccccagtagaaaaaacattttaatcactctaatataactctggatgaaacacacctttttttttaataagaaaagagaattaactgcttcagaaatgactaataaatgaaaaacctttaaaggaaaaaaaaaaa

SEQ ID NO: 446336 - DNA, 2938 bp, Homo sapiens
cgacgaggcaacaattaggctttggggataaaacgaggtgcggagagcgggctggggcatttctccccgagatggcgggtctgacggcggcggccccgcggcccggagtcctcctgctcctgctgtccatcctccacccctctcggcctggaggggtccctggggccattcctggtggagttcctggaggagtcttttatccaggggctggtctcggagcccttggaggaggagcgctggggcctggaggcaaacctcttaagccagttcccggagggcttgcgggtgctggccttggggcagggctcggcgccttccccgcagttacctttccgggggctctggtgcctggtggagtggctgacgctgctgcagcctataaagctgctaaggctggcgctgggcttggtggtgtcccaggagttggtggcttaggagtgtctgcaggtgcggtggttcctcagcctggagccggagtgaagcctgggaaagtgccgggtgtggggctgccaggtgtatacccaggtggcgtgctcccaggagctcggttccccggtgtgggggtgctccctggagttcccactggagcaggagttaagcccaaggctccaggtgtaggtggagcttttgctggaatcccaggagttggaccctttgggggaccgcaacctggagtcccactggggtatcccatcaaggcccccaagctgcctggtggctatggactgccctacaccacagggaaactgccctatggctatgggcccggaggagtggctggtgcagcgggcaaggctggttacccaacagggacaggggttggcccccaggcagcagcagcagcggcagctaaagcagcagcaaagttcggtgctggagcagccggagtcctccctggtgttggaggggctggtgttcctggcgtgcctggggcaattcctggaattggaggcatcgcaggcgttgggactccagctgcagctgcagctgcagcagcagccgctaaggcagccaagtatggagctgctgcaggcttagtgcctggtgggccaggctttggcccgggagtagttggtgtcccaggagctggcgttccaggtgttggtgtcccaggagctgggattccagttgtcccaggtgctgggatcccaggtgctgcggttccaggggttgtgtcaccagaagcagctgctaaggcagctgcaaaggcagccaaatacggggccaggcccggagtcggagttggaggcattcctacttacggggttggagctgggggctttcccggctttggtgtcggagtcggaggtatccctggagtcgcaggtgtccctggtgtcggaggtgttcccggagtcggaggtgtcccgggagttggcatttcccccgaagctcaggcagcagctgccgccaaggctgccaagtacgggttagttcctggtgtcggcgtggctcctggagttggcgtggctcctggtgtcggtgtggctcctggagttggcttggctcctggagttggcgtggctcctggagttggtgtggctcctggcgttggcgtggctcccggcattggccctggtggagttgcagctgcagcaaaatccgctgccaaggtggctgccaaagcccagctccgagctgcagctgggcttggtgctggcatccctggacttggagttggtgtcggcgtccctggacttggagttggtgctggtgttcctggacttggagttggtgctggtgttcctggcttcggggcagtacctggagccctggctgccgctaaagcagccaaatatggagcagcagtgcctggggtccttggagggctcggggctctcggtggagtaggcatcccaggcggtgtggtgggagccggacccgccgccgccgctgccgcagccaaagctgctgccaaagccgcccagtttggcctagtgggagccgctgggctcggaggactcggagtcggagggcttggagttccaggtgttgggggccttggaggtatacctccagctgcagccgctaaagcagctaaatacggtgctgctggccttggaggtgtcctagggggtgccgggcagttcccacttggaggagtggcagcaagacctggcttcggattgtctcccattttcccagcccctgcccaccaggacccaccgttggctgccatccagttggtacccaagcacctgaagcctcaaagctggattcgctctagcatccctcctctcctgggtccacttggccgtctcctccccaccgatcgctgttccccacatctggggcgcttttgggttggaaaaccaccccacactgggaatagccaccttgcccttgtagaatccatccgcccatccgtccattcatccatcggtccgtccatccatgtccccagttgaccgcccggcaccactagctggctgggtgcacccaccatcaacctggttgacctgtcatggccgcctgtgccctgcctccacccccatcctacactcccccagggcgtgcggggctgtgcagactggggtgccaggcatctcctccccacccggggtgtccccacatgcagtactgtataccccccatccctccctcggtccactgaacttcagagcagttcccattcctgccccgcccatctttttgtgtctcgctgtgatagatcaataaatattttattttttgtcctggatatttggggattatttttgattgttgatattctcttttggttttattgttgtggttcattgaaaaaaaaagataatttttttttctgatccggggagctgtatccccagtagaaaaaacattttaatcactctaatataactctggatgaaacacacctttttttttaataagaaaagagaattaactgcttcagaaatgactaataaatgaaaaacctttaaaggaaaaaaaaaaa

SEQ ID NO: 446337 - DNA, 2016 bp, Homo sapiens
cgacgaggcaacaattaggctttggggataaaacgaggtgcggagagcgggctggggcatttctccccgagatggcgggtctgacggcggcggccccgcggcccggagtcctcctgctcctgctgtccatcctccacccctctcggcctggaggggtccctggggccattcctggtggagttcctggaggagtcttttatccaggggctggtctcggagcccttggaggaggagcgctggggcctggaggcaaacctcttaagccagttcccggagggcttgcgggtgctggccttggggcagggctcggcgccttccccgcagttacctttccgggggctctggtgcctggtggagtggctgacgctgctgcagcctataaagctgctaaggctggcgctgggcttggtggtgtcccaggagttggtggcttaggagtgtctgcaggtgcggtggttcctcagcctggagccggagtgaagcctgggaaagtgccgggtgtggggctgccaggtgtatacccaggtggcgtgctcccaggagctcggttccccggtgtgggggtgctccctggagttcccactggagcaggagttaagcccaaggctccaggtgtaggtggagcttttgctggaatcccaggagttggaccctttgggggaccgcaacctggagtcccactggggtatcccatcaaggcccccaagctgcctggtggctatggactgccctacaccacagggaaactgccctatggctatgggcccggaggagtggctggtgcagcgggcaaggctggttacccaacagggacaggggttggcccccaggcagcagcagcagcggcagctaaagcagcagcaaagttcggtgctggagcagccggagtcctccctggtgttggaggggctggtgttcctggcgtgcctggggcaattcctggaattggaggcatcgcaggcgttgggactccagctgcagctgcagctgcagcagcagccgctaaggcagccaagtatggagctgctgcaggcttagtgcctggtgggccaggctttggcccgggagtagttggtgtcccaggagctggcgttccaggtgttggtgtcccaggagctgggattccagttgtcccaggtgctgggatcccaggtgctgcggttccaggggttgtgtcaccagaagcagctgctaaggcagctgcaaaggcagccaaatacggggccaggcccggagtcggagttggaggcattcctacttacggggttggagctgggggctttcccggctttggtgtcggagtcggaggtatccctggagtcgcaggtgtccctggtgtcggaggtgttcccggagtcggaggtgtcccgggagttggcatttcccccgaagctcaggcagcagctgccgccaaggctgccaagtacgggttagttcctggtgtcggcgtggctcctggagttggcgtggctcctggtgtcggtgtggctcctggagttggcttggctcctggagttggcgtggctcctggagttggtgtggctcctggcgttggcgtggctcccggcattggccctggtggagttgcagctgcagcaaaatccgctgccaaggtggctgccaaagcccagctccgagctgcagctgggcttggtgctggcatccctggacttggagttggtgtcggcgtccctggacttggagttggtgctggtgttcctggacttggagttggtgctggtgttcctggcttcggggcagtacctggagccctggctgccgctaaagcagccaaatatggagcagcagtgcctggggtccttggagggctcggggctctcggtggagtaggcatcccaggcggtgtggtgggagccggacccgccgccgccgctgccgcagccaaagctgctgccaaagccgcccagtttggtgagcactgggtggaggtgggagctgccgccaggcccccaggcccccagggtgtgggaggagcttctgaccaggcactgtaga

SEQ ID NO: 446338 - DNA, 864 bp, Homo sapiens
gatcccagaggaggaagtccagagacagagcaccatgacttctgagaaaggagaagaatcgaaccctgggagtttgacgtcttctatgaccccagagaacttcgtaaagaggcctgtctgctctacgaaatcaagtggggcatgagccggaagatctggcgaagctcaggcaaaaacaccaccaatcacgtggaagttaattttataaaaaaatttacgtcagaaagagattttcacccatccatcagctgctccatcacctggttcttgtcctggagtccctgctgggaatgctcccaggctattagagagtttctgagtcggcaccctggtgtgactctagtgatctacgtagctcggcttttttggcacatggatcaacaaaatcggcaaggtctcagggaccttgttaacagtggagtaactattcagattatgagagcatcagagtattatcactgctggaggaattttgtcaactacccacctggggatgaagctcactggccacaatacccacctctgtggatgatgttgtacgcactggagctgcactgcataattctaagtcttccaccctgtttaaagatttcaagaagatggcaaaatcatcttacatttttcagacttcatcttcaaaactgccattaccaaacgattccgccacacatccttttagctacagggctgatacatccttctgtggcttggagatgaataggatgattccgtgtgtgtactgattcaagaacaagcaatgatgacccactaaagagtgaatgccatttagaatctagaaatgttcacaaggtaccccaaaactctgtagcttaaaccaacaataaatatgtattacctctggca

SEQ ID NO: 446339 - DNA, 892 bp, Homo sapiens
gatcccagaggaggaagtccagagacagagcaccatgacttctgagaaaggtccttcaaccggtgaccccactctgaggagaagaatcgaaccctgggagtttgacgtcttctatgaccccagagaacttcgtaaagaggcctgtctgctctacgaaatcaagtggggcatgagccggaagatctggcgaagctcaggcaaaaacaccaccaatcacgtggaagttaattttataaaaaaatttacgtcagaaagagattttcacccatccatcagctgctccatcacctggttcttgtcctggagtccctgctgggaatgctcccaggctattagagagtttctgagtcggcaccctggtgtgactctagtgatctacgtagctcggcttttttggcacatggatcaacaaaatcggcaaggtctcagggaccttgttaacagtggagtaactattcagattatgagagcatcagagtattatcactgctggaggaattttgtcaactacccacctggggatgaagctcactggccacaatacccacctctgtggatgatgttgtacgcactggagctgcactgcataattctaagtcttccaccctgtttaaagatttcaagaagatggcaaaatcatcttacatttttcagacttcatcttcaaaactgccattaccaaacgattccgccacacatccttttagctacagggctgatacatccttctgtggcttggagatgaataggatgattccgtgtgtgtactgattcaagaacaagcaatgatgacccactaaagagtgaatgccatttagaatctagaaatgttcacaaggtaccccaaaactctgtagcttaaaccaacaataaatatgtattacctctggca

SEQ ID NO: 446340 - DNA, 1084 bp, Homo sapiens
ctgggggacctcggagagcccgggacccaccaccaagaagggcagtgtactagttctttgtgactgcagtaaaaattttattttttaattttttttatttttggtagagatgcggtttcaccatgttagccaggatggtctcgatctcctgacctcgtgatcttcccgcctcggcctcccaaagtgctgggattacaggcgtgagccaccgcgcccggcctgaccgcagtagcaaatttatacacactgcatggcttcaaacaacagaaatgtattcgttacaattctggaggccaaaagtcaaaaataaaggtgtgggcaggaccctgttcccttcacaggtgctaggggaggatccctcctgcctcttccagctcctggtggctccaggccctctgtggcttgtggccgcatcacaggagttcctgcctccgtcttcacatggccttctccccatgtctgtctccaatctccctgtttttatgttgtaagaggttggattgtcgttgaaggtaggacccgcctgaaacctaggataatctcattttgatatccttagtttaattacatgtgcaaaggcccttttatcaagtgaggtcacattcacagattccagggcttagagggtggaggtatcattttgcgtgcccccatctggacatgcagtgtcctctcccctgtggggctgacctaccttcctagccgtcttcccagaacgtaatgtgtcttaaatccgtcatgctgacctggggccctgggtgcccttgggcaggagctgatggcactagtaccttgataaagttcttactggcaccagaagagaataaagtaactctccttccccttctctgacttatggccaggtgcccattcccactggcttgccgctccccagctccctgcgctttatattgttgaggcctcctctctcagctaagaaacaggaagtacacagatgtgtattcttaaagacagcattagccacggggcccccaccctcaaagggtgggagcgataactgctgctggttgaaactgacagttactactgataataaagttaattgttacccagtcagtggagt

SEQ ID NO: 446341 - DNA, 5495 bp, Homo sapiens
cgagaatggctcaactctccaaatagagagaatttctatcagttgcaagtacgaaaatttcctgccgattatataaaatactgggagtttgcagtttatctggaagaatgtgaactggctaaacagctttatccaaaggaaaacgatttggtgtttttagctcctgagagaataaatgaagagaagaaagatacagagagaaatgacatacaagatctccacgaatatcattctggttatgttcataaatttcgccgcacgtcagtcatgcgtaatgggaaaactgagtgttacctttccatccagactcaagagaactttccggccaatttaaacgaacttgtgaattgtattgtaatcagttctctggtaactacacaaaggaagttgaaagccatgtctctgttgggtagtcggaaccaactggctagagctgttctgaatccaaaccctatggacttctgtacaaaagatttactgactacaacatctgagagaattattgcgtacttaagagatttcaatgaagatcaaaagaaagcaatagaaactgcatatgctatggtgaaacactcaccatcagttgccaaaatctgcttgattcatggaccacctggaacaggaaaatcaaaaactattgttggcctcctctatcgtctactgacagagaaccagaggaaggggcattcagacgaaaactccaatgccaaaatcaaacaaaaccgtgtcctcgtgtgtgcaccttccaatgcagctgttgatgaactcatgaaaaaaattatccttgaattcaaagaaaaatgtaaagacaagaagaatcctttaggaaactgtggagatataaatttagtacgactgggtccagaaaagtctattaatagtgaggttctaaagttcagtttggacagccaagtaaaccacagaatgaaaaaagagttaccttctcatgttcaggcgatgcataaaagaaaggaatttctagattatcagctggatgagctttcccggcagcgagctctatgccgaggtggacgggaaatacagaggcaagaattagatgaaaacatttccaaagtttctaaggaaaggcaggaacttgcttctaaaattaaagaggttcaaggacgcccacagaaaacacagagtatcatcatcttagagtcccatatcatctgctgcacgttgagcacaagtggtggtttactacttgagtctgctttccgtgggcaagggggtgtccccttcagctgtgtcattgttgatgaggctggacagtcttgtgaaattgagactcttactccactcatccatcgctgcaataagctcatcctagtaggagatcctaagcagctccctccgacagtcatctctatgaaagcacaggagtatggctacgaccagtcaatgatggctcgcttctgcagactgctggaagagaatgtagaacacaacatgatcagcaggctgcccattctacagctcactgttcagtacaggatgcatccagacatatgcctcttcccttctaattatgtttataacagaaacttaaaaacaaatagacagacagaagccattcgatgttcatcagattggccatttcagccataccttgtgtttgatgttggagatggttcagaaagacgggataatgactcatatataaatgttcaagaaataaaactggtgatggaaataattaagcttattaaagacaaaagaaaggatgttagttttcgaaacattggcataataactcattacaaggcccagaagacgatgattcagaaggatttggacaaagagttcgatagaaaaggaccagcagaagtagacactgtggatgcattccagggtcggcagaaggattgtgttattgttacgtgtgtcagagcaaatagcatccaaggttcaattggattcctggcaagtttgcagagattgaatgtcaccatcacacgagccaagtacagcctcttcatcctcggacatttgaggaccctgatggaaaaccagcattggaatcagctgattcaggatgctcagaagcgtggtgccattattaagacctgtgacaaaaactatagacatgatgcagtgaagattctgaaactcaagcctgtgctgcagagaagtctcactcaccctcctaccatagccccagaggggtccagaccccagggtggtttgcccagcagcaagctagacagtggatttgccaagacatctgttgctgcttctctataccacacaccctctgactccaaggaaattactcttactgttacttcaaaggaccctgaaagacctcctgttcatgaccaacttcaggacccacgactgctgaagaggatgggcattgaggtcaaaggaggaatattcctttgggatccacaaccctcgagcccccagcatcctggagcaacacctcctacgggcgagccgggcttccctgtcgttcaccaggacctgagccatatacagcagcccgctgctgtagtggctgctctgagcagccacaaacctcccgtgcggggcgaacctccagctgccagtcccgaggcttccacgtgtcagagcaaatgtgatgacccggaagaggagctctgtcacaggagagaggccagggctttcagtgaaggggagcaggagaagtgtggttccgagacccatcacaccaggaggaactctaggtgggacaagaggacactggagcaggaggacagcagttccaagaaaagaaagcttttataggaaagcccagtgacatgggccagcagccacagcatattgtaaactgaagatgaccagctcgtgggaccatctagataagcttgttttttgtaaggagtttgtgtgctgttggaaaacatggaaaatgcatccttaacacctgagcctctggtcatcttcagtattttctgtcatttgcaaaagctttcagagggcattgtgtatccgtaataatgtccttgaagtcagagactggaaatgttgatctcttagtcttctatagacaaggaggtcagactggagtgaatgttgtaaaagttgaaatgtatatttgtatagcaaataacaaaatccttttaaaatttaatctagtagaccgcttttctttccccctgtttaaaatgttaatcagttttcaacagaacaaactttatattaccaaaaaaaaaaagatgggaggagggcgggtcctttcaaccattgttagagcaagacagataattatttaacagcctagcttggaataagctgagttagtgctggtgggtcaggtgtctctggctctattaaaaaaagcaaaaacccccccaaaaacctggagtctcctaggggacactttgggcagcacggttatgttaggtaaagtcttgctgacatggtgcatttttagatagagtgcattggcccagggtattatatttctgtgatgagttcatttacctgtttcagtatgcacatagttccctagctaaaattcctaatcttcttgagagagaagaatatggagtgaaagaataattcttgagctatcattcaaatgctcccagcatattgtgagccttgtgtgactggtgaggtacagacatttggttgccaaatgctagattagcgctgggtcagctgtggaagaatcgcctcagcttacagattgtcagacagatctaactagttttccagaaagcctgggaagctgtgtgttcaacatttcccaagggattctgatcaccaggcagcttgggaaccactggggcaggccaaatagaatattttgggcgggaaagaagcacccgatttaaaatgaagcgtaaccagaggagttcagaactgggaagagagtggtagacttcctgtgatcttcagaaatcatctacctggtaaaaatacatgctgtttagaatatctgataggtgtttccagctactattagaggtgatagtgcttttgtgggggaaaaaattggtcatggtgaatggagatcgaggaagctcgggacaagggaggggtgggctgcctgattttgtccagttttccaaatatccacgcagtgaactggagtatcctaaacatgagaatgtacagttgacagttgtaaaaactagggatctgtagtgaatgctgtgcagccccatatctcatttgggggtaggaaaatagctgaagattcatgtgcattatttgacatttcctttgtcatctgctttttaagcaaaaaagggttttgtgttagaaattctacttgagcagattataaagagctttaaaaaacaactttcggttgccaaaagtttgagcatttgatttcattacctgtgtctccctcactggtgtccagacggtcaactgaatactcctgaaacccagggagcaggtgacttcctggagtgctttgtccccagagtcagccactgcttcctctgtgggggtggagagtttgtctttggccatgcagtgtgcgacagttcaggacgggtagggatgggtcccattctgtctgggtcaagggctctatcagcttcttccatgtgcctttgggaagaaatctcgttactttaagtttgctttcctgttatcttgatgaagtgcccattttagcagacacttgtagtgctgaccacttagggaatgtacaaactcctaagcttctaaagggaggcatggcaaaaacgttggggtcaggatgtctctcacgctgctcatgttaatactattaacacatgatttgagaaataagttttctctaaaatgcatattttgccgccacacactgaacaatattatttccagtgaagtttgatgcctgttcttacgttgtgttcacctgttggttcaccactcagcagatctgattctgcaagaattaatggtagaactagatcatcctttctaacagacgagcctgtgtcctgtgacggcctttcacagcggaatgcagttgtacctcacattacttttgaaacttcactcgttccagttggtacaagtatttgccaaagccatttcctatgttcaccgtggcccctcctgatgtggctgtcagcgcagcgttgttgaacagggctattctttttacaaggtgtgaagtgtggctcttcgcttcgtctttgccatggcattaaaagaaagttccctgtcttctttcaatattagttatttcaaatgaatatgtgctacttaaaagcttgttttgtttctttgtatataatttgccttggatttattgtgcacagtttgttgagttgtatgtttttgtgaattatcaggagtaaatttgacaagtacatgtgaataacctcctgtaaatgaattttataacaaaaatgtactgaactattttttaaagttgtgcagattagcaattttttgctatagctttgacttttctatgctgtgaattaatagctgcgatttggcaaacagccctgttgtctttgttaaaccctaaattttaagaggaaatggcagaattaaaagcagaaacaaga

SEQ ID NO: 446342 - DNA, 5499 bp, Homo sapiens
cgagaatggctcaactctccaaatagagagaatttctatcagttgcaagtacgaaaatttcctgccgattatataaaatactgggagtttgcagtttatctggaagaatgtgaactggctaaacagctttatccaaaggaaaacgatttggtgtttttagctcctgagagaataaatgaagagaagaaagatacagagagaaatgacatacaagatctccacgaatatcattctggttatgttcataaatttcgccgcacgtcagtcatgcgtaatgggaaaactgagtgttacctttccatccagactcaagagaactttccggccaatttaaacgaacttgtgaattgtattgtaatcagttctctggtaactacacaaaggaagttgaaagccatgtctctgttgggtagtcggaaccaactggctagagctgttctgaatccaaaccctatggacttctgtacaaaagatttactgactacaacatctgagagaattattgcgtacttaagagatttcaatgaagatcaaaagaaagcaatagaaactgcatatgctatggtgaaacactcaccatcagttgccaaaatctgcttgattcatggaccacctggaacaggaaaatcaaaaactattgttggcctcctctatcgtctactgacagagaaccagaggaaggggcattcagacgaaaactccaatgccaaaatcaaacaaaaccgtgtcctcgtgtgtgcaccttccaatgcagctgttgatgaactcatgaaaaaaattatccttgaattcaaagaaaaatgtaaagacaagaagaatcctttaggaaactgtggagatataaatttagtacgactgggtccagaaaagtctattaatagtgaggttctaaagttcagtttggacagccaagtaaaccacagaatgaaaaaagagttaccttctcatgttcaggcgatgcataaaagaaaggaatttctagattatcagctggatgagctttcccggcagcgagctctatgccgaggtggacgggaaatacagaggcaagaattagatgaaaacatttccaaagtttctaaggaaaggcaggaacttgcttctaaaattaaagaggttcaaggacgcccacagaaaacacagagtatcatcatcttagagtcccatatcatctgctgcacgttgagcacaagtggtggtttactacttgagtctgctttccgtgggcaagggggtgtccccttcagctgtgtcattgttgatgaggctggacagtcttgtgaaattgagactcttactccactcatccatcgctgcaataagctcatcctagtaggagatcctaagcagctccctccgacagtcatctctatgaaagcacaggagtatggctacgaccagtcaatgatggctcgcttctgcagactgctggaagagaatgtagaacacaacatgatcagcaggctgcccattctacagctcactgttcagtacaggatgcatccagacatatgcctcttcccttctaattatgtttataacagaaacttaaaaacaaatagacagacagaagccattcgatgttcatcagattggccatttcagccataccttgtgtttgatgttggagatggttcagaaagacgggataatgactcatatataaatgttcaagaaataaaactggtgatggaaataattaagcttattaaagacaaaagaaaggatgttagttttcgaaacattggcataataactcattacaaggcccagaagacgatgattcagaaggatttggacaaagagttcgatagaaaaggaccagcagaagtagacactgtggatgcattccagggtcggcagaaggattgtgttattgttacgtgtgtcagagcaaatagcatccaaggttcaattggattcctggcaagtttgcagagattgaatgtcaccatcacacgagccaagtacagcctcttcatcctcggacatttgaggaccctgatggaaaaccagcattggaatcagctgattcaggatgctcagaagcgtggtgccattattaagacctgtgacaaaaactatagacatgatgcagtgaagattctgaaactcaagcctgtgctgcagagaagtctcactcaccctcctaccatagccccagaggggtccagaccccagggtggtttgcccagcagcaagctagacagtggatttgccaagacatctgttgctgcttctctataccacacaccctctgactccaaggaaattactcttactgttacttcaaaggaccctgaaagacctcctgttcatgaccaacttcaggacccacgactgctgaagaggatgggcattgaggtcaaaggaggaatattcctttgggatccacaaccctcgagcccccagcatcctggagcaacacctcctacgggcgagccgggcttccctgtcgttcaccaggacctgagccatatacagcagcccgctgctgtagtggctgctctgagcagccacaaacctcccgtgcggggcgaacctccagctgccagtcccgaggcttccacgtgtcagagcaaatgtgatgacccggaagaggagctctgtcacaggagagaggccagggctttcagtgaaggggagcaggagaagtgtggttccgagacccatcacaccaggaggaactctaggtgggacaagaggacactggagcaggaggacagcagttccaagaaaagaaagcttttataggaaagcccagtgacatgggccagcagccacagcatattgtaaactgaagatgaccagctcgtgggaccatctagataagcttgttttttgtaaggagtttgtgtgctgttggaaaacatggaaaatgcatccttaacacctgagcctctggtcatcttcagtattttctgtcatttgcaaaagctttcagagggcattgtgtatccgtaataatgtccttgaagtcagagactggaaatgttgatctcttagtcttctatagacaaggaggtcagactggagtgaatgttgtaaaagttgaaatgtatatttgtatagcaaataacaaaatccttttaaaatttaatctagtagaccgcttttctttccccctgtttaaaatgttaatcagttttcaacagaacaaactttatattaccaaaaaaaaaaagatgggaggagggcgggtcctttcaaccattgttagagcaagacagataattatttaacagcctagcttggaataagctgagttagtgctggtgggtcaggtgtctctggctctattaaaaaaagcaaaaacccccccaaaaacctggagtctcctaggggacactttgggcagcacggttatgttaggtaaagtcttgctgacatggtgcatttttagatagagtgcattggcccagggtattatatttctgtgatgagttcatttacctgtttcagtatgcacatagttccctagctaaaattcctaatcttcttgagagagaagaatatggagtgaaagaataattcttgagctatcattcaaatgctcccagcatattgtgagccttgtgtgactggtgaggtacagacatttggttgccaaatgctagattagcgctgggtcagctgtggaagaatcgcctcagcttacagattgtcagacagatctaactagttttccagaaagcctgggaagctgtgtgttcaacatttcccaagggattctgatcaccaggcagcttgggaaccactggggcaggccaaatagaatattttgggcgggaaagaagcacccgatttaaaatgaagcgtaaccagaggagttcagaactgggaagagagtggtagacttcctgtgatcttcagaaatcatctacctggtaaaaatacatgctgtttagaatatctgataggtgtttccagctactattagaggtgatagtgcttttgtgggggaaaaaattggtcatggtgaatggagatcgaggaagctcgggacaagggaggggtgggctgcctgattttgtccagttttccaaatatccacgcagtgaactggagtatcctaaacatgagaatgtacagttgacagttgtaaaaactagggatctgtagtgaatgctgtgcagccccatatctcatttgggggtaggaaaatagctgaagattcatgtgcattatttgacatttcctttgtcatctgctttttaagcaaaaaagggttttgtgttagaaattctacttgagcagattataaagagctttaaaaaacaactttcggttgccggtcaactgaatactcctgaaacccagggagcaggtgacttcctggagtgctttgtccccagagtcagccactgcttcctctgtgggggtggagagtttgtctttggccatgcagtgtgcgacagttcaggacgggtagggatgggtcccattctgtctgggtcaagggctctatcagcttcttccatgtgcctttgggaagaaatctcgttactttaagtttgctttcctgttatcttgatgaagtgcccattttagcagacacttgtagtgctgaccacttagggaatgtacaaactcctaagcttctaaagggaggcatggcaaaaacgttggggtcaggatgtctctcacgctgctcatgttaatactattaacacatgatttgagaaataagttttctctaaaatgcatattttgccgccacacactgaacaatattatttccagtgaagtttgatgcctgttcttacgttgtgttcacctgttggttcaccactcagcagatctgattctgcaagaattaatggtagaactagatcatcctttctaacagacgagcctgtgtcctgtgacggcctttcacagcggaatgcagttgtacctcacattacttttgaaacttcactcgttccagttggtacaagtatttgccaaagccatttcctatgttcaccgtggcccctcctgatgtggctgtcagcgcagcgttgttgaacagggctattctttttacaaggtgtgaagtgtggctcttcgcttcgtctttgccatggcattaaaagaaagttccctgtcttctttcaatattagttatttcaaatgaatatgtgctacttaaaagcttgttttgtttctttgtatataatttgccttggatttattgtgcacagtttgttgagttgtatgtttttgtgaattatcaggagtaaatttgacaagtacatgtgaataacctcctgtaaatgaattttataacaaaaatgtactgaactattttttaaagttgtgcagattagcaattttttgctatagctttgacttttctatgctgtgaattaatagctgcgatttggcaaacagccctgttgtctttgttaaaccctaaattttaagaggaaatggcagaattaaaagcagaaacaagaagatggacatggattagaggttatgtattatgaagtaaactacaaggtactaacatca

SEQ ID NO: 446343 - DNA, 5641 bp, Homo sapiens
cgagaatggctcaactctccaaatagagagaatttctatcagttgcaagtacgaaaatttcctgccgattatataaaatactgggagtttgcagtttatctggaagaatgtgaactggctaaacagctttatccaaaggaaaacgatttggtgtttttagctcctgagagaataaatgaagagaagaaagatacagagagaaatgacatacaagatctccacgaatatcattctggttatgttcataaatttcgccgcacgtcagtcatgcgtaatgggaaaactgagtgttacctttccatccagactcaagagaactttccggccaatttaaacgaacttgtgaattgtattgtaatcagttctctggtaactacacaaaggaagttgaaagccatgtctctgttgggtagtcggaaccaactggctagagctgttctgaatccaaaccctatggacttctgtacaaaagatttactgactacaacatctgagagaattattgcgtacttaagagatttcaatgaagatcaaaagaaagcaatagaaactgcatatgctatggtgaaacactcaccatcagttgccaaaatctgcttgattcatggaccacctggaacaggaaaatcaaaaactattgttggcctcctctatcgtctactgacagagaaccagaggaaggggcattcagacgaaaactccaatgccaaaatcaaacaaaaccgtgtcctcgtgtgtgcaccttccaatgcagctgttgatgaactcatgaaaaaaattatccttgaattcaaagaaaaatgtaaagacaagaagaatcctttaggaaactgtggagatataaatttagtacgactgggtccagaaaagtctattaatagtgaggttctaaagttcagtttggacagccaagtaaaccacagaatgaaaaaagagttaccttctcatgttcaggcgatgcataaaagaaaggaatttctagattatcagctggatgagctttcccggcagcgagctctatgccgaggtggacgggaaatacagaggcaagaattagatgaaaacatttccaaagtttctaaggaaaggcaggaacttgcttctaaaattaaagaggttcaaggacgcccacagaaaacacagagtatcatcatcttagagtcccatatcatctgctgcacgttgagcacaagtggtggtttactacttgagtctgctttccgtgggcaagggggtgtccccttcagctgtgtcattgttgatgaggctggacagtcttgtgaaattgagactcttactccactcatccatcgctgcaataagctcatcctagtaggagatcctaagcagctccctccgacagtcatctctatgaaagcacaggagtatggctacgaccagtcaatgatggctcgcttctgcagactgctggaagagaatgtagaacacaacatgatcagcaggctgcccattctacagctcactgttcagtacaggatgcatccagacatatgcctcttcccttctaattatgtttataacagaaacttaaaaacaaatagacagacagaagccattcgatgttcatcagattggccatttcagccataccttgtgtttgatgttggagatggttcagaaagacgggataatgactcatatataaatgttcaagaaataaaactggtgatggaaataattaagcttattaaagacaaaagaaaggatgttagttttcgaaacattggcataataactcattacaaggcccagaagacgatgattcagaaggatttggacaaagagttcgatagaaaaggaccagcagaagtagacactgtggatgcattccagggtcggcagaaggattgtgttattgttacgtgtgtcagagcaaatagcatccaaggttcaattggattcctggcaagtttgcagagattgaatgtcaccatcacacgagccaagtacagcctcttcatcctcggacatttgaggaccctgatggaaaaccagcattggaatcagctgattcaggatgctcagaagcgtggtgccattattaagacctgtgacaaaaactatagacatgatgcagtgaagattctgaaactcaagcctgtgctgcagagaagtctcactcaccctcctaccatagccccagaggggtccagaccccagggtggtttgcccagcagcaagctagacagtggatttgccaagacatctgttgctgcttctctataccacacaccctctgactccaaggaaattactcttactgttacttcaaaggaccctgaaagacctcctgttcatgaccaacttcaggacccacgactgctgaagaggatgggcattgaggtcaaaggaggaatattcctttgggatccacaaccctcgagcccccagcatcctggagcaacacctcctacgggcgagccgggcttccctgtcgttcaccaggacctgagccatatacagcagcccgctgctgtagtggctgctctgagcagccacaaacctcccgtgcggggcgaacctccagctgccagtcccgaggcttccacgtgtcagagcaaatgtgatgacccggaagaggagctctgtcacaggagagaggccagggctttcagtgaaggggagcaggagaagtgtggttccgagacccatcacaccaggaggaactctaggtgggacaagaggacactggagcaggaggacagcagttccaagaaaagaaagcttttataggaaagcccagtgacatgggccagcagccacagcatattgtaaactgaagatgaccagctcgtgggaccatctagataagcttgttttttgtaaggagtttgtgtgctgttggaaaacatggaaaatgcatccttaacacctgagcctctggtcatcttcagtattttctgtcatttgcaaaagctttcagagggcattgtgtatccgtaataatgtccttgaagtcagagactggaaatgttgatctcttagtcttctatagacaaggaggtcagactggagtgaatgttgtaaaagttgaaatgtatatttgtatagcaaataacaaaatccttttaaaatttaatctagtagaccgcttttctttccccctgtttaaaatgttaatcagttttcaacagaacaaactttatattaccaaaaaaaaaaagatgggaggagggcgggtcctttcaaccattgttagagcaagacagataattatttaacagcctagcttggaataagctgagttagtgctggtgggtcaggtgtctctggctctattaaaaaaagcaaaaacccccccaaaaacctggagtctcctaggggacactttgggcagcacggttatgttaggtaaagtcttgctgacatggtgcatttttagatagagtgcattggcccagggtattatatttctgtgatgagttcatttacctgtttcagtatgcacatagttccctagctaaaattcctaatcttcttgagagagaagaatatggagtgaaagaataattcttgagctatcattcaaatgctcccagcatattgtgagccttgtgtgactggtgaggtacagacatttggttgccaaatgctagattagcgctgggtcagctgtggaagaatcgcctcagcttacagattgtcagacagatctaactagttttccagaaagcctgggaagctgtgtgttcaacatttcccaagggattctgatcaccaggcagcttgggaaccactggggcaggccaaatagaatattttgggcgggaaagaagcacccgatttaaaatgaagcgtaaccagaggagttcagaactgggaagagagtggtagacttcctgtgatcttcagaaatcatctacctggtaaaaatacatgctgtttagaatatctgataggtgtttccagctactattagaggtgatagtgcttttgtgggggaaaaaattggtcatggtgaatggagatcgaggaagctcgggacaagggaggggtgggctgcctgattttgtccagttttccaaatatccacgcagtgaactggagtatcctaaacatgagaatgtacagttgacagttgtaaaaactagggatctgtagtgaatgctgtgcagccccatatctcatttgggggtaggaaaatagctgaagattcatgtgcattatttgacatttcctttgtcatctgctttttaagcaaaaaagggttttgtgttagaaattctacttgagcagattataaagagctttaaaaaacaactttcggttgccaaaagtttgagcatttgatttcattacctgtgtctccctcactggtgtccagacggtcaactgaatactcctgaaacccagggagcaggtgacttcctggagtgctttgtccccagagtcagccactgcttcctctgtgggggtggagagtttgtctttggccatgcagtgtgcgacagttcaggacgggtagggatgggtcccattctgtctgggtcaagggctctatcagcttcttccatgtgcctttgggaagaaatctcgttactttaagtttgctttcctgttatcttgatgaagtgcccattttagcagacacttgtagtgctgaccacttagggaatgtacaaactcctaagcttctaaagggaggcatggcaaaaacgttggggtcaggatgtctctcacgctgctcatgttaatactattaacacatgatttgagaaataagttttctctaaaatgcatattttgccgccacacactgaacaatattatttccagtgaagtttgatgcctgttcttacgttgtgttcacctgttggttcaccactcagcagatctgattctgcaagaattaatggtagaactagatcatcctttctaacagacgagcctgtgtcctgtgacggcctttcacagcggaatgcagttgtacctcacattacttttgaaacttcactcgttccagttggtacaagtatttgccaaagccatttcctatgttcaccgtggcccctcctgatgtggctgtcagcgcagcgttgttgaacagggctattctttttacaaggtgtgaagtgtggctcttcgcttcgtctttgccatggcattaaaagaaagttccctgtcttctttcaatattagttatttcaaatgaatatgtgctacttaaaagcttgttttgtttctttgtatataatttgccttggatttattgtgcacagtttgttgagttgtatgtttttgtgaattatcaggagtaaatttgacaagtacatgtgaataacctcctgtaaatgaattttataacaaaaatgtactgaactattttttaaagttgtgcagattagcaattttttgctatagctttgacttttctatgctgtgaattaatagctgcgatttggcaaacagccctgttgtctttgttaaaccctaaattttaagaggaaatggcagaattaaaagcagaaacaagaagatggacatggattagaggttatgtattatgaagtaaactacaaggtactaacatcatttcgtctgccatttggtttgctttatgctgaaattacttggtggggatttgtgcaattcagatataaaaagtttcattatccaaacc

SEQ ID NO: 446344 - DNA, 5377 bp, Homo sapiens
cgagaatggctcaactctccaaatagagagaatttctatcagttgcaagtacgaaaatttcctgccgattatataaaatactgggagtttgcagtttatctggaagaatgtgaactggctaaacagctttatccaaaggaaaacgatttggtgtttttagctcctgagagaataaatgaagagaagaaagatacagagagaaatgacatacaagatctccacgaatatcattctggttatgttcataaatttcgccgcacgtcagtcatgcgtaatgggaaaactgagtgttacctttccatccagactcaagagaactttccggccaatttaaacgaacttgtgaattgtattgtaatcagttctctggtaactacacaaaggaagttgaaagccatgtctctgttgggtagtcggaaccaactggctagagctgttctgaatccaaaccctatggacttctgtacaaaagatttactgactacaacatctgagagaattattgcgtacttaagagatttcaatgaagaccaaaatcaaacaaaaccgtgtcctcgtgtgtgcaccttccaatgcagctgttgatgaactcatgaaaaaaattatccttgaattcaaagaaaaatgtaaagacaagaagaatcctttaggaaactgtggagatataaatttagtacgactgggtccagaaaagtctattaatagtgaggttctaaagttcagtttggacagccaagtaaaccacagaatgaaaaaagagttaccttctcatgttcaggcgatgcataaaagaaaggaatttctagattatcagctggatgagctttcccggcagcgagctctatgccgaggtggacgggaaatacagaggcaagaattagatgaaaacatttccaaagtttctaaggaaaggcaggaacttgcttctaaaattaaagaggttcaaggacgcccacagaaaacacagagtatcatcatcttagagtcccatatcatctgctgcacgttgagcacaagtggtggtttactacttgagtctgctttccgtgggcaagggggtgtccccttcagctgtgtcattgttgatgaggctggacagtcttgtgaaattgagactcttactccactcatccatcgctgcaataagctcatcctagtaggagatcctaagcagctccctccgacagtcatctctatgaaagcacaggagtatggctacgaccagtcaatgatggctcgcttctgcagactgctggaagagaatgtagaacacaacatgatcagcaggctgcccattctacagctcactgttcagtacaggatgcatccagacatatgcctcttcccttctaattatgtttataacagaaacttaaaaacaaatagacagacagaagccattcgatgttcatcagattggccatttcagccataccttgtgtttgatgttggagatggttcagaaagacgggataatgactcatatataaatgttcaagaaataaaactggtgatggaaataattaagcttattaaagacaaaagaaaggatgttagttttcgaaacattggcataataactcattacaaggcccagaagacgatgattcagaaggatttggacaaagagttcgatagaaaaggaccagcagaagtagacactgtggatgcattccagggtcggcagaaggattgtgttattgttacgtgtgtcagagcaaatagcatccaaggttcaattggattcctggcaagtttgcagagattgaatgtcaccatcacacgagccaagtacagcctcttcatcctcggacatttgaggaccctgatggaaaaccagcattggaatcagctgattcaggatgctcagaagcgtggtgccattattaagacctgtgacaaaaactatagacatgatgcagtgaagattctgaaactcaagcctgtgctgcagagaagtctcactcaccctcctaccatagccccagaggggtccagaccccagggtggtttgcccagcagcaagctagacagtggatttgccaagacatctgttgctgcttctctataccacacaccctctgactccaaggaaattactcttactgttacttcaaaggaccctgaaagacctcctgttcatgaccaacttcaggacccacgactgctgaagaggatgggcattgaggtcaaaggaggaatattcctttgggatccacaaccctcgagcccccagcatcctggagcaacacctcctacgggcgagccgggcttccctgtcgttcaccaggacctgagccatatacagcagcccgctgctgtagtggctgctctgagcagccacaaacctcccgtgcggggcgaacctccagctgccagtcccgaggcttccacgtgtcagagcaaatgtgatgacccggaagaggagctctgtcacaggagagaggccagggctttcagtgaaggggagcaggagaagtgtggttccgagacccatcacaccaggaggaactctaggtgggacaagaggacactggagcaggaggacagcagttccaagaaaagaaagcttttataggaaagcccagtgacatgggccagcagccacagcatattgtaaactgaagatgaccagctcgtgggaccatctagataagcttgttttttgtaaggagtttgtgtgctgttggaaaacatggaaaatgcatccttaacacctgagcctctggtcatcttcagtattttctgtcatttgcaaaagctttcagagggcattgtgtatccgtaataatgtccttgaagtcagagactggaaatgttgatctcttagtcttctatagacaaggaggtcagactggagtgaatgttgtaaaagttgaaatgtatatttgtatagcaaataacaaaatccttttaaaatttaatctagtagaccgcttttctttccccctgtttaaaatgttaatcagttttcaacagaacaaactttatattaccaaaaaaaaaaagatgggaggagggcgggtcctttcaaccattgttagagcaagacagataattatttaacagcctagcttggaataagctgagttagtgctggtgggtcaggtgtctctggctctattaaaaaaagcaaaaacccccccaaaaacctggagtctcctaggggacactttgggcagcacggttatgttaggtaaagtcttgctgacatggtgcatttttagatagagtgcattggcccagggtattatatttctgtgatgagttcatttacctgtttcagtatgcacatagttccctagctaaaattcctaatcttcttgagagagaagaatatggagtgaaagaataattcttgagctatcattcaaatgctcccagcatattgtgagccttgtgtgactggtgaggtacagacatttggttgccaaatgctagattagcgctgggtcagctgtggaagaatcgcctcagcttacagattgtcagacagatctaactagttttccagaaagcctgggaagctgtgtgttcaacatttcccaagggattctgatcaccaggcagcttgggaaccactggggcaggccaaatagaatattttgggcgggaaagaagcacccgatttaaaatgaagcgtaaccagaggagttcagaactgggaagagagtggtagacttcctgtgatcttcagaaatcatctacctggtaaaaatacatgctgtttagaatatctgataggtgtttccagctactattagaggtgatagtgcttttgtgggggaaaaaattggtcatggtgaatggagatcgaggaagctcgggacaagggaggggtgggctgcctgattttgtccagttttccaaatatccacgcagtgaactggagtatcctaaacatgagaatgtacagttgacagttgtaaaaactagggatctgtagtgaatgctgtgcagccccatatctcatttgggggtaggaaaatagctgaagattcatgtgcattatttgacatttcctttgtcatctgctttttaagcaaaaaagggttttgtgttagaaattctacttgagcagattataaagagctttaaaaaacaactttcggttgccaaaagtttgagcatttgatttcattacctgtgtctccctcactggtgtccagacggtcaactgaatactcctgaaacccagggagcaggtgacttcctggagtgctttgtccccagagtcagccactgcttcctctgtgggggtggagagtttgtctttggccatgcagtgtgcgacagttcaggacgggtagggatgggtcccattctgtctgggtcaagggctctatcagcttcttccatgtgcctttgggaagaaatctcgttactttaagtttgctttcctgttatcttgatgaagtgcccattttagcagacacttgtagtgctgaccacttagggaatgtacaaactcctaagcttctaaagggaggcatggcaaaaacgttggggtcaggatgtctctcacgctgctcatgttaatactattaacacatgatttgagaaataagttttctctaaaatgcatattttgccgccacacactgaacaatattatttccagtgaagtttgatgcctgttcttacgttgtgttcacctgttggttcaccactcagcagatctgattctgcaagaattaatggtagaactagatcatcctttctaacagacgagcctgtgtcctgtgacggcctttcacagcggaatgcagttgtacctcacattacttttgaaacttcactcgttccagttggtacaagtatttgccaaagccatttcctatgttcaccgtggcccctcctgatgtggctgtcagcgcagcgttgttgaacagggctattctttttacaaggtgtgaagtgtggctcttcgcttcgtctttgccatggcattaaaagaaagttccctgtcttctttcaatattagttatttcaaatgaatatgtgctacttaaaagcttgttttgtttctttgtatataatttgccttggatttattgtgcacagtttgttgagttgtatgtttttgtgaattatcaggagtaaatttgacaagtacatgtgaataacctcctgtaaatgaattttataacaaaaatgtactgaactattttttaaagttgtgcagattagcaattttttgctatagctttgacttttctatgctgtgaattaatagctgcgatttggcaaacagccctgttgtctttgttaaaccctaaattttaagaggaaatggcagaattaaaagcagaaacaagaagatggacatggattagaggttatgtattatgaagtaaactacaaggtactaacatca

SEQ ID NO: 446345 - DNA, 3759 bp, Homo sapiens
taaatatgtttctcttttgtaaatagaccagcagaagtagacactgtggatgcattccagggtcggcagaaggattgtgttattgttacgtgtgtcagagcaaatagcatccaaggttcaattggattcctggcaagtttgcagagattgaatgtcaccatcacacgagccaagtacagcctcttcatcctcggacatttgaggaccctgatggaaaaccagcattggaatcagctgattcaggatgctcagaagcgtggtgccattattaagacctgtgacaaaaactatagacatgatgcagtgaagattctgaaactcaagcctgtgctgcagagaagtctcactcaccctcctaccatagccccagaggggtccagaccccagggtggtttgcccagcagcaagctagacagtggatttgccaagacatctgttgctgcttctctataccacacaccctctgactccaaggaaattactcttactgttacttcaaaggaccctgaaagacctcctgttcatgaccaacttcaggacccacgactgctgaagaggatgggcattgaggtcaaaggaggaatattcctttgggatccacaaccctcgagcccccagcatcctggagcaacacctcctacgggcgagccgggcttccctgtcgttcaccaggacctgagccatatacagcagcccgctgctgtagtggctgctctgagcagccacaaacctcccgtgcggggcgaacctccagctgccagtcccgaggcttccacgtgtcagagcaaatgtgatgacccggaagaggagctctgtcacaggagagaggccagggctttcagtgaaggggagcaggagaagtgtggttccgagacccatcacaccaggaggaactctaggtgggacaagaggacactggagcaggaggacagcagttccaagaaaagaaagcttttataggaaagcccagtgacatgggccagcagccacagcatattgtaaactgaagatgaccagctcgtgggaccatctagataagcttgttttttgtaaggagtttgtgtgctgttggaaaacatggaaaatgcatccttaacacctgagcctctggtcatcttcagtattttctgtcatttgcaaaagctttcagagggcattgtgtatccgtaataatgtccttgaagtcagagactggaaatgttgatctcttagtcttctatagacaaggaggtcagactggagtgaatgttgtaaaagttgaaatgtatatttgtatagcaaataacaaaatccttttaaaatttaatctagtagaccgcttttctttccccctgtttaaaatgttaatcagttttcaacagaacaaactttatattaccaaaaaaaaaaagatgggaggagggcgggtcctttcaaccattgttagagcaagacagataattatttaacagcctagcttggaataagctgagttagtgctggtgggtcaggtgtctctggctctattaaaaaaagcaaaaacccccccaaaaacctggagtctcctaggggacactttgggcagcacggttatgttaggtaaagtcttgctgacatggtgcatttttagatagagtgcattggcccagggtattatatttctgtgatgagttcatttacctgtttcagtatgcacatagttccctagctaaaattcctaatcttcttgagagagaagaatatggagtgaaagaataattcttgagctatcattcaaatgctcccagcatattgtgagccttgtgtgactggtgaggtacagacatttggttgccaaatgctagattagcgctgggtcagctgtggaagaatcgcctcagcttacagattgtcagacagatctaactagttttccagaaagcctgggaagctgtgtgttcaacatttcccaagggattctgatcaccaggcagcttgggaaccactggggcaggccaaatagaatattttgggcgggaaagaagcacccgatttaaaatgaagcgtaaccagaggagttcagaactgggaagagagtggtagacttcctgtgatcttcagaaatcatctacctggtaaaaatacatgctgtttagaatatctgataggtgtttccagctactattagaggtgatagtgcttttgtgggggaaaaaattggtcatggtgaatggagatcgaggaagctcgggacaagggaggggtgggctgcctgattttgtccagttttccaaatatccacgcagtgaactggagtatcctaaacatgagaatgtacagttgacagttgtaaaaactagggatctgtagtgaatgctgtgcagccccatatctcatttgggggtaggaaaatagctgaagattcatgtgcattatttgacatttcctttgtcatctgctttttaagcaaaaaagggttttgtgttagaaattctacttgagcagattataaagagctttaaaaaacaactttcggttgccaaaagtttgagcatttgatttcattacctgtgtctccctcactggtgtccagacggtcaactgaatactcctgaaacccagggagcaggtgacttcctggagtgctttgtccccagagtcagccactgcttcctctgtgggggtggagagtttgtctttggccatgcagtgtgcgacagttcaggacgggtagggatgggtcccattctgtctgggtcaagggctctatcagcttcttccatgtgcctttgggaagaaatctcgttactttaagtttgctttcctgttatcttgatgaagtgcccattttagcagacacttgtagtgctgaccacttagggaatgtacaaactcctaagcttctaaagggaggcatggcaaaaacgttggggtcaggatgtctctcacgctgctcatgttaatactattaacacatgatttgagaaataagttttctctaaaatgcatattttgccgccacacactgaacaatattatttccagtgaagtttgatgcctgttcttacgttgtgttcacctgttggttcaccactcagcagatctgattctgcaagaattaatggtagaactagatcatcctttctaacagacgagcctgtgtcctgtgacggcctttcacagcggaatgcagttgtacctcacattacttttgaaacttcactcgttccagttggtacaagtatttgccaaagccatttcctatgttcaccgtggcccctcctgatgtggctgtcagcgcagcgttgttgaacagggctattctttttacaaggtgtgaagtgtggctcttcgcttcgtctttgccatggcattaaaagaaagttccctgtcttctttcaatattagttatttcaaatgaatatgtgctacttaaaagcttgttttgtttctttgtatataatttgccttggatttattgtgcacagtttgttgagttgtatgtttttgtgaattatcaggagtaaatttgacaagtacatgtgaataacctcctgtaaatgaattttataacaaaaatgtactgaactattttttaaagttgtgcagattagcaattttttgctatagctttgacttttctatgctgtgaattaatagctgcgatttggcaaacagccctgttgtctttgttaaaccctaaattttaagaggaaatggcagaattaaaagcagaaacaagaagatggacatggattagaggttatgtattatgaagtaaactacaaggtactaacatca

SEQ ID NO: 446346 - DNA, 3956 bp, Homo sapiens
catgttgcccaggctcgtcttgaacctctgacctcaggtgatccgcccgcctcagcctcccaaagtgttaggattacaggcatgagccactgcacctggcccagtgcataagttttaatgctggtgttatcttgtcttatcagaaaatgtctgtagaaggttttcaggcattatttttaaatggtttattgactaaaagtctaagggttataattgcctcatcatgtaatttccaaggataggtacatggccaagaggctccccaaggtcagaaatgctaaaatgtgaaagcaacgtgcactttagaatccattaaatattgaccaaggtcacacagcaagtaaatactgtgcagcctcactgcttccctaacatacctttatgaacagtacaggagcccccatgagagggaaaaccagcattggaatcagctgattcaggatgctcagaagcgtggtgccattattaagacctgtgacaaaaactatagacatgatgcagtgaagattctgaaactcaagcctgtgctgcagagaagtctcactcaccctcctaccatagccccagaggggtccagaccccagggtggtttgcccagcagcaagctagacagtggatttgccaagacatctgttgctgcttctctataccacacaccctctgactccaaggaaattactcttactgttacttcaaaggaccctgaaagacctcctgttcatgaccaacttcaggacccacgactgctgaagaggatgggcattgaggtcaaaggaggaatattcctttgggatccacaaccctcgagcccccagcatcctggagcaacacctcctacgggcgagccgggcttccctgtcgttcaccaggacctgagccatatacagcagcccgctgctgtagtggctgctctgagcagccacaaacctcccgtgcggggcgaacctccagctgccagtcccgaggcttccacgtgtcagagcaaatgtgatgacccggaagaggagctctgtcacaggagagaggccagggctttcagtgaaggggagcaggagaagtgtggttccgagacccatcacaccaggaggaactctaggtgggacaagaggacactggagcaggaggacagcagttccaagaaaagaaagcttttataggaaagcccagtgacatgggccagcagccacagcatattgtaaactgaagatgaccagctcgtgggaccatctagataagcttgttttttgtaaggagtttgtgtgctgttggaaaacatggaaaatgcatccttaacacctgagcctctggtcatcttcagtattttctgtcatttgcaaaagctttcagagggcattgtgtatccgtaataatgtccttgaagtcagagactggaaatgttgatctcttagtcttctatagacaaggaggtcagactggagtgaatgttgtaaaagttgaaatgtatatttgtatagcaaataacaaaatccttttaaaatttaatctagtagaccgcttttctttccccctgtttaaaatgttaatcagttttcaacagaacaaactttatattaccaaaaaaaaaaagatgggaggagggcgggtcctttcaaccattgttagagcaagacagataattatttaacagcctagcttggaataagctgagttagtgctggtgggtcaggtgtctctggctctattaaaaaaagcaaaaacccccccaaaaacctggagtctcctaggggacactttgggcagcacggttatgttaggtaaagtcttgctgacatggtgcatttttagatagagtgcattggcccagggtattatatttctgtgatgagttcatttacctgtttcagtatgcacatagttccctagctaaaattcctaatcttcttgagagagaagaatatggagtgaaagaataattcttgagctatcattcaaatgctcccagcatattgtgagccttgtgtgactggtgaggtacagacatttggttgccaaatgctagattagcgctgggtcagctgtggaagaatcgcctcagcttacagattgtcagacagatctaactagttttccagaaagcctgggaagctgtgtgttcaacatttcccaagggattctgatcaccaggcagcttgggaaccactggggcaggccaaatagaatattttgggcgggaaagaagcacccgatttaaaatgaagcgtaaccagaggagttcagaactgggaagagagtggtagacttcctgtgatcttcagaaatcatctacctggtaaaaatacatgctgtttagaatatctgataggtgtttccagctactattagaggtgatagtgcttttgtgggggaaaaaattggtcatggtgaatggagatcgaggaagctcgggacaagggaggggtgggctgcctgattttgtccagttttccaaatatccacgcagtgaactggagtatcctaaacatgagaatgtacagttgacagttgtaaaaactagggatctgtagtgaatgctgtgcagccccatatctcatttgggggtaggaaaatagctgaagattcatgtgcattatttgacatttcctttgtcatctgctttttaagcaaaaaagggttttgtgttagaaattctacttgagcagattataaagagctttaaaaaacaactttcggttgccaaaagtttgagcatttgatttcattacctgtgtctccctcactggtgtccagacggtcaactgaatactcctgaaacccagggagcaggtgacttcctggagtgctttgtccccagagtcagccactgcttcctctgtgggggtggagagtttgtctttggccatgcagtgtgcgacagttcaggacgggtagggatgggtcccattctgtctgggtcaagggctctatcagcttcttccatgtgcctttgggaagaaatctcgttactttaagtttgctttcctgttatcttgatgaagtgcccattttagcagacacttgtagtgctgaccacttagggaatgtacaaactcctaagcttctaaagggaggcatggcaaaaacgttggggtcaggatgtctctcacgctgctcatgttaatactattaacacatgatttgagaaataagttttctctaaaatgcatattttgccgccacacactgaacaatattatttccagtgaagtttgatgcctgttcttacgttgtgttcacctgttggttcaccactcagcagatctgattctgcaagaattaatggtagaactagatcatcctttctaacagacgagcctgtgtcctgtgacggcctttcacagcggaatgcagttgtacctcacattacttttgaaacttcactcgttccagttggtacaagtatttgccaaagccatttcctatgttcaccgtggcccctcctgatgtggctgtcagcgcagcgttgttgaacagggctattctttttacaaggtgtgaagtgtggctcttcgcttcgtctttgccatggcattaaaagaaagttccctgtcttctttcaatattagttatttcaaatgaatatgtgctacttaaaagcttgttttgtttctttgtatataatttgccttggatttattgtgcacagtttgttgagttgtatgtttttgtgaattatcaggagtaaatttgacaagtacatgtgaataacctcctgtaaatgaattttataacaaaaatgtactgaactattttttaaagttgtgcagattagcaattttttgctatagctttgacttttctatgctgtgaattaatagctgcgatttggcaaacagccctgttgtctttgttaaaccctaaattttaagaggaaatggcagaattaaaagcagaaacaagaagatggacatggattagaggttatgtattatgaagtaaactacaaggtactaacatca

SEQ ID NO: 446347 - DNA, 3112 bp, Homo sapiens
acccgagattcctgctgctcgtgacaacagctgcagggaaaggagggaggactcaatgagaccatctgacaggctgatcctgcatgacccaattatttgatcttctagcactggagcactctactggaccacctttacagagtagctaacaacggcccggaagctctgtcacaggagagaggccagggctttcagtgaaggggagcaggagaagtgtggttccgagacccatcacaccaggaggaactctaggtgggacaagaggacactggagcaggaggacagcagttccaagaaaagaaagcttttataggaaagcccagtgacatgggccagcagccacagcatattgtaaactgaagatgaccagctcgtgggaccatctagataagcttgttttttgtaaggagtttgtgtgctgttggaaaacatggaaaatgcatccttaacacctgagcctctggtcatcttcagtattttctgtcatttgcaaaagctttcagagggcattgtgtatccgtaataatgtccttgaagtcagagactggaaatgttgatctcttagtcttctatagacaaggaggtcagactggagtgaatgttgtaaaagttgaaatgtatatttgtatagcaaataacaaaatccttttaaaatttaatctagtagaccgcttttctttccccctgtttaaaatgttaatcagttttcaacagaacaaactttatattaccaaaaaaaaaaagatgggaggagggcgggtcctttcaaccattgttagagcaagacagataattatttaacagcctagcttggaataagctgagttagtgctggtgggtcaggtgtctctggctctattaaaaaaagcaaaaacccccccaaaaacctggagtctcctaggggacactttgggcagcacggttatgttaggtaaagtcttgctgacatggtgcatttttagatagagtgcattggcccagggtattatatttctgtgatgagttcatttacctgtttcagtatgcacatagttccctagctaaaattcctaatcttcttgagagagaagaatatggagtgaaagaataattcttgagctatcattcaaatgctcccagcatattgtgagccttgtgtgactggtgaggtacagacatttggttgccaaatgctagattagcgctgggtcagctgtggaagaatcgcctcagcttacagattgtcagacagatctaactagttttccagaaagcctgggaagctgtgtgttcaacatttcccaagggattctgatcaccaggcagcttgggaaccactggggcaggccaaatagaatattttgggcgggaaagaagcacccgatttaaaatgaagcgtaaccagaggagttcagaactgggaagagagtggtagacttcctgtgatcttcagaaatcatctacctggtaaaaatacatgctgtttagaatatctgataggtgtttccagctactattagaggtgatagtgcttttgtgggggaaaaaattggtcatggtgaatggagatcgaggaagctcgggacaagggaggggtgggctgcctgattttgtccagttttccaaatatccacgcagtgaactggagtatcctaaacatgagaatgtacagttgacagttgtaaaaactagggatctgtagtgaatgctgtgcagccccatatctcatttgggggtaggaaaatagctgaagattcatgtgcattatttgacatttcctttgtcatctgctttttaagcaaaaaagggttttgtgttagaaattctacttgagcagattataaagagctttaaaaaacaactttcggttgccaaaagtttgagcatttgatttcattacctgtgtctccctcactggtgtccagacggtcaactgaatactcctgaaacccagggagcaggtgacttcctggagtgctttgtccccagagtcagccactgcttcctctgtgggggtggagagtttgtctttggccatgcagtgtgcgacagttcaggacgggtagggatgggtcccattctgtctgggtcaagggctctatcagcttcttccatgtgcctttgggaagaaatctcgttactttaagtttgctttcctgttatcttgatgaagtgcccattttagcagacacttgtagtgctgaccacttagggaatgtacaaactcctaagcttctaaagggaggcatggcaaaaacgttggggtcaggatgtctctcacgctgctcatgttaatactattaacacatgatttgagaaataagttttctctaaaatgcatattttgccgccacacactgaacaatattatttccagtgaagtttgatgcctgttcttacgttgtgttcacctgttggttcaccactcagcagatctgattctgcaagaattaatggtagaactagatcatcctttctaacagacgagcctgtgtcctgtgacggcctttcacagcggaatgcagttgtacctcacattacttttgaaacttcactcgttccagttggtacaagtatttgccaaagccatttcctatgttcaccgtggcccctcctgatgtggctgtcagcgcagcgttgttgaacagggctattctttttacaaggtgtgaagtgtggctcttcgcttcgtctttgccatggcattaaaagaaagttccctgtcttctttcaatattagttatttcaaatgaatatgtgctacttaaaagcttgttttgtttctttgtatataatttgccttggatttattgtgcacagtttgttgagttgtatgtttttgtgaattatcaggagtaaatttgacaagtacatgtgaataacctcctgtaaatgaattttataacaaaaatgtactgaactattttttaaagttgtgcagattagcaattttttgctatagctttgacttttctatgctgtgaattaatagctgcgatttggcaaacagccctgttgtctttgttaaaccctaaattttaagaggaaatggcagaattaaaagcagaaacaagaagatggacatggattagaggttatgtattatgaagtaaactacaaggtactaacatca

SEQ ID NO: 446348 - DNA, 2048 bp, Homo sapiens
  misc_feature (22)..(22): n is a, c, g, or t
aacgtcgtagaggatccggatncgtagatctgagctatcattcaaatgctcccagcatattgtgagccttgtgtgactggtgaggtacagacatttggttgccaaatgctagattagcgctgggtcagctgtggaagaatcgcctcagcttacagattgtcagacagatctaactagttttccagaaagcctgggaagctgtgtgttcaacatttcccaagggattctgatcaccaggcagcttgggaaccactggggcaggccaaatagaatattttgggcgggaaagaagcacccgatttaaaatgaagcgtaaccagaggagttcagaactgggaagagagtggtagacttcctgtgatcttcagaaatcatctacctggtaaaaatacatgctgtttagaatatctgataggtgtttccagctactattagaggtgatagtgcttttgtgggggaaaaaattggtcatggtgaatggagatcgaggaagctcgggacaagggaggggtgggctgcctgattttgtccagttttccaaatatccacgcagtgaactggagtatcctaaacatgagaatgtacagttgacagttgtaaaaactagggatctgtagtgaatgctgtgcagccccatatctcatttgggggtaggaaaatagctgaagattcatgtgcattatttgacatttcctttgtcatctgctttttaagcaaaaaagggttttgtgttagaaattctacttgagcagattataaagagctttaaaaaacaactttcggttgccaaaagtttgagcatttgatttcattacctgtgtctccctcactggtgtccagacggtcaactgaatactcctgaaacccagggagcaggtgacttcctggagtgctttgtccccagagtcagccactgcttcctctgtgggggtggagagtttgtctttggccatgcagtgtgcgacagttcaggacgggtagggatgggtcccattctgtctgggtcaagggctctatcagcttcttccatgtgcctttgggaagaaatctcgttactttaagtttgctttcctgttatcttgatgaagtgcccattttagcagacacttgtagtgctgaccacttagggaatgtacaaactcctaagcttctaaagggaggcatggcaaaaacgttggggtcaggatgtctctcacgctgctcatgttaatactattaacacatgatttgagaaataagttttctctaaaatgcatattttgccgccacacactgaacaatattatttccagtgaagtttgatgcctgttcttacgttgtgttcacctgttggttcaccactcagcagatctgattctgcaagaattaatggtagaactagatcatcctttctaacagacgagcctgtgtcctgtgacggcctttcacagcggaatgcagttgtacctcacattacttttgaaacttcactcgttccagttggtacaagtatttgccaaagccatttcctatgttcaccgtggcccctcctgatgtggctgtcagcgcagcgttgttgaacagggctattctttttacaaggtgtgaagtgtggctcttcgcttcgtctttgccatggcattaaaagaaagttccctgtcttctttcaatattagttatttcaaatgaatatgtgctacttaaaagcttgttttgtttctttgtatataatttgccttggatttattgtgcacagtttgttgagttgtatgtttttgtgaattatcaggagtaaatttgacaagtacatgtgaataacctcctgtaaatgaattttataacaaaaatgtactgaactattttttaaagttgtgcagattagcaattttttgctatagctttgacttttctatgctgtgaattaatagctgcgatttggcaaacagccctgttgtctttgttaaaccctaaattttaagaggaaatggcagaattaaaagcagaaacaagaagatggacatggattagaggttatgtattatgaagtaaactacaaggtactaacatca

SEQ ID NO: 446349 - DNA, 1352 bp, Homo sapiens
  misc_feature (15)..(15): n is a, c, g, or t
atgtcgggacagccntgctcccaagtacaaatagagtgacccgtaaaatccaggattttttgttttttgcagcttggggctttcgagttgccaaaagtttgagcatttgatttcattacctgtgtctccctcactggtgtccagacggtcaactgaatactcctgaaacccagggagcaggtgacttcctggagtgctttgtccccagagtcagccactgcttcctctgtgggggtggagagtttgtctttggccatgcagtgtgcgacagttcaggacgggtagggatgggtcccattctgtctgggtcaagggctctatcagcttcttccatgtgcctttgggaagaaatctcgttactttaagtttgctttcctgttatcttgatgaagtgcccattttagcagacacttgtagtgctgaccacttagggaatgtacaaactcctaagcttctaaagggaggcatggcaaaaacgttggggtcaggatgtctctcacgctgctcatgttaatactattaacacatgatttgagaaataagttttctctaaaatgcatattttgccgccacacactgaacaatattatttccagtgaagtttgatgcctgttcttacgttgtgttcacctgttggttcaccactcagcagatctgattctgcaagaattaatggtagaactagatcatcctttctaacagacgagcctgtgtcctgtgacggcctttcacagcggaatgcagttgtacctcacattacttttgaaacttcactcgttccagttggtacaagtatttgccaaagccatttcctatgttcaccgtggcccctcctgatgtggctgtcagcgcagcgttgttgaacagggctattctttttacaaggtgtgaagtgtggctcttcgcttcgtctttgccatggcattaaaagaaagttccctgtcttctttcaatattagttatttcaaatgaatatgtgctacttaaaagcttgttttgtttctttgtatataatttgccttggatttattgtgcacagtttgttgagttgtatgtttttgtgaattatcaggagtaaatttgacaagtacatgtgaataacctcctgtaaatgaattttataacaaaaatgtactgaactattttttaaagttgtgcagattagcaattttttgctatagctttgacttttctatgctgtgaattaatagctgcgatttggcaaacagccctgttgtctttgttaaaccctaaattttaagaggaaatggcagaattaaaagcagaaacaagaagatggacatggattagaggttatgtattatgaagtaaactacaaggtactaacatca

SEQ ID NO: 446350 - DNA, 2471 bp, Homo sapiens
cgagaatggctcaactctccaaatagagagaatttctatcagttgcaagtacgaaaatttcctgccgattatataaaatactgggagtttgcagtttatctggaagaatgtgaactggctaaacagctttatccaaaggaaaacgatttggtgtttttagctcctgagagaataaatgaagagaagaaagatacagagagaaatgacatacaagatctccacgaatatcattctggttatgttcataaatttcgccgcacgtcagtcatgcgtaatgggaaaactgagtgttacctttccatccagactcaagagaactttccggccaatttaaacgaacttgtgaattgtattgtaatcagttctctggtaactacacaaaggaagttgaaagccatgtctctgttgggtagtcggaaccaactggctagagctgttctgaatccaaaccctatggacttctgtacaaaagatttactgactacaacatctgagagaattattgcgtacttaagagatttcaatgaagatcaaaagaaagcaatagaaactgcatatgctatggtgaaacactcaccatcagttgccaaaatctgcttgattcatggaccacctggaacaggaaaatcaaaaactattgttggcctcctctatcgtctactgacagagaaccagaggaaggggcattcagacgaaaactccaatgccaaaatcaaacaaaaccgtgtcctcgtgtgtgcaccttccaatgcagctgttgatgaactcatgaaaaaaattatccttgaattcaaagaaaaatgtaaagacaagaagaatcctttaggaaactgtggagatataaatttagtacgactgggtccagaaaagtctattaatagtgaggttctaaagttcagtttggacagccaagtaaaccacagaatgaaaaaagagttaccttctcatgttcaggcgatgcataaaagaaaggaatttctagattatcagctggatgagctttcccggcagcgagctctatgccgaggtggacgggaaatacagaggcaagaattagatgaaaacatttccaaagtttctaaggaaaggcaggaacttgcttctaaaattaaagaggttcaaggacgcccacagaaaacacagagtatcatcatcttagagtcccatatcatctgctgcacgttgagcacaagtggtggtttactacttgagtctgctttccgtgggcaagggggtgtccccttcagctgtgtcattgttgatgaggctggacagtcttgtgaaattgagactcttactccactcatccatcgctgcaataagctcatcctagtaggagatcctaagcagctccctccgacagtcatctctatgaaagcacaggagtatggctacgaccagtcaatgatggctcgcttctgcagactgctggaagagaatgtagaacacaacatgatcagcaggctgcccattctacagctcactgttcagtacaggatgcatccagacatatgcctcttcccttctaattatgtttataacagaaacttaaaaacaaatagacagacagaagccattcgatgttcatcagattggccatttcagccataccttgtgtttgatgttggagatggttcagaaagacgggataatgactcatatataaatgttcaagaaataaaactggtgatggaaataattaagcttattaaagacaaaagaaaggatgttagttttcgaaacattggcataataactcattacaaggcccagaagacgatgattcagaaggatttggacaaagagttcgatagaaaaggaccagcagaagtagacactgtggatgcattccagggtcggcagaaggattgtgttattgttacgtgtgtcagagcaaatagcatccaaggttcaattggattcctggcaagtttgcagagattgaatgtcaccatcacacgagccaagtacagcctcttcatcctcggacatttgaggaccctgatgatgaggaaacaggctcagagaggtcaagtgacttgaccaaggtcacacagcaagtaaatactgtgcagcctcactgcttccctaacatacctttatgaacagtacaggagcccccatgagagggaaaaccagcattggaatcagctgattcaggatgctcagaagcgtggtgccattattaagacctgtgacaaaaactatagacatgatgcagtgaagattctgaaactcaagcctgtgctgcagagaagtctcactcaccctcctaccatagccccagaggggtccagaccccagggtggtttgcccagcagcaagctagacagtggatttgccaagacatctgttgtctttgttaaaccctaaattttaagaggaaatggcagaattaaaagcagaaacaagaagatggacatggattagaggttatgtattatgaagtaaactacaaggtactaacatca

SEQ ID NO: 446351 - DNA, 1992 bp, Homo sapiens
cgagaatggctcaactctccaaatagagagaatttctatcagttgcaagtacgaaaatttcctgccgattatataaaatactgggagtttgcagtttatctggaagaatgtgaactggctaaacagctttatccaaaggaaaacgatttggtgtttttagctcctgagagaataaatgaagagaagaaagatacagagagaaatgacatacaagatctccacgaatatcattctggttatgttcataaatttcgccgcacgtcagtcatgcgtaatgggaaaactgagtgttacctttccatccagactcaagagaactttccggccaatttaaacgaacttgtgaattgtattgtaatcagttctctggtaactacacaaaggaagttgaaagccatgtctctgttgggtagtcggaaccaactggctagagctgttctgaatccaaaccctatggacttctgtacaaaagatttactgactacaacatctgagagaattattgcgtacttaagagatttcaatgaagatcaaaagaaagcaatagaaactgcatatgctatggtgaaacactcaccatcagttgccaaaatctgcttgattcatggaccacctggaacaggaaaatcaaaaactattgttggcctcctctatcgtctactgacagagaaccagaggaaggggcattcagacgaaaactccaatgccaaaatcaaacaaaaccgtgtcctcgtgtgtgcaccttccaatgcagctgttgatgaactcatgaaaaaaattatccttgaattcaaagaaaaatgtaaagacaagaagaatcctttaggaaactgtggagatataaatttagtacgactgggtccagaaaagtctattaatagtgaggttctaaagttcagtttggacagccaagtaaaccacagaatgaaaaaagagttaccttctcatgttcaggcgatgcataaaagaaaggaatttctagattatcagctggatgagctttcccggcagcgagctctatgccgaggtggacgggaaatacagaggcaagaattagatgaaaacatttccaaagtttctaaggaaaggcaggaacttgcttctaaaattaaagaggttcaaggacgcccacagaaaacacagagtatcatcatcttagagtcccatatcatctgctgcacgttgagcacaagtggtggtttactacttgagtctgctttccgtgggcaagggggtgtccccttcagctgtgtcattgttgatgaggctggacagtcttgtgaaattgagactcttactccactcatccatcgctgcaataagctcatcctagtaggagatcctaagcagctccctccgacagtcatctctatgaaagcacaggagtatggctacgaccagtcaatgatggctcgcttctgcagactgctggaagagaatgtagaacacaacatgatcagcaggctgcccattctacagctcactgttcagtacaggatgcatccagacatatgcctcttcccttctaattatgtttataacagaaacttaaaaacaaatagacagacagaagccattcgatgttcatcagattggccatttcagccataccttgtgtttgatgttggagatggttcagaaagacgggataatgactccatcatcataacatgttcaacgcaacatcaacacactggtgcatggcaacatcacacttccacagctctcattcacacgcaccaacacagcaaaggactgcttagatctgtatcgacaccaattggcaataactaacgtcacttacaaggacccagaaagcacgaatgcattcagacaggcatttggaacaaaacgcagttcgactagaacaccaggacccagacagaacgatacgacaactgatggcatgcacatatccatgggatcgagacacgacaggacttgtcgtttactatgtataacgtgtgatcaagagcaaactacgcagtccag

SEQ ID NO: 446352 - DNA, 442 bp, Homo sapiens
ttggtgcaggagaagtgtgatacttttctgaatggttagaactttaatcagataaactatatggataaatagcaaagattgttaagactgcctctctcttctgtatcttaccaaggctggacagtcttgtgaaattgagactcttactccactcatccatcgctgcaataagctcatcctagtaggagatcctaagcagctccctccgacagtcatctctatggtaagttttttatgttcagattgctttaaaatggaaggggctttttaaaatttttgttttcaggagggagagacatctttcttggattggcctcttaatttggagggaaaagtaagcagtaactaagaaaagagaagcacttaataaattttaaaaaatgcctaaaaatgtccatttggtcatagttgttcttctgtgtatgtgtggcagaagcagtgt

SEQ ID NO: 446353 - DNA, 5553 bp, Homo sapiens
cgagaatggctcaactctccaaatagagagaatttctatcagttgcaagtacgaaaatttcctgccgattatataaaatactgggagtttgcagtttatctggaagaatgtgaactggctaaacagctttatccaaaggaaaacgatttggtgtttttagctcctgagagaataaatgaagagaagaaagatacagagagaaatgacatacaagatctccacgaatatcattctggttatgttcataaatttcgccgcacgtcagtcatgcgtaatgggaaaactgagtgttacctttccatccagactcaagagaactttccggccaatttaaacgaacttgtgaattgtattgtaatcagttctctggtaactacacaaaggaagttgaaagccatgtctctgttgggtagtcggaaccaactggctagagctgttctgaatccaaaccctatggacttctgtacaaaagatttactgactacaacatctgagagaattattgcgtacttaagagatttcaatgaagatcaaaagaaagcaatagaaactgcatatgctatggtgaaacactcaccatcagttgccaaaatctgcttgattcatggaccacctggaacaggaaaatcaaaaactattgttggcctcctctatcgtctactgacagagaaccagaggaaggggcattcagacgaaaactccaatgccaaaatcaaacaaaaccgtgtcctcgtgtgtgcaccttccaatgcagctgttgatgaactcatgaaaaaaattatccttgaattcaaagaaaaatgtaaagacaagaagaatcctttaggaaactgtggagatataaatttagtacgactgggtccagaaaagtctattaatagtgaggttctaaagttcagtttggacagccaagtaaaccacagaatgaaaaaagagttaccttctcatgttcaggcgatgcataaaagaaaggaatttctagattatcagctggatgagctttcccggcagcgagctctatgccgaggtggacgggaaatacagaggcaagaattagatgaaaacatttccaaagtttctaaggaaaggcaggaacttgcttctaaaattaaagaggttcaaggacgcccacagaaaacacagagtatcatcatcttagagtcccatatcatctgctgcacgttgagcacaagtggtggtttactacttgagtctgctttccgtgggcaagggggtgtccccttcagctgtgtcattgttgatgaggctggacagtcttgtgaaattgagactcttactccactcatccatcgctgcaataagctcatcctagtaggagatcctaagcagctccctccgacagtcatctctatgaaagcacaggagtatggctacgaccagtcaatgatggctcgcttctgcagactgctggaagagaatgtagaacacaacatgatcagcaggctgcccattctacagctcactgttcagtacaggatgcatccagacatatgcctcttcccttctaattatgtttataacagaaacttaaaaacaaatagacagacagaagccattcgatgttcatcagattggccatttcagccataccttgtgtttgatgttggagatggttcagaaagacgggataatgactcatatataaatgttcaagaaataaaactggtgatggaaataattaagcttattaaagacaaaagaaaggatgttagttttcgaaacattggcataataactcattacaaggcccagaagacgatgattcagaaggatttggacaaagagttcgatagaaaaggaccagcagaagtagacactgtggatgcattccagggtcggcagaaggattgtgttattgttacgtgtgtcagagcaaatagcatccaaggttcaattggattcctggcaagtttgcagagattgaatgtcaccatcacacgagccaagtacagcctcttcatcctcggacatttgaggaccctgatggaaaaccagcattggaatcagctgattcaggatgctcagaagcgtggtgccattattaagacctgtgacaaaaactatagacatgatgcagtgaagattctgaaactcaagcctgtgctgcagagaagtctcactcaccctcctaccatagccccagaggggtccagaccccagggtggtttgcccagcagcaagctagacagtggatttgccaagacatctgttgctgcttctctataccacacaccctctgactccaaggaaattactcttactgttacttcaaaggaccctgaaagacctcctgttcatgaccaacttcaggacccacgactgctgaagaggatgggcattgaggtcaaaggaggaatattcctttgggatccacaaccctcgagcccccagcatcctggagcaacacctcctacgggcgagccgggcttccctgtcgttcaccaggacctgagccatatacagcagcccgctgctgtagtggctgctctgagcagccacaaacctcccgtgcggggcgaacctccagctgccagtcccgaggcttccacgtgtcagagcaaatgtgatgacccggaagaggagctctgtcacaggagagaggccagggctttcagtgaaggggagcaggagaagtgtggttccgagacccatcacaccaggaggaactctaggtgggacaagaggacactggagcaggaggacagcagttccaagaaaagaaagcttttataggaaagcccagtgacatgggccagcagccacagcatattgtaaactgaagatgaccagctcgtgggaccatctagataagcttgttttttgtaaggagtttgtgtgctgttggaaaacatggaaaatgcatccttaacacctgagcctctggtcatcttcagtattttctgtcatttgcaaaagctttcagagggcattgtgtatccgtaataatgtccttgaagtcagagactggaaatgttgatctcttagtcttctatagacaaggaggtcagactggagtgaatgttgtaaaagttgaaatgtatatttgtatagcaaataacaaaatccttttaaaatttaatctagtagaccgcttttctttccccctgtttaaaatgttaatcagttttcaacagaacaaactttatattaccaaaaaaaaaaagatgggaggagggcgggtcctttcaaccattgttagagcaagacagataattatttaacagcctagcttggaataagctgagttagtgctggtgggtcaggtgtctctggctctattaaaaaaagcaaaaacccccccaaaaacctggagtctcctaggggacactttgggcagcacggttatgttaggtaaagtcttgctgacatggtgcatttttagatagagtgcattggcccagggtattatatttctgtgatgagttcatttacctgtttcagtatgcacatagttccctagctaaaattcctaatcttcttgagagagaagaatatggagtgaaagaataattcttgagctatcattcaaatgctcccagcatattgtgagccttgtgtgactggtgaggtacagacatttggttgccaaatgctagattagcgctgggtcagctgtggaagaatcgcctcagcttacagattgtcagacagatctaactagttttccagaaagcctgggaagctgtgtgttcaacatttcccaagggattctgatcaccaggcagcttgggaaccactggggcaggccaaatagaatattttgggcgggaaagaagcacccgatttaaaatgaagcgtaaccagaggagttcagaactgggaagagagtggtagacttcctgtgatcttcagaaatcatctacctggtaaaaatacatgctgtttagaatatctgataggtgtttccagctactattagaggtgatagtgcttttgtgggggaaaaaattggtcatggtgaatggagatcgaggaagctcgggacaagggaggggtgggctgcctgattttgtccagttttccaaatatccacgcagtgaactggagtatcctaaacatgagaatgtacagttgacagttgtaaaaactagggatctgtagtgaatgctgtgcagccccatatctcatttgggggtaggaaaatagctgaagattcatgtgcattatttgacatttcctttgtcatctgctttttaagcaaaaaagggttttgtgttagaaattctacttgagcagattataaagagctttaaaaaacaactttcggttgccaaaagtttgagcatttgatttcattacctgtgtctccctcactggtgtccagacggtcaactgaatactcctgaaacccagggagcaggtgacttcctggagtgctttgtccccagagtcagccactgcttcctctgtgggggtggagagtttgtctttggccatgcagtgtgcgacagttcaggacgggtagggatgggtcccattctgtctgggtcaagggctctatcagcttcttccatgtgcctttgggaagaaatctcgttactttaagtttgctttcctgttatcttgatgaagtgcccattttagcagacacttgtagtgctgaccacttagggaatgtacaaactcctaagcttctaaagggaggcatggcaaaaacgttggggtcaggatgtctctcacgctgctcatgttaatactattaacacatgatttgagaaataagttttctctaaaatgcatattttgccgccacacactgaacaatattatttccagtgaagtttgatgcctgttcttacgttgtgttcacctgttggttcaccactcagcagatctgattctgcaagaattaatggtagaactagatcatcctttctaacagacgagcctgtgtcctgtgacggcctttcacagcggaatgcagttgtacctcacattacttttgaaacttcactcgttccagttggtacaagtatttgccaaagccatttcctatgttcaccgtggcccctcctgatgtggctgtcagcgcagcgttgttgaacagggctattctttttacaaggtgtgaagtgtggctcttcgcttcgtctttgccatggcattaaaagaaagttccctgtcttctttcaatattagttatttcaaatgaatatgtgctacttaaaagcttgttttgtttctttgtatataatttgccttggatttattgtgcacagtttgttgagttgtatgtttttgtgaattatcaggagtaaatttgacaagtacatgtgaataacctcctgtaaatgaattttataacaaaaatgtactgaactattttttaaagttgtgcagattagcaattttttgctatagctttgacttttctatgctgtgaattaatagctgcgatttggcaaacagccctgttgtctttgttaaaccctaaattttaagaggaaatggcagaattaaaagcagaaacaagaagatggacatggattagaggttatgtattatgaagtaaactacaaggtactaacatca

SEQ ID NO: 446354 - DNA, 5196 bp, Homo sapiens
cgagaatggctcaactctccaaatagagagaatttctatcagttgcaagtacgaaaatttcctgccgattatataaaatactgggagtttgcagtttatctggaagaatgtgaactggctaaacagctttatccaaaggaaaacgatttggtgtttttagctcctgagagaataaatgaagagaagaaagatacagagagaaatgacatacaagatctccacgaatatcattctggttatgttcataaatttcgccgcacgtcagtcatgcgtaatgggaaaactgagtgttacctttccatccagactcaagagaactttccggccaatttaaacgaacttgtgaattgtattgtaatcagttctctggtaactacacaaaggaagttgaaagccatgtctctgttgggtagtcggaaccaactggctagagctgttctgaatccaaaccctatggacttctgtacaaaagatttactgactacaacatctgagagaattattgcgtacttaagagatttcaatgaagatcaaaagaaagcaatagaaactgcatatgctatggtgaaacactcaccatcagttgccaaaatctgcttgattcatggaccacctggaacaggaaaatcaaaaactattgttggcctcctctatcgtctactgacagagaaccagaggaaggggcattcagacgaaaactccaatgccaaaatcaaacaaaaccgtgtcctcgtgtgtgcaccttccaatgcagctgttgatgaactcatgaaaaaaattatccttgaattcaaagaaaaatgtaaagacaagaagaatcctttaggaaactgtggagatataaatttagtacgactgggtccagaaaagtctattaatagtgaggttctaaagttcagtttggacagccaagtaaaccacagaatgaaaaaagagttaccttctcatgttcaggcgatgcataaaagaaaggaatttctagattatcagctggatgagctttcccggcagcgagctctatgccgaggtggacgggaaatacagaggcaagaattagatgaaaacatttccaaagtttctaaggaaaggcaggaacttgcttctaaaattaaagaggttcaaggacgcccacagaaaacacagagtatcatcatcttagagtcccatatcatctgctgcacgttgagcacaagtggtggtttactacttgagtctgctttccgtgggcaagggggtgtccccttcagctgtgtcattgttgatgaggctggacagtcttgtgaaattgagactcttactccactcatccatcgctgcaataagctcatcctagtaggagatcctaagcagctccctccgacagtcatctctatgaaagcacaggagtatggctacgaccagtcaatgatggctcgcttctgcagactgctggaagagaatgtagaacacaacatgatcagcaggctgcccattctacagctcactgttcagtacaggatgcatccagacatatgcctcttcccttctaattatgtttataacagaaacttaaaaacaaatagacagacagaagccattcgatgttcatcagattggccatttcagccataccttgtgtttgatgttggagatggttcagaaagacgggataatgactcatatataaatgttcaagaaataaaactggtgatggaaataattaagcttattaaagacaaaagaaaggatgttagttttcgaaacattggcataataactcattacaaggcccagaagacgatgattcagaaggatttggacaaagagttcgatagaaaaggaccagcagaagtagacactgtggatgcattccagggtcggcagaaggattgtgttattgttacgtgtgtcagagcaaatagcatccaaggttcaattggattcctggcaagtttgcagagattgaatgtcaccatcacacgagccaagtacagcctcttcatcctcggacatttgaggaccctgatggaaaaccagcattggaatcagctgattcaggatgctcagaagcgtggtgccattattaagacctgtgacaaaaactatagacatgatgcagtgaagattctgaaactcaagcctgtgctgcagagaagtctcactcaccctcctaccatagccccagaggggtccagaccccagggtggtttgcccagcagcaagctagacagtggatttgccaagacatctgttgctgcttctctataccacacaccctctgactccaaggaaattactcttactgttacttcaaaggaccctgaaagacctcctgttcatgaccaacttcaggacccacgactgctgaagaggatgggcattgaggtcaaaggaggaatattcctttgggatccacaaccctcgagcccccagcatcctggagcaacacctcctacgggcgagccgggcttccctgtcgttcaccaggacctgagccatatacagcagcccgctgctgtagtggctgctctgagcagccacaaacctcccgtgcggggcgaacctccagctgccagtcccgaggcttccacgtgtcagagcaaatgtgatgacccggaagaggagctctgtcacaggagagaggccagggctttcagtgaaggggagcaggagaagtgtggttccgagacccatcacaccaggaggaactctaggtgggacaagaggacactggagcaggaggacagcagttccaagaaaagaaagcttttataggaaagcccagtgacatgggccagcagccacagcatattgtaaactgaagatgaccagctcgtgggaccatctagataagcttgttttttgtaaggagtttgtgtgctgttggaaaacatggaaaatgcatccttaacacctgagcctctggtcatcttcagtattttctgtcatttgcaaaagctttcagagggcattgtgtatccgtaataatgtccttgaagtcagagactggaaatgttgatctcttagtcttctatagacaaggaggtcagactggagtgaatgttgtaaaagttgaaatgtatatttgtatagcaaataacaaaatccttttaaaatttaatctagtagaccgcttttctttccccctgtttaaaatgttaatcagttttcaacagaacaaactttatattaccaaaaaaaaaaagatgggaggagggcgggtcctttcaaccattgttagagcaagacagataattatttaacagcctagcttggaataagctgagttagtgctggtgggtcaggtgtctctggctctattaaaaaaagcaaaaacccccccaaaaacctggagtctcctaggggacactttgggcagcacggttatgttaggtaaagtcttgctgacatggtgcatttttagatagagtgcattggcccagggtattatatttctgtgatgagttcatttacctgtttcagtatgcacatagttccctagctaaaattcctaatcttcttgagagagaagaatatggagtgaaagaataattcttgagctatcattcaaatgctcccagcatattgtgagccttgtgtgactggtgaggtacagacatttggttgccaaatgctagattagcgctgggtcagctgtggaagaatcgcctcagcttacagattgtcagacagatctaactattttccaaatatccacgcagtgaactggagtatcctaaacatgagaatgtacagttgacagttgtaaaaactagggatctgtagtgaatgctgtgcagccccatatctcatttgggggtaggaaaatagctgaagattcatgtgcattatttgacatttcctttgtcatctgctttttaagcaaaaaagggttttgtgttagaaattctacttgagcagattataaagagctttaaaaaacaactttcggttgccaaaagtttgagcatttgatttcattacctgtgtctccctcactggtgtccagacggtcaactgaatactcctgaaacccagggagcaggtgacttcctggagtgctttgtccccagagtcagccactgcttcctctgtgggggtggagagtttgtctttggccatgcagtgtgcgacagttcaggacgggtagggatgggtcccattctgtctgggtcaagggctctatcagcttcttccatgtgcctttgggaagaaatctcgttactttaagtttgctttcctgttatcttgatgaagtgcccattttagcagacacttgtagtgctgaccacttagggaatgtacaaactcctaagcttctaaagggaggcatggcaaaaacgttggggtcaggatgtctctcacgctgctcatgttaatactattaacacatgatttgagaaataagttttctctaaaatgcatattttgccgccacacactgaacaatattatttccagtgaagtttgatgcctgttcttacgttgtgttcacctgttggttcaccactcagcagatctgattctgcaagaattaatggtagaactagatcatcctttctaacagacgagcctgtgtcctgtgacggcctttcacagcggaatgcagttgtacctcacattacttttgaaacttcactcgttccagttggtacaagtatttgccaaagccatttcctatgttcaccgtggcccctcctgatgtggctgtcagcgcagcgttgttgaacagggctattctttttacaaggtgtgaagtgtggctcttcgcttcgtctttgccatggcattaaaagaaagttccctgtcttctttcaatattagttatttcaaatgaatatgtgctacttaaaagcttgttttgtttctttgtatataatttgccttggatttattgtgcacagtttgttgagttgtatgtttttgtgaattatcaggagtaaatttgacaagtacatgtgaataacctcctgtaaatgaattttataacaaaaatgtactgaactattttttaaagttgtgcagattagcaattttttgctatagctttgacttttctatgctgtgaattaatagctgcgatttggcaaacagccctgttgtctttgttaaaccctaaattttaagaggaaatggcagaattaaaagcagaaacaagaagatggacatggattagaggttatgtattatgaagtaaactacaaggtactaacatca

SEQ ID NO: 446355 - DNA, 5640 bp, Homo sapiens
cgagaatggctcaactctccaaatagagagaatttctatcagttgcaagtacgaaaatttcctgccgattatataaaatactgggagtttgcagtttatctggaagaatgtgaactggctaaacagctttatccaaaggaaaacgatttggtgtttttagctcctgagagaataaatgaagagaagaaagatacagagagaaatgacatacaagatctccacgaatatcattctggttatgttcataaatttcgccgcacgtcagtcatgcgtaatgggaaaactgagtgttacctttccatccagactcaagagaactttccggccaatttaaacgaacttgtgaattgtattgtaatcagttctctggtaactacacaaaggaagttgaaagccatgtctctgttgggtagtcggaaccaactggctagagctgttctgaatccaaaccctatggacttctgtacaaaagatttactgactacaacatctgagagaattattgcgtacttaagagatttcaatgaagatcaaaagaaagcaatagaaactgcatatgctatggtgaaacactcaccatcagttgccaaaatctgcttgattcatggaccacctggaacaggaaaatcaaaaactattgttggcctcctctatcgtctactgacagagaaccagaggaaggggcattcagacgaaaactccaatgccaaaatcaaacaaaaccgtgtcctcgtgtgtgcaccttccaatgcagctgttgatgaactcatgaaaaaaattatccttgaattcaaagaaaaatgtaaagacaagaagaatcctttaggaaactgtggagatataaatttagtacgactgggtccagaaaagtctattaatagtgaggttctaaagttcagtttggacagccaagtaaaccacagaatgaaaaaagagttaccttctcatgttcaggcgatgcataaaagaaaggaatttctagattatcagctggatgagctttcccggcagcgagctctatgccgaggtggacgggaaatacagaggcaagaattagatgaaaacatttccaaagtttctaaggaaaggcaggaacttgcttctaaaattaaagaggttcaaggacgcccacagaaaacacagagtatcatcatcttagagtcccatatcatctgctgcacgttgagcacaagtggtggtttactacttgagtctgctttccgtgggcaagggggtgtccccttcagctgtgtcattgttgatgaggctggacagtcttgtgaaattgagactcttactccactcatccatcgctgcaataagctcatcctagtaggagatcctaagcagctccctccgacagtcatctctatgaaagcacaggagtatggctacgaccagtcaatgatggctcgcttctgcagactgctggaagagaatgtagaacacaacatgatcagcaggctgcccattctacagctcactgttcagtacaggatgcatccagacatatgcctcttcccttctaattatgtttataacagaaacttaaaaacaaatagacagacagaagccattcgatgttcatcagattggccatttcagccataccttgtgtttgatgttggagatggttcagaaagacgggataatgactcatatataaatgttcaagaaataaaactggtgatggaaataattaagcttattaaagacaaaagaaaggatgttagttttcgaaacattggcataataactcattacaaggcccagaagacgatgattcagaaggatttggacaaagagttcgatagaaaaggaccagcagaagtagacactgtggatgcattccagggtcggcagaaggattgtgttattgttacgtgtgtcagagcaaatagcatccaaggttcaattggattcctggcaagtttgcagagattgaatgtcaccatcacacgagccaagtacagcctcttcatcctcggacatttgaggaccctgatgcaacttcttcctaggagcttttgtgtacacgtgaaccattcgccttttttcagcccagaacccaagtatctacactgggctctcaaggaaaaccagcattggaatcagctgattcaggatgctcagaagcgtggtgccattattaagacctgtgacaaaaactatagacatgatgcagtgaagattctgaaactcaagcctgtgctgcagagaagtctcactcaccctcctaccatagccccagaggggtccagaccccagggtggtttgcccagcagcaagctagacagtggatttgccaagacatctgttgctgcttctctataccacacaccctctgactccaaggaaattactcttactgttacttcaaaggaccctgaaagacctcctgttcatgaccaacttcaggacccacgactgctgaagaggatgggcattgaggtcaaaggaggaatattcctttgggatccacaaccctcgagcccccagcatcctggagcaacacctcctacgggcgagccgggcttccctgtcgttcaccaggacctgagccatatacagcagcccgctgctgtagtggctgctctgagcagccacaaacctcccgtgcggggcgaacctccagctgccagtcccgaggcttccacgtgtcagagcaaatgtgatgacccggaagaggagctctgtcacaggagagaggccagggctttcagtgaaggggagcaggagaagtgtggttccgagacccatcacaccaggaggaactctaggtgggacaagaggacactggagcaggaggacagcagttccaagaaaagaaagcttttataggaaagcccagtgacatgggccagcagccacagcatattgtaaactgaagatgaccagctcgtgggaccatctagataagcttgttttttgtaaggagtttgtgtgctgttggaaaacatggaaaatgcatccttaacacctgagcctctggtcatcttcagtattttctgtcatttgcaaaagctttcagagggcattgtgtatccgtaataatgtccttgaagtcagagactggaaatgttgatctcttagtcttctatagacaaggaggtcagactggagtgaatgttgtaaaagttgaaatgtatatttgtatagcaaataacaaaatccttttaaaatttaatctagtagaccgcttttctttccccctgtttaaaatgttaatcagttttcaacagaacaaactttatattaccaaaaaaaaaaagatgggaggagggcgggtcctttcaaccattgttagagcaagacagataattatttaacagcctagcttggaataagctgagttagtgctggtgggtcaggtgtctctggctctattaaaaaaagcaaaaacccccccaaaaacctggagtctcctaggggacactttgggcagcacggttatgttaggtaaagtcttgctgacatggtgcatttttagatagagtgcattggcccagggtattatatttctgtgatgagttcatttacctgtttcagtatgcacatagttccctagctaaaattcctaatcttcttgagagagaagaatatggagtgaaagaataattcttgagctatcattcaaatgctcccagcatattgtgagccttgtgtgactggtgaggtacagacatttggttgccaaatgctagattagcgctgggtcagctgtggaagaatcgcctcagcttacagattgtcagacagatctaactagttttccagaaagcctgggaagctgtgtgttcaacatttcccaagggattctgatcaccaggcagcttgggaaccactggggcaggccaaatagaatattttgggcgggaaagaagcacccgatttaaaatgaagcgtaaccagaggagttcagaactgggaagagagtggtagacttcctgtgatcttcagaaatcatctacctggtaaaaatacatgctgtttagaatatctgataggtgtttccagctactattagaggtgatagtgcttttgtgggggaaaaaattggtcatggtgaatggagatcgaggaagctcgggacaagggaggggtgggctgcctgattttgtccagttttccaaatatccacgcagtgaactggagtatcctaaacatgagaatgtacagttgacagttgtaaaaactagggatctgtagtgaatgctgtgcagccccatatctcatttgggggtaggaaaatagctgaagattcatgtgcattatttgacatttcctttgtcatctgctttttaagcaaaaaagggttttgtgttagaaattctacttgagcagattataaagagctttaaaaaacaactttcggttgccaaaagtttgagcatttgatttcattacctgtgtctccctcactggtgtccagacggtcaactgaatactcctgaaacccagggagcaggtgacttcctggagtgctttgtccccagagtcagccactgcttcctctgtgggggtggagagtttgtctttggccatgcagtgtgcgacagttcaggacgggtagggatgggtcccattctgtctgggtcaagggctctatcagcttcttccatgtgcctttgggaagaaatctcgttactttaagtttgctttcctgttatcttgatgaagtgcccattttagcagacacttgtagtgctgaccacttagggaatgtacaaactcctaagcttctaaagggaggcatggcaaaaacgttggggtcaggatgtctctcacgctgctcatgttaatactattaacacatgatttgagaaataagttttctctaaaatgcatattttgccgccacacactgaacaatattatttccagtgaagtttgatgcctgttcttacgttgtgttcacctgttggttcaccactcagcagatctgattctgcaagaattaatggtagaactagatcatcctttctaacagacgagcctgtgtcctgtgacggcctttcacagcggaatgcagttgtacctcacattacttttgaaacttcactcgttccagttggtacaagtatttgccaaagccatttcctatgttcaccgtggcccctcctgatgtggctgtcagcgcagcgttgttgaacagggctattctttttacaaggtgtgaagtgtggctcttcgcttcgtctttgccatggcattaaaagaaagttccctgtcttctttcaatattagttatttcaaatgaatatgtgctacttaaaagcttgttttgtttctttgtatataatttgccttggatttattgtgcacagtttgttgagttgtatgtttttgtgaattatcaggagtaaatttgacaagtacatgtgaataacctcctgtaaatgaattttataacaaaaatgtactgaactattttttaaagttgtgcagattagcaattttttgctatagctttgacttttctatgctgtgaattaatagctgcgatttggcaaacagccctgttgtctttgttaaaccctaaattttaagaggaaatggcagaattaaaagcagaaacaagaagatggacatggattagaggttatgtattatgaagtaaactacaaggtactaacatca

SEQ ID NO: 446356 - DNA, 5682 bp, Homo sapiens
cgagaatggctcaactctccaaatagagagaatttctatcagttgcaagtacgaaaatttcctgccgattatataaaatactgggagtttgcagtttatctggaagaatgtgaactggctaaacagctttatccaaaggaaaacgatttggtgtttttagctcctgagagaataaatgaagagaagaaagatacagagagaaatgacatacaagatctccacgaatatcattctggttatgttcataaatttcgccgcacgtcagtcatgcgtaatgggaaaactgagtgttacctttccatccagactcaagagaactttccggccaatttaaacgaacttgtgaattgtattgtaatcagttctctggtaactacacaaaggaagttgaaagccatgtctctgttgggtagtcggaaccaactggctagagctgttctgaatccaaaccctatggacttctgtacaaaagatttactgactacaacatctgagagaattattgcgtacttaagagatttcaatgaagatcaaaagaaagcaatagaaactgcatatgctatggtgaaacactcaccatcagttgccaaaatctgcttgattcatggaccacctggaacaggaaaatcaaaaactattgttggcctcctctatcgtctactgacagagaaccagaggaaggggcattcagacgaaaactccaatgccaaaatcaaacaaaaccgtgtcctcgtgtgtgcaccttccaatgcagctgttgatgaactcatgaaaaaaattatccttgaattcaaagaaaaatgtaaagacaagaagaatcctttaggaaactgtggagatataaatttagtacgactgggtccagaaaagtctattaatagtgaggttctaaagttcagtttggacagccaagtaaaccacagaatgaaaaaagagttaccttctcatgttcaggcgatgcataaaagaaaggaatttctagattatcagctggatgagctttcccggcagcgagctctatgccgaggtggacgggaaatacagaggcaagaattagatgaaaacatttccaaagtttctaaggaaaggcaggaacttgcttctaaaattaaagaggttcaaggacgcccacagaaaacacagagtatcatcatcttagagtcccatatcatctgctgcacgttgagcacaagtggtggtttactacttgagtctgctttccgtgggcaagggggtgtccccttcagctgtgtcattgttgatgaggctggacagtcttgtgaaattgagactcttactccactcatccatcgctgcaataagctcatcctagtaggagatcctaagcagctccctccgacagtcatctctatgaaagcacaggagtatggctacgaccagtcaatgatggctcgcttctgcagactgctggaagagaatgtagaacacaacatgatcagcaggctgcccattctacagctcactgttcagtacaggatgcatccagacatatgcctcttcccttctaattatgtttataacagaaacttaaaaacaaatagacagacagaagccattcgatgttcatcagattggccatttcagccataccttgtgtttgatgttggagatggttcagaaagacgggataatgactcatatataaatgttcaagaaataaaactggtgatggaaataattaagcttattaaagacaaaagaaaggatgttagttttcgaaacattggcataataactcattacaaggcccagaagacgatgattcagaaggattcgaactctttgtccaaatccttctgaatcatcgtcttctgggcttgtaatgagttcgatagaaaaggaccagcagaagtagacactgtggatgcattccagggtcggcagaaggattgtgttattgttacgtgtgtcagagcaaatagcatccaaggttcaattggattcctggcaagtttgcagagattgaatgtcaccatcacacgagccaagtacagcctcttcatcctcggacatttgaggaccctgatgcaacttcttcctaggagcttttgtgtacacgtgaaccattcgccttttttcagcccagaacccaagtatctacactgggctctcaaggaaaaccagcattggaatcagctgattcaggatgctcagaagcgtggtgccattattaagacctgtgacaaaaactatagacatgatgcagtgaagattctgaaactcaagcctgtgctgcagagaagtctcactcaccctcctaccatagccccagaggggtccagaccccagggtggtttgcccagcagcaagctagacagtggatttgccaagacatctgttgctgcttctctataccacacaccctctgactccaaggaaattactcttactgttacttcaaaggaccctgaaagacctcctgttcatgaccaacttcaggacccacgactgctgaagaggatgggcattgaggtcaaaggaggaatattcctttgggatccacaaccctcgagcccccagcatcctggagcaacacctcctacgggcgagccgggcttccctgtcgttcaccaggacctgagccatatacagcagcccgctgctgtagtggctgctctgagcagccacaaacctcccgtgcggggcgaacctccagctgccagtcccgaggcttccacgtgtcagagcaaatgtgatgacccggaagaggagctctgtcacaggagagaggccagggctttcagtgaaggggagcaggagaagtgtggttccgagacccatcacaccaggaggaactctaggtgggacaagaggacactggagcaggaggacagcagttccaagaaaagaaagcttttataggaaagcccagtgacatgggccagcagccacagcatattgtaaactgaagatgaccagctcgtgggaccatctagataagcttgttttttgtaaggagtttgtgtgctgttggaaaacatggaaaatgcatccttaacacctgagcctctggtcatcttcagtattttctgtcatttgcaaaagctttcagagggcattgtgtatccgtaataatgtccttgaagtcagagactggaaatgttgatctcttagtcttctatagacaaggaggtcagactggagtgaatgttgtaaaagttgaaatgtatatttgtatagcaaataacaaaatccttttaaaatttaatctagtagaccgcttttctttccccctgtttaaaatgttaatcagttttcaacagaacaaactttatattaccaaaaaaaaaaagatgggaggagggcgggtcctttcaaccattgttagagcaagacagataattatttaacagcctagcttggaataagctgagttagtgctggtgggtcaggtgtctctggctctattaaaaaaagcaaaaacccccccaaaaacctggagtctcctaggggacactttgggcagcacggttatgttaggtaaagtcttgctgacatggtgcatttttagatagagtgcattggcccagggtattatatttctgtgatgagttcatttacctgtttcagtatgcacatagttccctagctaaaattcctaatcttcttgagagagaagaatatggagtgaaagaataattcttgagctatcattcaaatgctcccagcatattgtgagccttgtgtgactggtgaggtacagacatttggttgccaaatgctagattagcgctgggtcagctgtggaagaatcgcctcagcttacagattgtcagacagatctaactagttttccagaaagcctgggaagctgtgtgttcaacatttcccaagggattctgatcaccaggcagcttgggaaccactggggcaggccaaatagaatattttgggcgggaaagaagcacccgatttaaaatgaagcgtaaccagaggagttcagaactgggaagagagtggtagacttcctgtgatcttcagaaatcatctacctggtaaaaatacatgctgtttagaatatctgataggtgtttccagctactattagaggtgatagtgcttttgtgggggaaaaaattggtcatggtgaatggagatcgaggaagctcgggacaagggaggggtgggctgcctgattttgtccagttttccaaatatccacgcagtgaactggagtatcctaaacatgagaatgtacagttgacagttgtaaaaactagggatctgtagtgaatgctgtgcagccccatatctcatttgggggtaggaaaatagctgaagattcatgtgcattatttgacatttcctttgtcatctgctttttaagcaaaaaagggttttgtgttagaaattctacttgagcagattataaagagctttaaaaaacaactttcggttgccaaaagtttgagcatttgatttcattacctgtgtctccctcactggtgtccagacggtcaactgaatactcctgaaacccagggagcaggtgacttcctggagtgctttgtccccagagtcagccactgcttcctctgtgggggtggagagtttgtctttggccatgcagtgtgcgacagttcaggacgggtagggatgggtcccattctgtctgggtcaagggctctatcagcttcttccatgtgcctttgggaagaaatctcgttactttaagtttgctttcctgttatcttgatgaagtgcccattttagcagacacttgtagtgctgaccacttagggaatgtacaaactcctaagcttctaaagggaggcatggcaaaaacgttggggtcaggatgtctctcacgctgctcatgttaatactattaacacatgatttgagaaataagttttctctaaaatgcatattttgccgccacacactgaacaatattatttccagtgaagtttgatgcctgttcttacgttgtgttcacctgttggttcaccactcagcagatctgattctgcaagaattaatggtagaactagatcatcctttctaacagacgagcctgtgtcctgtgacggcctttcacagcggaatgcagttgtacctcacattacttttgaaacttcactcgttccagttggtacaagtatttgccaaagccatttcctatgttcaccgtggcccctcctgatgtggctgtcagcgcagcgttgttgaacagggctattctttttacaaggtgtgaagtgtggctcttcgcttcgtctttgccatggcattaaaagaaagttccctgtcttctttcaatattagttatttcaaatgaatatgtgctacttaaaagcttgttttgtttctttgtatataatttgccttggatttattgtgcacagtttgttgagttgtatgtttttgtgaattatcaggagtaaatttgacaagtacatgtgaataacctcctgtaaatgaattttataacaaaaatgtactgaactattttttaaagttgtgcagattagcaattttttgctatagctttgacttttctatgctgtgaattaatagctgcgatttggcaaacagccctgttgtctttgttaaaccctaaattttaagaggaaatggcagaattaaaagcagaaacaagaagatggacatggattagaggttatgtattatgaagtaaactacaaggtactaacatca

SEQ ID NO: 446357 - DNA, 3574 bp, Homo sapiens
attatttctcccttctcattgtttcaaggaaaaccagcattggaatcagctgattcaggatgctcagaagcgtggtgccattattaagacctgtgacaaaaactatagacatgatgcagtgaagattctgaaactcaagcctgtgctgcagagaagtctcactcaccctcctaccatagccccagaggggtccagaccccagggtggtttgcccagcagcaagctagacagtggatttgccaagacatctgttgctgcttctctataccacacaccctctgactccaaggaaattactcttactgttacttcaaaggaccctgaaagacctcctgttcatgaccaacttcaggacccacgactgctgaagaggatgggcattgaggtcaaaggaggaatattcctttgggatccacaaccctcgagcccccagcatcctggagcaacacctcctacgggcgagccgggcttccctgtcgttcaccaggacctgagccatatacagcagcccgctgctgtagtggctgctctgagcagccacaaacctcccgtgcggggcgaacctccagctgccagtcccgaggcttccacgtgtcagagcaaatgtgatgacccggaagaggagctctgtcacaggagagaggccagggctttcagtgaaggggagcaggagaagtgtggttccgagacccatcacaccaggaggaactctaggtgggacaagaggacactggagcaggaggacagcagttccaagaaaagaaagcttttataggaaagcccagtgacatgggccagcagccacagcatattgtaaactgaagatgaccagctcgtgggaccatctagataagcttgttttttgtaaggagtttgtgtgctgttggaaaacatggaaaatgcatccttaacacctgagcctctggtcatcttcagtattttctgtcatttgcaaaagctttcagagggcattgtgtatccgtaataatgtccttgaagtcagagactggaaatgttgatctcttagtcttctatagacaaggaggtcagactggagtgaatgttgtaaaagttgaaatgtatatttgtatagcaaataacaaaatccttttaaaatttaatctagtagaccgcttttctttccccctgtttaaaatgttaatcagttttcaacagaacaaactttatattaccaaaaaaaaaaagatgggaggagggcgggtcctttcaaccattgttagagcaagacagataattatttaacagcctagcttggaataagctgagttagtgctggtgggtcaggtgtctctggctctattaaaaaaagcaaaaacccccccaaaaacctggagtctcctaggggacactttgggcagcacggttatgttaggtaaagtcttgctgacatggtgcatttttagatagagtgcattggcccagggtattatatttctgtgatgagttcatttacctgtttcagtatgcacatagttccctagctaaaattcctaatcttcttgagagagaagaatatggagtgaaagaataattcttgagctatcattcaaatgctcccagcatattgtgagccttgtgtgactggtgaggtacagacatttggttgccaaatgctagattagcgctgggtcagctgtggaagaatcgcctcagcttacagattgtcagacagatctaactagttttccagaaagcctgggaagctgtgtgttcaacatttcccaagggattctgatcaccaggcagcttgggaaccactggggcaggccaaatagaatattttgggcgggaaagaagcacccgatttaaaatgaagcgtaaccagaggagttcagaactgggaagagagtggtagacttcctgtgatcttcagaaatcatctacctggtaaaaatacatgctgtttagaatatctgataggtgtttccagctactattagaggtgatagtgcttttgtgggggaaaaaattggtcatggtgaatggagatcgaggaagctcgggacaagggaggggtgggctgcctgattttgtccagttttccaaatatccacgcagtgaactggagtatcctaaacatgagaatgtacagttgacagttgtaaaaactagggatctgtagtgaatgctgtgcagccccatatctcatttgggggtaggaaaatagctgaagattcatgtgcattatttgacatttcctttgtcatctgctttttaagcaaaaaagggttttgtgttagaaattctacttgagcagattataaagagctttaaaaaacaactttcggttgccaaaagtttgagcatttgatttcattacctgtgtctccctcactggtgtccagacggtcaactgaatactcctgaaacccagggagcaggtgacttcctggagtgctttgtccccagagtcagccactgcttcctctgtgggggtggagagtttgtctttggccatgcagtgtgcgacagttcaggacgggtagggatgggtcccattctgtctgggtcaagggctctatcagcttcttccatgtgcctttgggaagaaatctcgttactttaagtttgctttcctgttatcttgatgaagtgcccattttagcagacacttgtagtgctgaccacttagggaatgtacaaactcctaagcttctaaagggaggcatggcaaaaacgttggggtcaggatgtctctcacgctgctcatgttaatactattaacacatgatttgagaaataagttttctctaaaatgcatattttgccgccacacactgaacaatattatttccagtgaagtttgatgcctgttcttacgttgtgttcacctgttggttcaccactcagcagatctgattctgcaagaattaatggtagaactagatcatcctttctaacagacgagcctgtgtcctgtgacggcctttcacagcggaatgcagttgtacctcacattacttttgaaacttcactcgttccagttggtacaagtatttgccaaagccatttcctatgttcaccgtggcccctcctgatgtggctgtcagcgcagcgttgttgaacagggctattctttttacaaggtgtgaagtgtggctcttcgcttcgtctttgccatggcattaaaagaaagttccctgtcttctttcaatattagttatttcaaatgaatatgtgctacttaaaagcttgttttgtttctttgtatataatttgccttggatttattgtgcacagtttgttgagttgtatgtttttgtgaattatcaggagtaaatttgacaagtacatgtgaataacctcctgtaaatgaattttataacaaaaatgtactgaactattttttaaagttgtgcagattagcaattttttgctatagctttgacttttctatgctgtgaattaatagctgcgatttggcaaacagccctgttgtctttgttaaaccctaaattttaagaggaaatggcagaattaaaagcagaaacaagaagatggacatggattagaggttatgtattatgaagtaaactacaaggtactaacatca

SEQ ID NO: 446358 - DNA, 2445 bp, Homo sapiens
cgagaatggctcaactctccaaatagagagaatttctatcagttgcaagtacgaaaatttcctgccgattatataaaatactgggagtttgcagtttatctggaagaatgtgaactggctaaacagctttatccaaaggaaaacgatttggtgtttttagctcctgagagaataaatgaagagaagaaagatacagagagaaatgacatacaagatctccacgaatatcattctggttatgttcataaatttcgccgcacgtcagtcatgcgtaatgggaaaactgagtgttacctttccatccagactcaagagaactttccggccaatttaaacgaacttgtgaattgtattgtaatcagttctctggtaactacacaaaggaagttgaaagccatgtctctgttgggtagtcggaaccaactggctagagctgttctgaatccaaaccctatggacttctgtacaaaagatttactgactacaacatctgagagaattattgcgtacttaagagatttcaatgaagatcaaaagaaagcaatagaaactgcatatgctatggtgaaacactcaccatcagttgccaaaatctgcttgattcatggaccacctggaacaggaaaatcaaaaactattgttggcctcctctatcgtctactgacagagaaccagaggaaggggcattcagacgaaaactccaatgccaaaatcaaacaaaaccgtgtcctcgtgtgtgcaccttccaatgcagctgttgatgaactcatgaaaaaaattatccttgaattcaaagaaaaatgtaaagacaagaagaatcctttaggaaactgtggagatataaatttagtacgactgggtccagaaaagtctattaatagtgaggttctaaagttcagtttggacagccaagtaaaccacagaatgaaaaaagagttaccttctcatgttcaggcgatgcataaaagaaaggaatttctagattatcagctggatgagctttcccggcagcgagctctatgccgaggtggacgggaaatacagaggcaagaattagatgaaaacatttccaaagtttctaaggaaaggcaggaacttgcttctaaaattaaagaggttcaaggacgcccacagaaaacacagagtatcatcatcttagagtcccatatcatctgctgcacgttgagcacaagtggtggtttactacttgagtctgctttccgtgggcaagggggtgtccccttcagctgtgtcattgttgatgaggctggacagtcttgtgaaattgagactcttactccactcatccatcgctgcaataagctcatcctagtaggagatcctaagcagctccctccgacagtcatctctatgaaagcacaggagtatggctacgaccagtcaatgatggctcgcttctgcagactgctggaagagaatgtagaacacaacatgatcagcaggctgcccattctacagctcactgttcagtacaggatgcatccagacatatgcctcttcccttctaattatgtttataacagaaacttaaaaacaaatagacagacagaagccattcgatgttcatcagattggccatttcagccataccttgtgtttgatgttggagatggttcagaaagacgggataatgactcatatataaatgttcaagaaataaaactggtgatggaaataattaagcttattaaagacaaaagaaaggatgttagttttcgaaacattggcataataactcattacaaggcccagaagacgatgattcagaaggatttggacaaagagttcgatagaaaaggaccagcagaagtagacactgtggatgcattccagggtcggcagaaggattgtgttattgttacgtgtgtcagagcaaatagcatccaaggttcaattggattcctggcaagtttgcagagattgaatgtcaccatcacacgagccaagtacagcctcttcatcctcggacatttgaggaccctgatgatgaggaaacaggctcagagaggtcaagtgacttgaccaaggtcacacagcaagtaaatactgtgcagcctcactgcttccctaacatacctttatgaacagtacaggagcccccatgagagggtagctatcctttttcttcttttctttcttctttctaaagagacccgaattctagtggttgtaaagcagcagcctcctctgaagaaactcgggaagagaggagaggtgcatgtgtttggcaactttcccgatgggatttaatatcttaagctcctgtaggaaacaggcagaaagtgagatgatatcttgagatctcggtggatgaagatgttttagccattcggggtttgggaggcctttagaaatccagtgaaagccttgggcctttttctagaatagtcacatgcactcagaagtttgctttctgaaaccaga

SEQ ID NO: 446359 - DNA, 1501 bp, Homo sapiens
cgagaatggctcaactctccaaatagagagaatttctatcagttgcaagtacgaaaatttcctgccgattatataaaatactgggagtttgcagtttatctggaagaatgtgaactggctaaacagctttatccaaaggaaaacgatttggtgtttttagctcctgagagaataaatgaagagaagaaagatacagagagaaatgacatacaagatctccacgaatatcattctggttatgttcataaatttcgccgcacgtcagtcatgcgtaatgggaaaactgagtgttacctttccatccagactcaagagaactttccggccaatttaaacgaacttgtgaattgtattgtaatcagttctctggtaactacacaaaggaagttgaaagccatgtctctgttgggtagtcggaaccaactggctagagctgttctgaatccaaaccctatggacttctgtacaaaagatttactgactacaacatctgagagaattattgcgtacttaagagatttcaatgaagatcaaaagaaagcaatagaaactgcatatgctatggtgaaacactcaccatcagttgccaaaatctgcttgattcatggaccacctggaacaggaaaatcaaaaactattgttggcctcctctatcgtctactgacagagaaccagaggaaggggcattcagacgaaaactccaatgccaaaatcaaacaaaaccgtgtcctcgtgtgtgcaccttccaatgcagctgttgatgaactcatgaaaaaaattatccttgaattcaaagaaaaatgtaaagacaagaagaatcctttaggaaactgtggagatataaatttagtacgactgggtccagaaaagtctattaatagtgaggttctaaagttcagtttggacagccaagtaaaccacagaatgaaaaaagagttaccttctcatgttcaggcgatgcataaaagaaaggaatttctagattatcagctggatgagctttcccggcagcgagctctatgccgaggtggacgggaaatacagaggcaagaattagatgaaaacatttccaaagtttctaaggaaaggcaggaacttgcttctaaaattaaagaggttcaaggacgcccacagaaaacacagagtatcatcatcttagagtcccatatcatctgctgcacgttgagcacaagtggtggtttactacttgagtctgctttccgtgggcaagggggtgtccccttcagctgtgtcattgttgatgaggctggacagtcttgtgaaattgagactcttactccactcatccatcgctgcaataagctcatcctagtaggagatcctaagcagctccctccgacagtcatctctatgttttaaccaagggaaaaagtaaggacaatgaatgaggactcgagttcgcaaactgcaggaagagatatgtagtacaccaatatgaacaagctggcagcccattggacagcttactgatcagtactgg

SEQ ID NO: 446360 - DNA, 2995 bp, Homo sapiens
cgcttccgggagagtccgcgtctcccgcaccttcctctctatcaaacgccgtctctgtggtagccggggccccgcccctcctcggactctacccagtactgaactaggggcagctgggctccagagtccctcgggtctcaggtcatggcggtcgcggggcccgcgcccggagctggcgccaggcccaggttagatctgcaatttctccagcggttcctgcagatactgaaggttttgtttccttcttggtcatcacaaaatgccttgatgttcctgacccttttgtgcctgaccctactggagcaatttgtgatctaccaggttggcttgatccccagtcagtactatggggtcctgggaaacaaagacttggaagggtttaagactctgacattcctggctgtcatgctcattgttctgaactccacgctgaagagctttgatcagttcacctgcaacctgctgtatgtgagctggaggaaggacctcactgagcaccttcaccgcctctacttccggggccgtgcgtactacaccctcaacgtgctgcgggatgacatcgataacccggaccagcgcatcagccaggacgtggagcgattctgccggcagctcagcagcatggccagcaagctcatcatctccccgttcaccctcgtctactacacttaccagtgcttccaaagcacaggctggctcgggcctgtgagcatcttcgggtatttcatcctggggaccgtggtgaacaaaactttgatgggccccattgtgatgaagctggtgcatcaggagaagctggagggagattttaggttcaagcacatgcagattcgggtgaatgcggagcctgctgctttctacagagctgggcatgtggagcacatgaggacagaccgcaggctgcagagactccttcagacccagagggagctgatgtccaaggagctctggctgtacatcggcatcaacacctttgactatctgggcagcatcctgagttacgttgtcatcgcaatccccattttcagcggggtctatggagacctgagtcccgcagagcttagcaccctggtcagcaagaatgcctttgtgtgcatctacctcatcagctgcttcacccagctcatcgacctgtccacgacgctctcagatgtggctggctacacgcacagaattgggcagcttcgggagacgcttctggacatgtccctgaagtcacaggactgcgagatcctgggcgagagcgagtggggcttggacacacccccagggtggccagcggcagagccagcagacacagcatttctccttgagcgggtctccatctctgccccctcctctgacaaacccctaatcaaggatctgagcctaaagatctccgagggacagagcctgctcatcacaggcaacacgggcactggcaagacctccttgctccgggttctgggtggcctctggacgagtacacggggctcagtgcagatgctgacggactttgggccccatggggtgctattcctgccacaaaagccattcttcactgacgggacccttcgggagcaggtgatatatcccctgaaggaggtctaccccgactcaggttctgccgatgatgagaggatcttgaggttcttggaattggcaggcctgtccaacttggtggcaaggacagagggcctggaccagcaggtggactggaactggtatgatgttctgtccccgggggagatgcaacggctctcctttgcccgactcttctacctgcagccgaagtacgcagtgcttgatgaagccaccagtgccctgacagaggaagtggagagcgagctctatcgcatcggccagcagctggggatgacgttcatcagtgtgggacatcggcagagccttgagaagtttcattccttggttctgaaactctgtggaggaggaagatgggagctgatgagaatcaaagtggaatgaagctctggcttttggaaggagagccacactgtggcgggtcggcggccctcaggagagaccaggaggactgacagcgaagatcgagctcaggttcgccacatagatcccgtgcaggagccacatgggtcctgtgcaggacccctagcagtggtgggctgagcccaggtctaggtttctgtgggggacactgaatctcccagtgttcagtctcccaggactctgctgcctcagccagagcctccatatgcttgaagtgctgattacctacaaatgatttcagatcatgtttgctaaagagaaatctggaagtgtgagatctgtaagaaatgaaagaaatgactcttggagtcaagagatctggaaatcttttaatcagttaaattgtgcagcaatagatttttaactttaactgaccatttaagttttttaataagttttttacaaagaaaagttaaacattaaaaagaattacagctttctgtcttctctatcatggaatgattttttttattgaatctccagatttgtatttgacagcttggtgggaagggaagcacactctgctgttctggaatcttatgcccagggtttttcacttctccccacatctccctttccacttgccagtgttgtgtagttagaacctgaaccactaacttctaggggcctttggtctgccctaccttaacccaaatgaaagtaaatccctttccccttagccaaaataaggttgggttttctaaaaaaatagtctatattagggaacaacaacagcaaattagacaaaacccagaaagcacaaagcatgaggtggagttactgtgcccaaagtcctcactcagaccagtgcccctccagttcagttgtctatgtattaccttccttaccttcataatgtttgccaggcttctgtacttctagtacttgagttacttaatatttttaaaaacaaaccttttaagtttaaatggatttttaagtgaaattttacacttaacatagatggaaagtaactaaaaataaatacaag

SEQ ID NO: 446361 - DNA, 3166 bp, Homo sapiens
cgcttccgggagagtccgcgtctcccgcaccttcctctctatcaaacgccgtctctgtggtagccggggccccgcccctcctcggactctacccagtactgaactaggggcagctgggctccagagtccctcgggtctcaggtcatggcggtcgcggggcccgcgcccggagctggcgccaggcccaggttagatctgcaatttctccagcggttcctgcagatactgaaggttttgtttccttcttggtcatcacaaaatgccttgatgttcctgacccttttgtgcctgaccctactggagcaatttgtgatctaccaggttggcttgatccccagtcagtactatggggtcctgggaaacaaagacttggaagggtttaagactctgacattcctggctgtcatgctcattgttctgaactccacgctgaagagctttgatcagttcacctgcaacctgctgtatgtgagctggaggaaggacctcactgagcaccttcaccgcctctacttccggggccgtgcgtactacaccctcaacgtgctgcgggatgacatcgataacccggaccagcgcatcagccaggacgtggagcgattctgccggcagctcagcagcatggccagcaagctcatcatctccccgttcaccctcgtctactacacttaccagtgcttccaaagcacaggctggctcgggcctgtgagcatcttcgggtatttcatcctggggaccgtggtgaacaaaactttgatgggccccattgtgatgaagctggtgcatcaggagaagctggagggagattttaggttcaagcacatgcagattcgggtgaatgcggagcctgctgctttctacagagctgggcatgtggagcacatgaggacagaccgcaggctgcagagactccttcagacccagagggagctgatgtccaaggagctctggctgtacatcggcatcaacacctttgactatctgggcagcatcctgagttacgttgtcatcgcaatccccattttcagcggggtctatggagacctgagtcccgcagagcttagcaccctggtcagcaagaatgcctttgtgtgcatctacctcatcagctgcttcacccagctcatcgacctgtccacgacgctctcagatgtggctggctacacgcacagaattgggcagcttcgggagacgcttctggacatgtccctgaagtcacaggactgcgagatcctgggcgagagcgagtggggcttggacacacccccagggtggccagcggcagagccagcagacacagcatttctccttgagcgggtctccatctctgccccctcctctgacaaacccctaatcaaggatctgagcctaaagatctccgagggacagagcctgctcatcacaggcaacacgggcactggcaagacctccttgctccgggttctgggtggcctctggacgagtacacggggctcagtgcagatgctgacggactttgggccccatggggtgctattcctgccacaaaagccattcttcactgacgggacccttcgggagcaggtgatatatcccctgaaggaggtctaccccgactcaggttctgccgatgatgagaggatcttgaggttcttggaattggcaggcctgtccaacttggtggcaaggacagagggcctggaccagcaggtggactggaactggtatgatgttctgtccccgggggagatgcaacggctctcctttgcccgactcttctacctgcagccgaagtacgcagtgcttgatgaagccaccagtgccctgacagaggaagtggagagcgagctctatcgcatcggccagcagctggggatgacgttcatcagtgtgggacatcggcagagccttgagaaggtacccgtgctcacaaggatggcctgaggaggagaaagaacccaaaggctcagcctggccagggccagaggcccctcaaaacggggagtagcagtagcagagagaaccgagtggcctcctctgccggcggccagggcagcctgatctccatgtggtggtggtctcttgtagtttcattccttggttctgaaactctgtggaggaggaagatgggagctgatgagaatcaaagtggaatgaagctctggcttttggaaggagagccacactgtggcgggtcggcggccctcaggagagaccaggaggactgacagcgaagatcgagctcaggttcgccacatagatcccgtgcaggagccacatgggtcctgtgcaggacccctagcagtggtgggctgagcccaggtctaggtttctgtgggggacactgaatctcccagtgttcagtctcccaggactctgctgcctcagccagagcctccatatgcttgaagtgctgattacctacaaatgatttcagatcatgtttgctaaagagaaatctggaagtgtgagatctgtaagaaatgaaagaaatgactcttggagtcaagagatctggaaatcttttaatcagttaaattgtgcagcaatagatttttaactttaactgaccatttaagttttttaataagttttttacaaagaaaagttaaacattaaaaagaattacagctttctgtcttctctatcatggaatgattttttttattgaatctccagatttgtatttgacagcttggtgggaagggaagcacactctgctgttctggaatcttatgcccagggtttttcacttctccccacatctccctttccacttgccagtgttgtgtagttagaacctgaaccactaacttctaggggcctttggtctgccctaccttaacccaaatgaaagtaaatccctttccccttagccaaaataaggttgggttttctaaaaaaatagtctatattagggaacaacaacagcaaattagacaaaacccagaaagcacaaagcatgaggtggagttactgtgcccaaagtcctcactcagaccagtgcccctccagttcagttgtctatgtattaccttccttaccttcataatgtttgccaggcttctgtacttctagtacttgagttacttaatatttttaaaaacaaaccttttaagtttaaatggatttttaagtgaaattttacacttaacatagatggaaagtaactaaaaataaatacaag

SEQ ID NO: 446362 - DNA, 1952 bp, Homo sapiens
cactttgttggttggggtacctctcagctcaagcttagctttggtgcaaagatgcgtgggaggctgctgctgctgcctaacttctaggcctctttctgatggctatggcttccatcctgcctctgccccctgagtagctgggactacaggtgtgcctcacagcctggagctttcacagccagataactaaaggggccaggctagggcttatataagagaaatttgggaggattgagataaaggggatagtcttcttgatcatccaaaacagctcatctaccttcaagtttttctttggctctgctcagagctggctcaggcccctgggtactggacctttcagttcccactttttcaggggattaactaaggcaccgtaagatgcaactctctagaaccctgtttaaaggccctgggatttagttgcccctaggaaaccagccttgtctggttccctcttcccatagggtcagtgttcacagcactgtgaggcaaggtcaagagcagaggtgatgtgaaagtttcttgttctctctacctttgggcccatctccctgggtccagctactctgtgtcattggctccagggaccagcgcatcagccaggacgtggagcgattctgccggcagctcagcagcatggccagcaagctcatcatctccccgttcaccctcgtctactacacttaccagtgcttccaaagcacaggctggctcgggcctgtgagcatcttcgggtatttcatcctggggaccgtggtgaacaaaactttgatgggccccattgtgatgaagctggtgcatcaggagaagctggagggagattttaggttcaagcacatgcagattcgggtgaatgcggagcctgctgctttctacaggtgagtctggagagatggttccccttctgccttgccagagctgagagtggagaaggacaagatgaatcctcaaacctcccaccaccaccgagctcaggggctgagtgttgtcacacttggctgtgaccctctccctctacctccccctgcccttgcctgcctcatccttaggtccaggggtttgcttctgaagcttggtggttcctttactgggccagctttagtcttagtggctagcgtggggcctgaaattgtcaaatgaatgaatgcctcatcctcttgctggtgactgtaagacatccgtctgcctctgctcttctgtctgttaagaagctttcttgccagtgcctgaggttcaagcctgatcctttgtctccgtagcgtgggatggaatgggagcttctcagaaaaccaggagacctgctccccacaatgctgtctaatggagccaagcgtctggtctcctgacggcagcagcaggagcagcagcagcggcatgaaatcccatcccttccctccagggccagaaccggtccctgtgctctgccttatgtgaggcctctgaaatcagcgttaggattgatagtgcaggcagaggtttgcgtttaagaagtggaagctactccttggctctgtacttggggtggatgtgatagccctgggacctttgctcctcagtctctgctgcagtttgcaacctccaccacttgagggcaccaagaatactgggaatctgcgctggggtggggttgtgaggtgggcagggctgggtgtgtaaaaaagttgcttttggaggccgggcatggtggctcatgcctgtaatcccagcactttgggaggccgaggcgggtggattgcctgaggtcaagagttcgagaccagccatggccaacatggtgaaaccctgtctctactaaaaatacaaaaaattagctgagcatggtggcgggcacctgtaatcccagctactggggaggctgaggcaggagaatcacttgaatccgggaggcagaggttgcagtaaggcaagatcctgccattgcactccagcctgggtgacagagcaagact

SEQ ID NO: 446363 - DNA, 1242 bp, Homo sapiens
cttcagaagctcatctactctcaaaataagacagtgtagaaagagggtcttgcctctggtaagccctttaatatttggtgaaggaggctgggtacagtggctcacgcctgtaatcccagcactttgagaggccgaggcgggcggatcacctgaggtcgggagttccagaccagcctgaccaagatggagaaaccccgtctctactaaaaatacaaaattagctgggcgtggtggtgcatgcctgtaatcccagctactcgggaggctgaggcaggagaatcgcttgaaactgggaggcggaggttgtggtgagccaagatcgcgccattgcactccagcctgggcaacaagagtaaaactccatctcagagaaaaaaaatttggtgaaggaatgaacacgtgagtgagtgaggaagggaaagtcccatgactcgatgatttaaaaaagaaaagtgctgagtggacggagtaatcagagtcagagtgggctgggatgggtcagcggaggctcttgcgagccttgagctttgagctgagattttcaggaagccatctctcccttccccttgcttcccccactgcacagctgaagagctttgatcagttcacctgcaacctgctgtatgtgagctggaggaaggacctcactgagcaccttcaccgcctctacttccggggccgtgcgtactacaccctcaacgtgctgcgggatgacatcgataacccgtaggcgccccaactcagtcctttctacactctgtgtggtcctttccttctggcctagccctggagactgctggtggcagacaccaaggagatcatctgcagtcgttttcaaatgctgctgcccagagtcatgggggagggtgccctgcagaggactcctggagaagctgcagggctgtgaataggcagctaaaaagaagaagcctgcccaggtgcagtggcatgcacctgtagtcccaacaactcaggaggctgaggcaggaggatcacttgagcccaggagtagtgcaccgtgagcacacttgggaatagccactgtactctagcctgggcaacatagcagaaacccccatctcttaaaaaaaagaaaaatgttaggagcagctttcttttgtccttttcatactttatatcttagtcttccagtaagaagactaaggggtttctttagagggttctaaagaaaatgtccttgctagaaaaaccagctcttagattttcatcagtaaaaaaaat

SEQ ID NO: 446364 - DNA, 1346 bp, Homo sapiens
caggaatctgcagtgtcctccccttcctgtgcttcctcctcccgctgattcctctccctgcccctttccttggggcatgtctgtctttgttcccccacctcactcagccccagagatgtctgtatccgtgtgtctgcgtggatctgtaatatttctgtgcattcaggatttgcttgatctccacactttccttgggcagattacctaactgttctgtttcttcatgtctgaaaaggaggtcataatgaacttccttcacttgttgtagggattagatatcatcatccatggaaagtgcttggacagtggccacatcataagctttcaaaaatcagtctgaattccagggcctacactcaacttgcttttcttaggagctaataccttaactgttgcttctgttccaaatgaaagcttcatgcaaccatgagtgcagaggctgggcatgaaggagggtctgtaggaaactggaattgctgttctgtggggagccaggcatccatgcagaggcagaaactccagaaccatttagctttaaccactcccattcttgttattagtactctggtcacactgtgatgccatgaagacccaccagcattagaatttgttgaataccgctctgcaacctgggcagttacttagccacctgattcttagtgtcctcatctgtgatgatatttgagactcatgggcattagactgagtaagatcagtcccataaggggctttgtccagccaggcagagagtagaagttccacccctacccctgtattaatgtgctcaggctgccatgacagaaaaccacaaaccggctggcttaaacaatagaaattaatttcctcacaattctggatgcttatggtccacgatcaagttgtcagcagggttggtttcttaggccactccttggcttgtagatggccaccttgttgctgtgtcctcacgtggcctttcctttatatgtgcgtgcccctgccacctctatcttaagaggacaccagtcatattggattagggtcccaccccaacaacttcatgttaacatcatctctttaaagaccctgcctccagctgggcacggaagctcacgtctataatcccaccactttgggaggctgaggtgggcagatcacctgaggtcacaagttcgagaccagactggccaacatagtgaaaccctgtctctactaaaaatatgggcacggtggtgggcacctgtaatccagctactcaggaggctgggacaggaaaatcgcttgaacccaggaggcggaggttgcagtgagctgagatagctccactgcactcaagcctgggtgacagcaagactttctctcaaaaa

SEQ ID NO: 446365 - DNA, 2855 bp, Homo sapiens
cgcttccgggagagtccgcgtctcccgcaccttcctctctatcaaacgccgtctctgtggtagccggggccccgcccctcctcggactctacccagtactgaactaggggcagctgggctccagagtccctcgggtctcaggtcatggcggtcgcggggcccgcgcccggagctggcgccaggcccaggttagatctgcaatttctccagcggttcctgcagatactgaaggttttgtttccttcttggtcatcacaaaatgccttgatgttcctgacccttttgtgcctgaccctactggagcaatttgtgatctaccaggttggcttgatccccagtcagtactatggggtcctgggaaacaaagacttggaagggtttaagactctgacattcctggctgtcatgctcattgttctgaactccacgggaccagcgcatcagccaggacgtggagcgattctgccggcagctcagcagcatggccagcaagctcatcatctccccgttcaccctcgtctactacacttaccagtgcttccaaagcacaggctggctcgggcctgtgagcatcttcgggtatttcatcctggggaccgtggtgaacaaaactttgatgggccccattgtgatgaagctggtgcatcaggagaagctggagggagattttaggttcaagcacatgcagattcgggtgaatgcggagcctgctgctttctacagagctgggcatgtggagcacatgaggacagaccgcaggctgcagagactccttcagacccagagggagctgatgtccaaggagctctggctgtacatcggcatcaacacctttgactatctgggcagcatcctgagttacgttgtcatcgcaatccccattttcagcggggtctatggagacctgagtcccgcagagcttagcaccctggtcagcaagaatgcctttgtgtgcatctacctcatcagctgcttcacccagctcatcgacctgtccacgacgctctcagatgtggctggctacacgcacagaattgggcagcttcgggagacgcttctggacatgtccctgaagtcacaggactgcgagatcctgggcgagagcgagtggggcttggacacacccccagggtggccagcggcagagccagcagacacagcatttctccttgagcgggtctccatctctgccccctcctctgacaaacccctaatcaaggatctgagcctaaagatctccgagggacagagcctgctcatcacaggcaacacgggcactggcaagacctccttgctccgggttctgggtggcctctggacgagtacacggggctcagtgcagatgctgacggactttgggccccatggggtgctattcctgccacaaaagccattcttcactgacgggacccttcgggagcaggtgatatatcccctgaaggaggtctaccccgactcaggttctgccgatgatgagaggatcttgaggttcttggaattggcaggcctgtccaacttggtggcaaggacagagggcctggaccagcaggtggactggaactggtatgatgttctgtccccgggggagatgcaacggctctcctttgcccgactcttctacctgcagccgaagtacgcagtgcttgatgaagccaccagtgccctgacagaggaagtggagagcgagctctatcgcatcggccagcagctggggatgacgttcatcagtgtgggacatcggcagagccttgagaagtttcattccttggttctgaaactctgtggaggaggaagatgggagctgatgagaatcaaagtggaatgaagctctggcttttggaaggagagccacactgtggcgggtcggcggccctcaggagagaccaggaggactgacagcgaagatcgagctcaggttcgccacatagatcccgtgcaggagccacatgggtcctgtgcaggacccctagcagtggtgggctgagcccaggtctaggtttctgtgggggacactgaatctcccagtgttcagtctcccaggactctgctgcctcagccagagcctccatatgcttgaagtgctgattacctacaaatgatttcagatcatgtttgctaaagagaaatctggaagtgtgagatctgtaagaaatgaaagaaatgactcttggagtcaagagatctggaaatcttttaatcagttaaattgtgcagcaatagatttttaactttaactgaccatttaagttttttaataagttttttacaaagaaaagttaaacattaaaaagaattacagctttctgtcttctctatcatggaatgattttttttattgaatctccagatttgtatttgacagcttggtgggaagggaagcacactctgctgttctggaatcttatgcccagggtttttcacttctccccacatctccctttccacttgccagtgttgtgtagttagaacctgaaccactaacttctaggggcctttggtctgccctaccttaacccaaatgaaagtaaatccctttccccttagccaaaataaggttgggttttctaaaaaaatagtctatattagggaacaacaacagcaaattagacaaaacccagaaagcacaaagcatgaggtggagttactgtgcccaaagtcctcactcagaccagtgcccctccagttcagttgtctatgtattaccttccttaccttcataatgtttgccaggcttctgtacttctagtacttgagttacttaatatttttaaaaacaaaccttttaagtttaaatggatttttaagtgaaattttacacttaacatagatggaaagtaactaaaaataaatacaag

SEQ ID NO: 446366 - DNA, 4431 bp, Homo sapiens
  misc_feature (1980)..(1980): n is a, c, g, or t
  misc_feature (1987)..(1987): n is a, c, g, or t
  misc_feature (1999)..(1999): n is a, c, g, or t
  misc_feature (2003)..(2003): n is a, c, g, or t
cgcttccgggagagtccgcgtctcccgcaccttcctctctatcaaacgccgtctctgtggtagccggggccccgcccctcctcggactctacccagtactgaactaggggcagctgggctccagagtccctcgggtctcaggtcatggcggtcgcggggcccgcgcccggagctggcgccaggcccaggttagatctgcaatttctccagcggttcctgcagatactgaaggttttgtttccttcttggtcatcacaaaatgccttgatgttcctgacccttttgtgcctgaccctactggagcaatttgtgatctaccaggttggcttgatccccagtcagtactatggggtcctgggaaacaaagacttggaagggtttaagactctgacattcctggctgtcatgctcattgttctgaactccacgctgaagagctttgatcagttcacctgcaacctgctgtatgtgagctggaggaaggacctcactgagcaccttcaccgcctctacttccggggccgtgcgtactacaccctcaacgtgctgcgggatgacatcgataacccggaccagcgcatcagccaggacgtggagcgattctgccggcagctcagcagcatggccagcaagctcatcatctccccgttcaccctcgtctactacacttaccagtgcttccaaagcacaggctggctcgggcctgtgagcatcttcgggtatttcatcctggggaccgtggtgaacaaaactttgatgggccccattgtgatgaagctggtgcatcaggagaagctggagggagattttaggttcaagcacatgcagattcgggtgaatgcggagcctgctgctttctacagagctgggcatgtggagcacatgaggacagaccgcaggctgcagagactccttcagacccagagggagctgatgtccaaggagctctggctgtacatcggcatcaacacctttgactatctgggcagcatcctgagttacgttgtcatcgcaatccccattttcagcggggtctatggagacctgagtcccgcagagcttagcaccctggtcagcaagaatgcctttgtgtgcatctacctcatcagctgcttcacccagctcatcgacctgtccacgacgctctcagatgtggctggctacacgcacagaattgggcagcttcgggagacgcttctggacatgtccctgaagtcacaggactgcgagatcctgggcgagagcgagtggggcttggacacacccccagggtggccagcggcagagccagcagacacagcatttctccttgagcgggtctccatctctgccccctcctctgacaaacccctaatcaaggatctgagcctaaagatctccgagggacagagcctgctcatcacaggcaacacgggcactggcaagacctccttgctccgggttctgggtggcctctggacgagtacacggggctcagtgcagatgctgacggactttgggccccatggggtgctattcctgccacaaaagccattcttcactgacgggacccttcgggagcagggtcagtctagttcagggggctcactcctccctcctcaaccccgcccacccacagctgggacctctggcactgtgacaagtctcaggtcctagagtcagggcaaaaggtgaggtggtgaagtggcccgggcctgggaactgctggctctaagaaccttctattcacatccatggattgggcccactactcatagcagctcctgaggcaggtaaatggggcaaggactcacgccaaataccacacgcgtatgtcaaacacccaaggtcggattctggggcccctgccctcaggaggctgtcagactgttccccctaaacacacttctgaaggttgtagggaccttgccctgctgtctgccggccagagcctctcccatctgacccaggccaggcgttcccacctctcctccttgggangttccantgggttctggangganggtgggctgtgtgcactccgtcttttgctcgccctcctaggttggtgtggtttttttcttttctcaggtgatatatcccctgaaggaggtctaccccgactcaggttctgccgatgatgagaggatcttgaggttcttggaattggcaggcctggtaagtggggagagggaccctcaggacccgagcccacctgggagcaccagctacaggtaggcaggtgctggccctgctatgctgggcccaggactggaagtctgaacctggggtggagaatgggagtatcagttgacagtgtgtgctgttggccaggtttaggcacgaagggggtagtgctctcattggagaattttaagacaagaataggattgatgaaggcggtttgctttttactgtcatcatgctccagcaagtctaaacagtgtcattggtagaatattcctctctgcctggggcagactgtcccacagtcccccgccttggtatgccactggggcatatatttgtcttagaggtgtgtgtgtatgctggggagtgagggaggttccccatgatggcaggtagcagggctggccatttcatggacatcctgccctctgggtctgttacagtccaacttggtggcaaggacagagggcctggaccagcaggtggactggaactggtaagaaaagagcttgggtgctccagagatagccccaccataaagacagtgggtttcagggtccctgtcaaggaatggaacggctcctgaccccaaagtccagatgtttggctggtcagtcgggtgcaagtttatgcccttgggaacagagttttgcctcactctgtgagggctgtaggcctatggtcgaaagggaaggggcttctgtctcctggggctcacctctgtgcagagaaacctcttcctacccagaccattctaggtaaaagccaagctatattcttcctcctctagcagtcctctctcctacctttcctcaggtatgatgttctgtccccgggggagatgcaacggctctcctttgcccgactcttctacctgcagccgaagtacgcagtgcttgatgaagccaccagtgccctgacagaggaagtggagagcgagctctatcgcatcggccagcagctggggatgacgttcatcagtgtgggacatcggcagagccttgagaagtttcattccttggttctgaaactctgtggaggaggaagatgggagctgatgagaatcaaagtggaatgaagctctggcttttggaaggagagccacactgtggcgggtcggcggccctcaggagagaccaggaggactgacagcgaagatcgagctcaggttcgccacatagatcccgtgcaggagccacatgggtcctgtgcaggacccctagcagtggtgggctgagcccaggtctaggtttctgtgggggacactgaatctcccagtgttcagtctcccaggactctgctgcctcagccagagcctccatatgcttgaagtgctgattacctacaaatgatttcagatcatgtttgctaaagagaaatctggaagtgtgagatctgtaagaaatgaaagaaatgactcttggagtcaagagatctggaaatcttttaatcagttaaattgtgcagcaatagatttttaactttaactgaccatttaagttttttaataagttttttacaaagaaaagttaaacattaaaaagaattacagctttctgtcttctctatcatggaatgattttttttattgaatctccagatttgtatttgacagcttggtgggaagggaagcacactctgctgttctggaatcttatgcccagggtttttcacttctccccacatctccctttccacttgccagtgttgtgtagttagaacctgaaccactaacttctaggggcctttggtctgccctaccttaacccaaatgaaagtaaatccctttccccttagccaaaataaggttgggttttctaaaaaaatagtctatattagggaacaacaacagcaaattagacaaaacccagaaagcacaaagcatgaggtggagttactgtgcccaaagtcctcactcagaccagtgcccctccagttcagttgtctatgtattaccttccttaccttcataatgtttgccaggcttctgtacttctagtacttgagttacttaatatttttaaaaacaaaccttttaagtttaaatggatttttaagtgaaattttacacttaacatagatggaaagtaactaaaaataaatacaagaaaaaccatcggtgttattaacttacggctagatgctgttgcctgcatagactctgggcctgaggcttgttcattttgtaaaaaagagaggtgaggagttagacggactggcactcaactgagatttttctccttaataaaatcagaaagatgg

SEQ ID NO: 446367 - DNA, 3167 bp, Homo sapiens
cactttgttggttggggtacctctcagctcaagcttagctttggtgcaaagatgcgtgggaggctgctgctgctgcctaacttctaggcctctttctgatggctatggcttccatcctgcctctgccccctgagtagctgggactacaggtgtgcctcacagcctggagctttcacagccagataactaaaggggccaggctagggcttatataagagaaatttgggaggattgagataaaggggatagtcttcttgatcatccaaaacagctcatctaccttcaagtttttctttggctctgctcagagctggctcaggcccctgggtactggacctttcagttcccactttttcaggggattaactaaggcaccgtaagatgcaactctctagaaccctgtttaaaggccctgggatttagttgcccctaggaaaccagccttgtctggttccctcttcccatagggtcagtgttcacagcactgtgaggcaaggtcaagagcagaggtgatgtgaaagtttcttgttctctctacctttgggcccatctccctgggtccagctactctgtgtcattggctccagggaccagcgcatcagccaggacgtggagcgattctgccggcagctcagcagcatggccagcaagctcatcatctccccgttcaccctcgtctactacacttaccagtgcttccaaagcacaggctggctcgggcctgtgagcatcttcgggtatttcatcctggggaccgtggtgaacaaaactttgatgggccccattgtgatgaagctggtgcatcaggagaagctggagggagattttaggttcaagcacatgcagattcgggtgaatgcggagcctgctgctttctacagagctgggcatgtggagcacatgaggacagaccgcaggctgcagagactccttcagacccagagggagctgatgtccaaggagctctggctgtacatcggcatcaacacctttgactatctgggcagcatcctgagttacgttgtcatcgcaatccccattttcagcggggtctatggagacctgagtcccgcagagcttagcaccctggtcagcaagaatgcctttgtgtgcatctacctcatcagctgcttcacccagctcatcgacctgtccacgacgctctcagatgtggctggctacacgcacagaattgggcagcttcgggagacgcttctggacatgtccctgaagtcacaggactgcgagatcctgggcgagagcgagtggggcttggacacacccccagggtggccagcggcagagccagcagacacagcatttctccttgagcgggtctccatctctgccccctcctctgacaaacccctaatcaaggatctgagcctaaagatctccgagggacagagcctgctcatcacaggcaacacgggcactggcaagacctccttgctccgggttctgggtggcctctggacgagtacacggggctcagtgcagatgctgacggactttgggccccatggggtgctattcctgccacaaaagccattcttcactgacgggacccttcgggagcaggtgatatatcccctgaaggaggtctaccccgactcaggttctgccgatgatgagaggatcttgaggttcttggaattggcaggcctgtccaacttggtggcaaggacagagggcctggaccagcaggtggactggaactggtatgatgttctgtccccgggggagatgcaacggctctcctttgcccgactcttctacctgcagccgaagtacgcagtgcttgatgaagccaccagtgccctgacagaggaagtggagagcgagctctatcgcatcggccagcagctggggatgacgttcatcagtgtgggacatcggcagagccttgagaagtttcattccttggttctgaaactctgtggaggaggaagatgggagctgatgagaatcaaagtggaatgaagctctggcttttggaaggagagccacactgtggcgggtcggcggccctcaggagagaccaggaggactgacagcgaagatcgagctcaggttcgccacatagatcccgtgcaggagccacatgggtcctgtgcaggacccctagcagtggtgggctgagcccaggtctaggtttctgtgggggacactgaatctcccagtgttcagtctcccaggactctgctgcctcagccagagcctccatatgcttgaagtgctgattacctacaaatgatttcagatcatgtttgctaaagagaaatctggaagtgtgagatctgtaagaaatgaaagaaatgactcttggagtcaagagatctggaaatcttttaatcagttaaattgtgcagcaatagatttttaactttaactgaccatttaagttttttaataagttttttacaaagaaaagttaaacattaaaaagaattacagctttctgtcttctctatcatggaatgattttttttattgaatctccagatttgtatttgacagcttggtgggaagggaagcacactctgctgttctggaatcttatgcccagggtttttcacttctccccacatctccctttccacttgccagtgttgtgtagttagaacctgaaccactaacttctaggggcctttggtctgccctaccttaacccaaatgaaagtaaatccctttccccttagccaaaataaggttgggttttctaaaaaaatagtctatattagggaacaacaacagcaaattagacaaaacccagaaagcacaaagcatgaggtggagttactgtgcccaaagtcctcactcagaccagtgcccctccagttcagttgtctatgtattaccttccttaccttcataatgtttgccaggcttctgtacttctagtacttgagttacttaatatttttaaaaacaaaccttttaagtttaaatggatttttaagtgaaattttacacttaacatagatggaaagtaactaaaaataaatacaagaaaaaccatcggtgttattaacttacggctagatgctgttgcctgcatagactctgggcctgaggcttgttcattttgtaaaaaagagaggtgaggagttagacggactggcactcaactgagatttttctccttaataaaatcagaaagatgg

SEQ ID NO: 446368 - DNA, 3057 bp, Homo sapiens
cgcttccgggagagtccgcgtctcccgcaccttcctctctatcaaacgccgtctctgtggtagccggggccccgcccctcctcggactctacccagtactgaactaggggcagctgggctccagagtccctcgggtctcaggtcatggcggtcgcggggcccgcgcccggagctggcgccaggcccaggttagatctgcaatttctccagcggttcctgcagatactgaaggttttgtttccttcttggtcatcacaaaatgccttgatgttcctgacccttttgtgcctgaccctactggagcaatttgtgatctaccaggttggcttgatccccagtcagtactatggggtcctgggaaacaaagacttggaagggtttaagactctgacattcctggctgtcatgctcattgttctgaactccacgctgaagagctttgatcagttcacctgcaacctgctgtatgtgagctggaggaaggacctcactgagcaccttcaccgcctctacttccggggccgtgcgtactacaccctcaacgtgctgcgggatgacatcgataacccggaccagcgcatcagccaggacgtggagcgattctgccggcagctcagcagcatggccagcaagctcatcatctccccgttcaccctcgtctactacacttaccagtgcttccaaagcacaggctggctcgggcctgtgagcatcttcgggtatttcatcctggggaccgtggtgaacaaaactttgatgggccccattgtgatgaagctggtgcatcaggagaagctggagggagattttaggttcaagcacatgcagattcgggtgaatgcggagcctgctgctttctacagagctgggcatgtggagcacatgaggacagaccgcaggctgcagagactccttcagacccagagggagctgatgtccaaggagctctggctgtacatcggcatcaacacctttgactatctgggcagcatcctgagttacgttgtcatcgcaatccccattttcagcggggtctatggagacctgagtcccgcagagcttagcaccctggtcagcaagaatgcctttgtgtgcatctacctcatcagctgcttcacccagctcatcgacctgtccacgacgctctcagatgtggctggctacacgcacagaattgggcagcttcgggagacgcttctggacatgtccctgaagtcacaggactgcgagatcctgggcgagagcgagtggggcttggacacacccccagggtggccagcggcagagccagcagacacagcatttctccttgagcgggtctccatctctgccccctcctctgacaaacccctaatcaaggatctgagcctaaagatctccgagggacagagcctgctcatcacaggcaacacgggcactggcaagacctccttgctccgggttctgggtggcctctggacgagtacacggggtgatatatcccctgaaggaggtctaccccgactcaggttctgccgatgatgagaggatcttgaggttcttggaattggcaggcctgtccaacttggtggcaaggacagagggcctggaccagcaggtggactggaactggtatgatgttctgtccccgggggagatgcaacggctctcctttgcccgactcttctacctgcagccgaagtacgcagtgcttgatgaagccaccagtgccctgacagaggaagtggagagcgagctctatcgcatcggccagcagctggggatgacgttcatcagtgtgggacatcggcagagccttgagaagtttcattccttggttctgaaactctgtggaggaggaagatgggagctgatgagaatcaaagtggaatgaagctctggcttttggaaggagagccacactgtggcgggtcggcggccctcaggagagaccaggaggactgacagcgaagatcgagctcaggttcgccacatagatcccgtgcaggagccacatgggtcctgtgcaggacccctagcagtggtgggctgagcccaggtctaggtttctgtgggggacactgaatctcccagtgttcagtctcccaggactctgctgcctcagccagagcctccatatgcttgaagtgctgattacctacaaatgatttcagatcatgtttgctaaagagaaatctggaagtgtgagatctgtaagaaatgaaagaaatgactcttggagtcaagagatctggaaatcttttaatcagttaaattgtgcagcaatagatttttaactttaactgaccatttaagttttttaataagttttttacaaagaaaagttaaacattaaaaagaattacagctttctgtcttctctatcatggaatgattttttttattgaatctccagatttgtatttgacagcttggtgggaagggaagcacactctgctgttctggaatcttatgcccagggtttttcacttctccccacatctccctttccacttgccagtgttgtgtagttagaacctgaaccactaacttctaggggcctttggtctgccctaccttaacccaaatgaaagtaaatccctttccccttagccaaaataaggttgggttttctaaaaaaatagtctatattagggaacaacaacagcaaattagacaaaacccagaaagcacaaagcatgaggtggagttactgtgcccaaagtcctcactcagaccagtgcccctccagttcagttgtctatgtattaccttccttaccttcataatgtttgccaggcttctgtacttctagtacttgagttacttaatatttttaaaaacaaaccttttaagtttaaatggatttttaagtgaaattttacacttaacatagatggaaagtaactaaaaataaatacaagaaaaaccatcggtgttattaacttacggctagatgctgttgcctgcatagactctgggcctgaggcttgttcattttgtaaaaaagagaggtgaggagttagacggactggcactcaactgagatttttctccttaataaaatcagaaagatgg

SEQ ID NO: 446369 - DNA, 2900 bp, Homo sapiens
gcaggctggtacggtcggagtgtgggatcggtcgcggggccgcgcccggagctggcgccaggcccaggttagatctgcaatttctccagcggttcctgcagatactgaaggttttgtttccttcttggtcatcacaaaatgccttgatgttcctgacccttttgtgcctgaccctactggctgaagagctttgatcagttcacctgcaacctgctgtatgtgagctggaggaaggacctcactgagcaccttcaccgcctctacttccggggccgtgcgtactacaccctcaacgtgctgcgggatgacatcgataacccggaccagcgcatcagccaggacgtggagcgattctgccggcagctcagcagcatggccagcaagctcatcatctccccgttcaccctcgtctactacacttaccagtgcttccaaagcacaggctggctcgggcctgtgagcatcttcgggtatttcatcctggggaccgtggtgaacaaaactttgatgggccccattgtgatgaagctggtgcatcaggagaagctggagggagattttaggttcaagcacatgcagattcgggtgaatgcggagcctgctgctttctacagagctgggcatgtggagcacatgaggacagaccgcaggctgcagagactccttcagacccagagggagctgatgtccaaggagctctggctgtacatcggcatcaacacctttgactatctgggcagcatcctgagttacgttgtcatcgcaatccccattttcagcggggtctatggagacctgagtcccgcagagcttagcaccctggtcagcaagaatgcctttgtgtgcatctacctcatcagctgcttcacccagctcatcgacctgtccacgacgctctcagatgtggctggctacacgcacagaattgggcagcttcgggagacgcttctggacatgtccctgaagtcacaggactgcgagatcctgggcgagagcgagtggggcttggacacacccccagggtggccagcggcagagccagcagacacagcatttctccttgagcgggtctccatctctgccccctcctctgacaaacccctaatcaaggatctgagcctaaagatctccgagggacagagcctgctcatcacaggcaacacgggcactggcaagacctccttgctccgggttctgggtggcctctggacgagtacacggggctcagtgcagatgctgacggactttgggccccatggggtgctattcctgccacaaaagccattcttcactgacgggacccttcgggagcaggtgatatatcccctgaaggaggtctaccccgactcaggttctgccgatgatgagaggatcttgaggttcttggaattggcaggcctgtccaacttggtggcaaggacagagggcctggaccagcaggtggactggaactggtatgatgttctgtccccgggggagatgcaacggctctcctttgcccgactcttctacctgcagccgaagtacgcagtgcttgatgaagccaccagtgccctgacagaggaagtggagagcgagctctatcgcatcggccagcagctggggatgacgttcatcagtgtgggacatcggcagagccttgagaagtttcattccttggttctgaaactctgtggaggaggaagatgggagctgatgagaatcaaagtggaatgaagctctggcttttggaaggagagccacactgtggcgggtcggcggccctcaggagagaccaggaggactgacagcgaagatcgagctcaggttcgccacatagatcccgtgcaggagccacatgggtcctgtgcaggacccctagcagtggtgggctgagcccaggtctaggtttctgtgggggacactgaatctcccagtgttcagtctcccaggactctgctgcctcagccagagcctccatatgcttgaagtgctgattacctacaaatgatttcagatcatgtttgctaaagagaaatctggaagtgtgagatctgtaagaaatgaaagaaatgactcttggagtcaagagatctggaaatcttttaatcagttaaattgtgcagcaatagatttttaactttaactgaccatttaagttttttaataagttttttacaaagaaaagttaaacattaaaaagaattacagctttctgtcttctctatcatggaatgattttttttattgaatctccagatttgtatttgacagcttggtgggaagggaagcacactctgctgttctggaatcttatgcccagggtttttcacttctccccacatctccctttccacttgccagtgttgtgtagttagaacctgaaccactaacttctaggggcctttggtctgccctaccttaacccaaatgaaagtaaatccctttccccttagccaaaataaggttgggttttctaaaaaaatagtctatattagggaacaacaacagcaaattagacaaaacccagaaagcacaaagcatgaggtggagttactgtgcccaaagtcctcactcagaccagtgcccctccagttcagttgtctatgtattaccttccttaccttcataatgtttgccaggcttctgtacttctagtacttgagttacttaatatttttaaaaacaaaccttttaagtttaaatggatttttaagtgaaattttacacttaacatagatggaaagtaactaaaaataaatacaagaaaaaccatcggtgttattaacttacggctagatgctgttgcctgcatagactctgggcctgaggcttgttcattttgtaaaaaagagaggtgaggagttagacggactggcactcaactgagatttttctccttaataaaatcagaaagatgg

SEQ ID NO: 446370 - DNA, 3072 bp, Homo sapiens
cactttgttggttggggtacctctcagctcaagcttagctttggtgcaaagatgcgtgggaggctgctgctgctgcctaacttctaggcctctttctgatggctatggcttccatcctgcctctgccccctgagtagctgggactacaggtgtgcctcacagcctggagctttcacagccagataactaaaggggccaggctagggcttatataagagaaatttgggaggattgagataaaggggatagtcttcttgatcatccaaaacagctcatctaccttcaagtttttctttggctctgctcagagctggctcaggcccctgggtactggacctttcagttcccactttttcaggggattaactaaggcaccgtaagatgcaactctctagaaccctgtttaaaggccctgggatttagttgcccctaggaaaccagccttgtctggttccctcttcccatagggtcagtgttcacagcactgtgaggcaaggtcaagagcagaggtgatgtgaaagtttcttgttctctctacctttgggcccatctccctgggtccagctactctgtgtcattggctccagggaccagcgcatcagccaggacgtggagcgattctgccggcagctcagcagcatggccagcaagctcatcatctccccgttcaccctcgtctactacacttaccagtgcttccaaagcacaggctggctcgggcctgtgagcatcttcgggtatttcatcctggggaccgtggtgaacaaaactttgatgggccccattgtgatgaagctggtgcatcaggagaagctggagggagattttaggttcaagcacatgcagattcgggtgaatgcggagcctgctgctttctacagtcggcatcaacacctttgactatctgggcagcatcctgagttacgttgtcatcgcaatccccattttcagcggggtctatggagacctgagtcccgcagagcttagcaccctggtcagcaagaatgcctttgtgtgcatctacctcatcagctgcttcacccagctcatcgacctgtccacgacgctctcagatgtggctggctacacgcacagaattgggcagcttcgggagacgcttctggacatgtccctgaagtcacaggactgcgagatcctgggcgagagcgagtggggcttggacacacccccagggtggccagcggcagagccagcagacacagcatttctccttgagcgggtctccatctctgccccctcctctgacaaacccctaatcaaggatctgagcctaaagatctccgagggacagagcctgctcatcacaggcaacacgggcactggcaagacctccttgctccgggttctgggtggcctctggacgagtacacggggctcagtgcagatgctgacggactttgggccccatggggtgctattcctgccacaaaagccattcttcactgacgggacccttcgggagcaggtgatatatcccctgaaggaggtctaccccgactcaggttctgccgatgatgagaggatcttgaggttcttggaattggcaggcctgtccaacttggtggcaaggacagagggcctggaccagcaggtggactggaactggtatgatgttctgtccccgggggagatgcaacggctctcctttgcccgactcttctacctgcagccgaagtacgcagtgcttgatgaagccaccagtgccctgacagaggaagtggagagcgagctctatcgcatcggccagcagctggggatgacgttcatcagtgtgggacatcggcagagccttgagaagtttcattccttggttctgaaactctgtggaggaggaagatgggagctgatgagaatcaaagtggaatgaagctctggcttttggaaggagagccacactgtggcgggtcggcggccctcaggagagaccaggaggactgacagcgaagatcgagctcaggttcgccacatagatcccgtgcaggagccacatgggtcctgtgcaggacccctagcagtggtgggctgagcccaggtctaggtttctgtgggggacactgaatctcccagtgttcagtctcccaggactctgctgcctcagccagagcctccatatgcttgaagtgctgattacctacaaatgatttcagatcatgtttgctaaagagaaatctggaagtgtgagatctgtaagaaatgaaagaaatgactcttggagtcaagagatctggaaatcttttaatcagttaaattgtgcagcaatagatttttaactttaactgaccatttaagttttttaataagttttttacaaagaaaagttaaacattaaaaagaattacagctttctgtcttctctatcatggaatgattttttttattgaatctccagatttgtatttgacagcttggtgggaagggaagcacactctgctgttctggaatcttatgcccagggtttttcacttctccccacatctccctttccacttgccagtgttgtgtagttagaacctgaaccactaacttctaggggcctttggtctgccctaccttaacccaaatgaaagtaaatccctttccccttagccaaaataaggttgggttttctaaaaaaatagtctatattagggaacaacaacagcaaattagacaaaacccagaaagcacaaagcatgaggtggagttactgtgcccaaagtcctcactcagaccagtgcccctccagttcagttgtctatgtattaccttccttaccttcataatgtttgccaggcttctgtacttctagtacttgagttacttaatatttttaaaaacaaaccttttaagtttaaatggatttttaagtgaaattttacacttaacatagatggaaagtaactaaaaataaatacaagaaaaaccatcggtgttattaacttacggctagatgctgttgcctgcatagactctgggcctgaggcttgttcattttgtaaaaaagagaggtgaggagttagacggactggcactcaactgagatttttctccttaataaaatcagaaagatgg

SEQ ID NO: 446371 - DNA, 4602 bp, Homo sapiens
  misc_feature (1980)..(1980): n is a, c, g, or t
  misc_feature (1987)..(1987): n is a, c, g, or t
  misc_feature (1999)..(1999): n is a, c, g, or t
  misc_feature (2003)..(2003): n is a, c, g, or t
cgcttccgggagagtccgcgtctcccgcaccttcctctctatcaaacgccgtctctgtggtagccggggccccgcccctcctcggactctacccagtactgaactaggggcagctgggctccagagtccctcgggtctcaggtcatggcggtcgcggggcccgcgcccggagctggcgccaggcccaggttagatctgcaatttctccagcggttcctgcagatactgaaggttttgtttccttcttggtcatcacaaaatgccttgatgttcctgacccttttgtgcctgaccctactggagcaatttgtgatctaccaggttggcttgatccccagtcagtactatggggtcctgggaaacaaagacttggaagggtttaagactctgacattcctggctgtcatgctcattgttctgaactccacgctgaagagctttgatcagttcacctgcaacctgctgtatgtgagctggaggaaggacctcactgagcaccttcaccgcctctacttccggggccgtgcgtactacaccctcaacgtgctgcgggatgacatcgataacccggaccagcgcatcagccaggacgtggagcgattctgccggcagctcagcagcatggccagcaagctcatcatctccccgttcaccctcgtctactacacttaccagtgcttccaaagcacaggctggctcgggcctgtgagcatcttcgggtatttcatcctggggaccgtggtgaacaaaactttgatgggccccattgtgatgaagctggtgcatcaggagaagctggagggagattttaggttcaagcacatgcagattcgggtgaatgcggagcctgctgctttctacagagctgggcatgtggagcacatgaggacagaccgcaggctgcagagactccttcagacccagagggagctgatgtccaaggagctctggctgtacatcggcatcaacacctttgactatctgggcagcatcctgagttacgttgtcatcgcaatccccattttcagcggggtctatggagacctgagtcccgcagagcttagcaccctggtcagcaagaatgcctttgtgtgcatctacctcatcagctgcttcacccagctcatcgacctgtccacgacgctctcagatgtggctggctacacgcacagaattgggcagcttcgggagacgcttctggacatgtccctgaagtcacaggactgcgagatcctgggcgagagcgagtggggcttggacacacccccagggtggccagcggcagagccagcagacacagcatttctccttgagcgggtctccatctctgccccctcctctgacaaacccctaatcaaggatctgagcctaaagatctccgagggacagagcctgctcatcacaggcaacacgggcactggcaagacctccttgctccgggttctgggtggcctctggacgagtacacggggctcagtgcagatgctgacggactttgggccccatggggtgctattcctgccacaaaagccattcttcactgacgggacccttcgggagcagggtcagtctagttcagggggctcactcctccctcctcaaccccgcccacccacagctgggacctctggcactgtgacaagtctcaggtcctagagtcagggcaaaaggtgaggtggtgaagtggcccgggcctgggaactgctggctctaagaaccttctattcacatccatggattgggcccactactcatagcagctcctgaggcaggtaaatggggcaaggactcacgccaaataccacacgcgtatgtcaaacacccaaggtcggattctggggcccctgccctcaggaggctgtcagactgttccccctaaacacacttctgaaggttgtagggaccttgccctgctgtctgccggccagagcctctcccatctgacccaggccaggcgttcccacctctcctccttgggangttccantgggttctggangganggtgggctgtgtgcactccgtcttttgctcgccctcctaggttggtgtggtttttttcttttctcaggtgatatatcccctgaaggaggtctaccccgactcaggttctgccgatgatgagaggatcttgaggttcttggaattggcaggcctggtaagtggggagagggaccctcaggacccgagcccacctgggagcaccagctacaggtaggcaggtgctggccctgctatgctgggcccaggactggaagtctgaacctggggtggagaatgggagtatcagttgacagtgtgtgctgttggccaggtttaggcacgaagggggtagtgctctcattggagaattttaagacaagaataggattgatgaaggcggtttgctttttactgtcatcatgctccagcaagtctaaacagtgtcattggtagaatattcctctctgcctggggcagactgtcccacagtcccccgccttggtatgccactggggcatatatttgtcttagaggtgtgtgtgtatgctggggagtgagggaggttccccatgatggcaggtagcagggctggccatttcatggacatcctgccctctgggtctgttacagtccaacttggtggcaaggacagagggcctggaccagcaggtggactggaactggtaagaaaagagcttgggtgctccagagatagccccaccataaagacagtgggtttcagggtccctgtcaaggaatggaacggctcctgaccccaaagtccagatgtttggctggtcagtcgggtgcaagtttatgcccttgggaacagagttttgcctcactctgtgagggctgtaggcctatggtcgaaagggaaggggcttctgtctcctggggctcacctctgtgcagagaaacctcttcctacccagaccattctaggtaaaagccaagctatattcttcctcctctagcagtcctctctcctacctttcctcaggtatgatgttctgtccccgggggagatgcaacggctctcctttgcccgactcttctacctgcagccgaagtacgcagtgcttgatgaagccaccagtgccctgacagaggaagtggagagcgagctctatcgcatcggccagcagctggggatgacgttcatcagtgtgggacatcggcagagccttgagaaggtacccgtgctcacaaggatggcctgaggaggagaaagaacccaaaggctcagcctggccagggccagaggcccctcaaaacggggagtagcagtagcagagagaaccgagtggcctcctctgccggcggccagggcagcctgatctccatgtggtggtggtctcttgtagtttcattccttggttctgaaactctgtggaggaggaagatgggagctgatgagaatcaaagtggaatgaagctctggcttttggaaggagagccacactgtggcgggtcggcggccctcaggagagaccaggaggactgacagcgaagatcgagctcaggttcgccacatagatcccgtgcaggagccacatgggtcctgtgcaggacccctagcagtggtgggctgagcccaggtctaggtttctgtgggggacactgaatctcccagtgttcagtctcccaggactctgctgcctcagccagagcctccatatgcttgaagtgctgattacctacaaatgatttcagatcatgtttgctaaagagaaatctggaagtgtgagatctgtaagaaatgaaagaaatgactcttggagtcaagagatctggaaatcttttaatcagttaaattgtgcagcaatagatttttaactttaactgaccatttaagttttttaataagttttttacaaagaaaagttaaacattaaaaagaattacagctttctgtcttctctatcatggaatgattttttttattgaatctccagatttgtatttgacagcttggtgggaagggaagcacactctgctgttctggaatcttatgcccagggtttttcacttctccccacatctccctttccacttgccagtgttgtgtagttagaacctgaaccactaacttctaggggcctttggtctgccctaccttaacccaaatgaaagtaaatccctttccccttagccaaaataaggttgggttttctaaaaaaatagtctatattagggaacaacaacagcaaattagacaaaacccagaaagcacaaagcatgaggtggagttactgtgcccaaagtcctcactcagaccagtgcccctccagttcagttgtctatgtattaccttccttaccttcataatgtttgccaggcttctgtacttctagtacttgagttacttaatatttttaaaaacaaaccttttaagtttaaatggatttttaagtgaaattttacacttaacatagatggaaagtaactaaaaataaatacaagaaaaaccatcggtgttattaacttacggctagatgctgttgcctgcatagactctgggcctgaggcttgttcattttgtaaaaaagagaggtgaggagttagacggactggcactcaactgagatttttctccttaataaaatcagaaagatgg

SEQ ID NO: 446372 - DNA, 2998 bp, Homo sapiens
cgcttccgggagagtccgcgtctcccgcaccttcctctctatcaaacgccgtctctgtggtagccggggccccgcccctcctcggactctacccagtactgaactaggggcagctgggctccagagtccctcgggtctcaggtcatggcggtcgcggggcccgcgcccggagctggcgccaggcccaggttagatctgcaatttctccagcggttcctgcagatactgaaggttttgtttccttcttggtcatcacaaaatgccttgatgttcctgacccttttgtgcctgaccctactggagcaatttgtgatctaccaggttggcttgatccccagtcagtactatggggtcctgggaaacaaagacttggaagggtttaagactctgacattcctggctgtcatgctcattgttctgaactccacgctgaagagctttgatcagttcacctgcaacctgctgtatgtgagctggaggaaggacctcactgagcaccttcaccgcctctacttccggggccgtgcgtactacaccctcaacgtgctgcgggatgacatcgataacccggaccagcgcatcagccaggacgtggagcgattctgccggcagctcagcagcatggccagcaagctcatcatctccccgttcaccctcgtctactacacttaccagtgcttccaaagcacaggctggctcgggcctgtgagcatcttcgggtatttcatcctggggaccgtggtgaacaaaactttgatgggccccattgtgatgaagctggtgcatcaggagaagctggagggagattttaggttcaagcacatgcagattcgggtgaatgcggagcctgctgctttctacagagctgggcatgtggagcacatgaggacagaccgcaggctgcagagactccttcagacccagagggagctgatgtccaaggagctctggctgtacatcggcatcaacacctttgactatctgggcagcatcctgagttacgttgtcatcgcaatccccattttcagcggggtctatggagacctgagtcccgcagagcttagcaccctggtcagcaagaatgcctttgtgtgcatctacctcatcagctgcttcacccagctcatcgacctgtccacgacgctctcagatgtggctggctacacgcacagaattgggcagcttcgggagacgcttctggacatgtccctgaagtcacaggactgcgagatcctgggcgagagcgagtggggcttggacacacccccagggtggccagcggcagagccagcagacacagcatttctccttgagcgggtctccatctctgccccctcctctgacaaacccctaatcaaggatctgagcctaaagatctccgagggacagagcctgctcatcacaggcaacacgggcactggcaagacctccttgctccgggttctgggtggcctctggacgagtacacggggctcagtgcagatgctgacggactttgggccccatggggtgctattcctgccacaaaagccattcttcactgacgggacccttcgggagcaggtgatatatcccctgaaggaggtctaccccgactcaggttctgccgatgatgagaggatcttgaggttcttggaattggcaggcctgtccaacttggtggcaaggacagagggcctggaccagcaggtggactggaactggtatgatgttctgtccccgggggagatgcaacggctctcctttgcccgactcttctacctgcagccgaagtacgcagtgcttgatgaagccaccagtgccctgacagaggaagtggagagcgagctctatcgcatcggccagcagctggggatgacgttcatcagtgtgggacatcggcagagccttgagaaggtacccgtgctcacaaggatggcctgaggaggagaaagaacccaaaggctcagcctggccagggccagaggcccctcaaaacggggagtagcagtagcagagagaaccgagtggcctcctctgccggcggccagggcagcctgatctccatgtggtggtggtctcttgtagtttcattccttggttctgaaactctgtggaggaggaagatgggagctgatgagaatcaaagtggaatgaagctctggcttttggaaggagagccacactgtggcgggtcggcggccctcaggagagaccaggaggactgacagcgaagatcgagctcaggttcgccacatagatcccgtgcaggagccacatgggtcctgtgcaggaccctgtgagatctgtaagaaatgaaagaaatgactcttggagtcaagagatctggaaatcttttaatcagttaaattgtgcagcaatagatttttaactttaactgaccatttaagttttttaataagttttttacaaagaaaagttaaacattaaaaagaattacagctttctgtcttctctatcatggaatgattttttttattgaatctccagatttgtatttgacagcttggtgggaagggaagcacactctgctgttctggaatcttatgcccagggtttttcacttctccccacatctccctttccacttgccagtgttgtgtagttagaacctgaaccactaacttctaggggcctttggtctgccctaccttaacccaaatgaaagtaaatccctttccccttagccaaaataaggttgggttttctaaaaaaatagtctatattagggaacaacaacagcaaattagacaaaacccagaaagcacaaagcatgaggtggagttactgtgcccaaagtcctcactcagaccagtgcccctccagttcagttgtctatgtattaccttccttaccttcataatgtttgccaggcttctgtacttctagtacttgagttacttaatatttttaaaaacaaaccttttaagtttaaatggatttttaagtgaaattttacacttaacatagatggaaagtaactaaaaataaatacaag

SEQ ID NO: 446373 - DNA, 3875 bp, Homo sapiens
  misc_feature (1980)..(1980): n is a, c, g, or t
  misc_feature (1987)..(1987): n is a, c, g, or t
  misc_feature (1999)..(1999): n is a, c, g, or t
  misc_feature (2003)..(2003): n is a, c, g, or t
cgcttccgggagagtccgcgtctcccgcaccttcctctctatcaaacgccgtctctgtggtagccggggccccgcccctcctcggactctacccagtactgaactaggggcagctgggctccagagtccctcgggtctcaggtcatggcggtcgcggggcccgcgcccggagctggcgccaggcccaggttagatctgcaatttctccagcggttcctgcagatactgaaggttttgtttccttcttggtcatcacaaaatgccttgatgttcctgacccttttgtgcctgaccctactggagcaatttgtgatctaccaggttggcttgatccccagtcagtactatggggtcctgggaaacaaagacttggaagggtttaagactctgacattcctggctgtcatgctcattgttctgaactccacgctgaagagctttgatcagttcacctgcaacctgctgtatgtgagctggaggaaggacctcactgagcaccttcaccgcctctacttccggggccgtgcgtactacaccctcaacgtgctgcgggatgacatcgataacccggaccagcgcatcagccaggacgtggagcgattctgccggcagctcagcagcatggccagcaagctcatcatctccccgttcaccctcgtctactacacttaccagtgcttccaaagcacaggctggctcgggcctgtgagcatcttcgggtatttcatcctggggaccgtggtgaacaaaactttgatgggccccattgtgatgaagctggtgcatcaggagaagctggagggagattttaggttcaagcacatgcagattcgggtgaatgcggagcctgctgctttctacagagctgggcatgtggagcacatgaggacagaccgcaggctgcagagactccttcagacccagagggagctgatgtccaaggagctctggctgtacatcggcatcaacacctttgactatctgggcagcatcctgagttacgttgtcatcgcaatccccattttcagcggggtctatggagacctgagtcccgcagagcttagcaccctggtcagcaagaatgcctttgtgtgcatctacctcatcagctgcttcacccagctcatcgacctgtccacgacgctctcagatgtggctggctacacgcacagaattgggcagcttcgggagacgcttctggacatgtccctgaagtcacaggactgcgagatcctgggcgagagcgagtggggcttggacacacccccagggtggccagcggcagagccagcagacacagcatttctccttgagcgggtctccatctctgccccctcctctgacaaacccctaatcaaggatctgagcctaaagatctccgagggacagagcctgctcatcacaggcaacacgggcactggcaagacctccttgctccgggttctgggtggcctctggacgagtacacggggctcagtgcagatgctgacggactttgggccccatggggtgctattcctgccacaaaagccattcttcactgacgggacccttcgggagcagggtcagtctagttcagggggctcactcctccctcctcaaccccgcccacccacagctgggacctctggcactgtgacaagtctcaggtcctagagtcagggcaaaaggtgaggtggtgaagtggcccgggcctgggaactgctggctctaagaaccttctattcacatccatggattgggcccactactcatagcagctcctgaggcaggtaaatggggcaaggactcacgccaaataccacacgcgtatgtcaaacacccaaggtcggattctggggcccctgccctcaggaggctgtcagactgttccccctaaacacacttctgaaggttgtagggaccttgccctgctgtctgccggccagagcctctcccatctgacccaggccaggcgttcccacctctcctccttgggangttccantgggttctggangganggtgggctgtgtgcactccgtcttttgctcgccctcctaggttggtgtggtttttttcttttctcaggtgatatatcccctgaaggaggtctaccccgactcaggttctgccgatgatgagaggatcttgaggttcttggaattggcaggcctggtaagtggggagagggaccctcaggacccgagcccacctgggagcaccagctacaggtaggcaggtgctggccctgctatgctgggcccaggactggaagtctgaacctggggtggagaatgggagtatcagttgacagtgtgtgctgttggccaggtttaggcacgaagggggtagtgctctcattggagaattttaagacaagaataggattgatgaaggcggtttgctttttactgtcatcatgctccagcaagtctaaacagtgtcattggtagaatattcctctctgcctggggcagactgtcccacagtcccccgccttggtatgccactggggcatatatttgtcttagaggtgtgtgtgtatgctggggagtgagggaggttccccatgatggcaggtagcagggctggccatttcatggacatcctgccctctgggtctgttacagtccaacttggtggcaaggacagagggcctggaccagcaggtggactggaactggtaagaaaagagcttgggtgctccagagatagccccaccataaagacagtgggtttcagggtccctgtcaaggaatggaacggctcctgaccccaaagtccagatgtttggctggtcagtcgggtgcaagtttatgcccttgggaacagagttttgcctcactctgtgagggctgtaggcctatggtcgaaagggaaggggcttctgtctcctggggctcacctctgtgcagagaaacctcttcctacccagaccattctaggtaaacatatgcttgaagtgctgattacctacaaatgatttcagatcatgtttgctaaagagaaatctggaagtgtgagatctgtaagaaatgaaagaaatgactcttggagtcaagagatctggaaatcttttaatcagttaaattgtgcagcaatagatttttaactttaactgaccatttaagttttttaataagttttttacaaagaaaagttaaacattaaaaagaattacagctttctgtcttctctatcatggaatgattttttttattgaatctccagatttgtatttgacagcttggtgggaagggaagcacactctgctgttctggaatcttatgcccagggtttttcacttctccccacatctccctttccacttgccagtgttgtgtagttagaacctgaaccactaacttctaggggcctttggtctgccctaccttaacccaaatgaaagtaaatccctttccccttagccaaaataaggttgggttttctaaaaaaatagtctatattagggaacaacaacagcaaattagacaaaacccagaaagcacaaagcatgaggtggagttactgtgcccaaagtcctcactcagaccagtgcccctccagttcagttgtctatgtattaccttccttaccttcataatgtttgccaggcttctgtacttctagtacttgagttacttaatatttttaaaaacaaaccttttaagtttaaatggatttttaagtgaaattttacacttaacatagatggaaagtaactaaaaataaatacaagaaaaaccatcggtgttattaacttacggctagatgctgttgcctgcatagactctgggcctgaggcttgttcattttgtaaaaaagagaggtgaggagttagacggactggcactcaactgagatttttctccttaataaaatcagaaagatgg

SEQ ID NO: 446374 - DNA, 2374 bp, Homo sapiens
  misc_feature (2374)..(2374): n is a, c, g, or t
cgcttccgggagagtccgcgtctcccgcaccttcctctctatcaaacgccgtctctgtggtagccggggccccgcccctcctcggactctacccagtactgaactaggggcagctgggctccagagtccctcgggtctcaggtcatggcggtcgcggggcccgcgcccggagctggcgccaggcccaggttagatctgcaatttctccagcggttcctgcagatactgaaggttttgtttccttcttggtcatcacaaaatgccttgatgttcctgacccttttgtgcctgaccctactggagcaatttgtgatctaccaggttggcttgatccccagtcagtactatggggtcctgggaaacaaagacttggaagggtttaagactctgacattcctggctgtcatgctcattgttctgaactccacgctgaagagctttgatcagttcacctgcaacctgctgtatgtgagctggaggaaggacctcactgagcaccttcaccgcctctacttccggggccgtgcgtactacaccctcaacgtgctgcgggatgacatcgataacccggaccagcgcatcagccaggacgtggagcgattctgccggcagctcagcagcatggccagcaagctcatcatctccccgttcaccctcgtctactacacttaccagtgcttccaaagcacaggctggctcgggcctgtgagcatcttcgggtatttcatcctggggaccgtggtgaacaaaactttgatgggccccattgtgatgaagctggtgcatcaggagaagctggagggagattttaggttcaagcacatgcagattcgggtgaatgcggagcctgctgctttctacagagctgggcatgtggagcacatgaggacagaccgcaggctgcagagactccttcagacccagagggagctgatgtccaaggagctctggctgtacatcggcatcaacacctttgactatctgggcagcatcctgagttacgttgtcatcgcaatccccattttcagcggggtctatggagacctgagtcccgcagagcttagcaccctggtcagcaagaatgcctttgtgtgcatctacctcatcagctgcttcacccagctcatcgacctgtccacgacgctctcagatgtggctggctacacgcacagaattgggcagcttcgggagacgcttctggacatgtccctgaagtcacaggactgcgagatcctgggcgagagcgagtggggcttggacacacccccagggtggccagcggcagagccagcagacacagcatttctccttgagcgggtctccatctctgccccctcctctgacaaacccctaatcaaggatctgagcctaaagatctccgagggacagagcctgctcatcacaggcaacacgggcactggcaagacctccttgctccgggttctgggtggcctctggacgagtacacggggctcagtgcagatgctgacggactttgggccccatggggtgctattcctgccacaaaagccattcttcactgacgggacccttcgggagcaggtgatatatcccctgaaggaggtctaccccgactcaggttctgccgatgatgagaggatcttgaggttcttggaattggcaggcctgtccaacttggtggcaaggacagagggcctggaccagcaggtggactggaactggtatgatgttctgtccccgggggagatgcaacggctctcctttgcccgactcttctacctgcagccgaagtacgcagtgcttgatgaagccaccagtgccctgacagaggaagtggagagcgagctctatcgcatcggccagcagctggggatgacgttcatcagtgtgggacatcggcagagccttgagaagtttcattccttggttctgaaactctgtggaggaggaagatgggagctgatgagaatcaaagtggaatgaagctctggcttttggaaggagagccacactgtggcgggtcggcggccctcaggagagaccaggaggactgacagcgaagatcgagctcaggttcgccacatagatcccgtgcaggagccacatgggtcctgtgcaggacccctagcagtggtgggctgagcccaggtctaggtttctgtgggggacactgaatctcccagtgttcagtctcccaggactctgctgcctcagccagagcctccatatgcttgaagtgctgattacctacaaatgatttcagatcatgtttgctaaagagaaatctggaagtgtgagatctgtaagaaatgatgctcttgagtaagagactgtctttaatagtaattgtgcacaatgatttaactttaccgccatcaagtttttagttttn

SEQ ID NO: 446375 - DNA, 1782 bp, Homo sapiens
cgcttccgggagagtccgcgtctcccgcaccttcctctctatcaaacgccgtctctgtggtagccggggccccgcccctcctcggactctacccagtactgaactaggggcagctgggctccagagtccctcgggtctcaggtcatggcggtcgcggggcccgcgcccggagctggcgccaggcccaggttagatctgcaatttctccagcggttcctgcagatactgaaggttttgtttccttcttggtcatcacaaaatgccttgatgttcctgacccttttgtgcctgaccctactggagcaatttgtgatctaccaggttggcttgatccccagtcagtactatggggtcctgggaaacaaagacttggaagggtttaagactctgacattcctggctgtcatgctcattgttctgaactccacgctgaagagctttgatcagttcacctgcaacctgctgtatgtgagctggaggaaggacctcactgagcaccttcaccgcctctacttccggggccgtgcgtactacaccctcaacgtgctgcgggatgacatcgataacccggaccagcgcatcagccaggacgtggagcgattctgccggcagctcagcagcatggccagcaagctcatcatctccccgttcaccctcgtctactacacttaccagtgcttccaaagcacaggctggctcgggcctgtgagcatcttcgggtatttcatcctggggaccgtggtgaacaaaactttgatgggccccattgtgatgaagctggtgcatcaggagaagctggagggagattttaggttcaagcacatgcagattcgggtgaatgcggagcctgctgctttctacagagctgggcatgtggagcacatgaggacagaccgcaggctgcagagactccttcagacccagagggagctgatgtccaaggagctctggctgtacatcggcatcaacacctttgactatctgggcagcatcctgagttacgttgtcatcgcaatccccattttcagcggggtctatggagacctgagtcccgcagagcttagcaccctggtcagcaagaatgcctttgtgtgcatctacctcatcagctgcttcacccagctcatcgacctgtccacgacgctctcagatgtggctggctacacgcacagaattgggcagcttcgggagacgcttctggacatgtccctgaagtcacaggactgcgagatcctgggcgagagcgagtggggcttggacacacccccagggtggccagcggcagagccagcagacacagcatttctccttgagcgggtctccatctctgccccctcctctgacaaacccctaatcaaggatctgagcctaaagatctccgagggacagagcctgctcatcacaggcaacacgggcactggcaagacctccttgctccgggttctgggtggcctctggacgagtacacggggctcagtgcagatgctgacggactttgggccccatggggtgctattcctgccacaaaagccattcttcactgacgggacccttcgggagcaggtgatatatcccctgaaggaggtctaccccgactcaggtgagctggtcctccttaggtcatgtcctctccttctgtcatggttgtccctgctctacctgactgtggcctcatctgtgcccttggggagaggctccagccaggccgctgattcaaggaagaggggctcctctcctcttcctttgactgttttggggtctgtacccagatctcacctcatt

SEQ ID NO: 446376 - DNA, 964 bp, Homo sapiens
gcaggctggtacggtcggagtgtgggatcggtcgcggggccgcgcccggagctggcgccaggcccaggttagatctgcaatttctccagcggttcctgcagatactgaaggttttgtttccttcttggtcatcacaaaatgccttgatgttcctgacccttttgtgcctgaccctactggagcaatttgtgatctaccaggttggcttgatccccagtcagtactatggggtcctgggaaacaaagacttggaagggtttaagactctgacattcctggctgtcatgctcattgttctgaactccacgctgaagagctttgatcagttcacctgcaacctgctgtatgtgagctggaggaaggacctcactgagcaccttcaccgcctctacttccggggccgtgcgtactacaccctcaacgtgctgcgggatgacatcgataacccgtaggcgccccaactcagtcctttctacactctgtgtggtcctttccttctggcctagccctggagactgctggtggcagacaccaaggagatcatctgcagtcgttttcaaatgctgctgcccagagtcatgggggagggtgccctgcagaggactcctggagaagctgcagggctgtgaataggcagctaaaaagaagaagcctgcccaggtgcagtggcatgcacctgtagtcccaacaactcaggaggctgaggcaggaggatcacttgagcccaggagtagtgcaccgtgagcacacttgggaatagccactgtactctagcctgggcaacatagcagaaacccccatctcttaaaaaaaagaaaaatgttaggagcagctttcttttgtccttttcatactttatatcttagtcttccagtaagaagactaaggggtttctttagagggttctaaagaaaatgtccttgctagaaaaaccagctcttagattttcatcagtaaaaaaaat

SEQ ID NO: 446377 - DNA, 428 bp, Homo sapiens
gtggtggctcccgggagcagtgcctcccccacagcaatactgaccctgcccatcttcctcacgccccctctcttctctgacacagacccccagggtggccagcggcagagccagcagacacagcatttctccttgagcgggtctccatctctgccccctcctctgacaaacccctaatcaaggatctgagcctaaagatctccgagggacagagcctgctcatcacaggcaacacgggcactggcaagacctccttgctccgggttctgggtggcctctggacgagtacacggggtgagagccaggccctccctgcctctgacccagcctgggccctaggggtggggtgaaggcggggacggtgtggtagaatccattcttttctgttggggaacaaggaagagaggagacaggcagttgcctcttct

SEQ ID NO: 446378 - DNA, 3502 bp, Homo sapiens
  misc_feature (1980)..(1980): n is a, c, g, or t
  misc_feature (1987)..(1987): n is a, c, g, or t
  misc_feature (1999)..(1999): n is a, c, g, or t
  misc_feature (2003)..(2003): n is a, c, g, or t
cgcttccgggagagtccgcgtctcccgcaccttcctctctatcaaacgccgtctctgtggtagccggggccccgcccctcctcggactctacccagtactgaactaggggcagctgggctccagagtccctcgggtctcaggtcatggcggtcgcggggcccgcgcccggagctggcgccaggcccaggttagatctgcaatttctccagcggttcctgcagatactgaaggttttgtttccttcttggtcatcacaaaatgccttgatgttcctgacccttttgtgcctgaccctactggagcaatttgtgatctaccaggttggcttgatccccagtcagtactatggggtcctgggaaacaaagacttggaagggtttaagactctgacattcctggctgtcatgctcattgttctgaactccacgctgaagagctttgatcagttcacctgcaacctgctgtatgtgagctggaggaaggacctcactgagcaccttcaccgcctctacttccggggccgtgcgtactacaccctcaacgtgctgcgggatgacatcgataacccggaccagcgcatcagccaggacgtggagcgattctgccggcagctcagcagcatggccagcaagctcatcatctccccgttcaccctcgtctactacacttaccagtgcttccaaagcacaggctggctcgggcctgtgagcatcttcgggtatttcatcctggggaccgtggtgaacaaaactttgatgggccccattgtgatgaagctggtgcatcaggagaagctggagggagattttaggttcaagcacatgcagattcgggtgaatgcggagcctgctgctttctacagagctgggcatgtggagcacatgaggacagaccgcaggctgcagagactccttcagacccagagggagctgatgtccaaggagctctggctgtacatcggcatcaacacctttgactatctgggcagcatcctgagttacgttgtcatcgcaatccccattttcagcggggtctatggagacctgagtcccgcagagcttagcaccctggtcagcaagaatgcctttgtgtgcatctacctcatcagctgcttcacccagctcatcgacctgtccacgacgctctcagatgtggctggctacacgcacagaattgggcagcttcgggagacgcttctggacatgtccctgaagtcacaggactgcgagatcctgggcgagagcgagtggggcttggacacacccccagggtggccagcggcagagccagcagacacagcatttctccttgagcgggtctccatctctgccccctcctctgacaaacccctaatcaaggatctgagcctaaagatctccgagggacagagcctgctcatcacaggcaacacgggcactggcaagacctccttgctccgggttctgggtggcctctggacgagtacacggggctcagtgcagatgctgacggactttgggccccatggggtgctattcctgccacaaaagccattcttcactgacgggacccttcgggagcagggtcagtctagttcagggggctcactcctccctcctcaaccccgcccacccacagctgggacctctggcactgtgacaagtctcaggtcctagagtcagggcaaaaggtgaggtggtgaagtggcccgggcctgggaactgctggctctaagaaccttctattcacatccatggattgggcccactactcatagcagctcctgaggcaggtaaatggggcaaggactcacgccaaataccacacgcgtatgtcaaacacccaaggtcggattctggggcccctgccctcaggaggctgtcagactgttccccctaaacacacttctgaaggttgtagggaccttgccctgctgtctgccggccagagcctctcccatctgacccaggccaggcgttcccacctctcctccttgggangttccantgggttctggangganggtgggctgtgtgcactccgtcttttgctcgccctcctaggttggtgtggtttttttcttttctcaggtgatatatcccctgaaggaggtctaccccgactcaggttctgccgatgatgagaggatcttgaggttcttggaattggcaggcctgtccaacttggtggcaaggacagagggcctggaccagcaggtggactggaactggtatgatgttctgtccccgggggagatgcaacggctctcctttgcccgactcttctacctgcagccgaagtacgcagtgcttgatgaagccaccagtgccctgacagaggaagtggagagcgagctctatcgcatcggccagcagctggggatgacgttcatcagtgtgggacatcggcagagccttgagaagtttcattccttggttctgaaactctgtggaggaggaagatgggagctgatgagaatcaaagtggaatgaagctctggcttttggaaggagagccacactgtggcgggtcggcggccctcaggagagaccaggaggactgacagcgaagatcgagctcaggttcgccacatagatcccgtgcaggagccacatgggtcctgtgcaggacccctagcagtggtgggctgagcccaggtctaggtttctgtgggggacactgaatctcccagtgttcagtctcccaggactctgctgcctcagccagagcctccatatgcttgaagtgctgattacctacaaatgatttcagatcatgtttgctaaagagaaatctggaagtgtgagatctgtaagaaatgaaagaaatgactcttggagtcaagagatctggaaatcttttaatcagttaaattgtgcagcaatagatttttaactttaactgaccatttaagttttttaataagttttttacaaagaaaagttaaacattaaaaagaattacagctttctgtcttctctatcatggaatgattttttttattgaatctccagatttgtatttgacagcttggtgggaagggaagcacactctgctgttctggaatcttatgcccagggtttttcacttctccccacatctccctttccacttgccagtgttgtgtagttagaacctgaaccactaacttctaggggcctttggtctgccctaccttaacccaaatgaaagtaaatccctttccccttagccaaaataaggttgggttttctaaaaaaatagtctatattagggaacaacaacagcaaattagacaaaacccagaaagcacaaagcatgaggtggagttactgtgcccaaagtcctcactcagaccagtgcccctccagttcagttgtctatgtattaccttccttaccttcataatgtttgccaggcttctgtacttctagtacttgagttacttaatatttttaaaaacaaaccttttaagtttaaatggatttttaagtgaaattttacacttaacatagatggaaagtaactaaaaataaatacaag

SEQ ID NO: 446379 - DNA, 2867 bp, Homo sapiens
cgcttccgggagagtccgcgtctcccgcaccttcctctctatcaaacgccgtctctgtggtagccggggccccgcccctcctcggactctacccagtactgaactaggggcagctgggctccagagtccctcgggtctcaggtcatggcggtcgcggggcccgcgcccggagctggcgccaggcccaggttagatctgcaatttctccagcggttcctgcagatactgaaggttttgtttccttcttggtcatcacaaaatgccttgatgttcctgacccttttgtgcctgaccctactggctgaagagctttgatcagttcacctgcaacctgctgtatgtgagctggaggaaggacctcactgagcaccttcaccgcctctacttccggggccgtgcgtactacaccctcaacgtgctgcgggatgacatcgataacccggaccagcgcatcagccaggacgtggagcgattctgccggcagctcagcagcatggccagcaagctcatcatctccccgttcaccctcgtctactacacttaccagtgcttccaaagcacaggctggctcgggcctgtgagcatcttcgggtatttcatcctggggaccgtggtgaacaaaactttgatgggccccattgtgatgaagctggtgcatcaggagaagctggagggagattttaggttcaagcacatgcagattcgggtgaatgcggagcctgctgctttctacagagctgggcatgtggagcacatgaggacagaccgcaggctgcagagactccttcagacccagagggagctgatgtccaaggagctctggctgtacatcggcatcaacacctttgactatctgggcagcatcctgagttacgttgtcatcgcaatccccattttcagcggggtctatggagacctgagtcccgcagagcttagcaccctggtcagcaagaatgcctttgtgtgcatctacctcatcagctgcttcacccagctcatcgacctgtccacgacgctctcagatgtggctggctacacgcacagaattgggcagcttcgggagacgcttctggacatgtccctgaagtcacaggactgcgagatcctgggcgagagcgagtggggcttggacacacccccagggtggccagcggcagagccagcagacacagcatttctccttgagcgggtctccatctctgccccctcctctgacaaacccctaatcaaggatctgagcctaaagatctccgagggacagagcctgctcatcacaggcaacacgggcactggcaagacctccttgctccgggttctgggtggcctctggacgagtacacggggctcagtgcagatgctgacggactttgggccccatggggtgctattcctgccacaaaagccattcttcactgacgggacccttcgggagcaggtgatatatcccctgaaggaggtctaccccgactcaggttctgccgatgatgagaggatcttgaggttcttggaattggcaggcctgtccaacttggtggcaaggacagagggcctggaccagcaggtggactggaactggtatgatgttctgtccccgggggagatgcaacggctctcctttgcccgactcttctacctgcagccgaagtacgcagtgcttgatgaagccaccagtgccctgacagaggaagtggagagcgagctctatcgcatcggccagcagctggggatgacgttcatcagtgtgggacatcggcagagccttgagaagtttcattccttggttctgaaactctgtggaggaggaagatgggagctgatgagaatcaaagtggaatgaagctctggcttttggaaggagagccacactgtggcgggtcggcggccctcaggagagaccaggaggactgacagcgaagatcgagctcaggttcgccacatagatcccgtgcaggagccacatgggtcctgtgcaggacccctagcagtggtgggctgagcccaggtctaggtttctgtgggggacactgaatctcccagtgttcagtctcccaggactctgctgcctcagccagagcctccatatgcttgaagtgctgattacctacaaatgatttcagatcatgtttgctaaagagaaatctggaagtgtgagatctgtaagaaatgaaagaaatgactcttggagtcaagagatctggaaatcttttaatcagttaaattgtgcagcaatagatttttaactttaactgaccatttaagttttttaataagttttttacaaagaaaagttaaacattaaaaagaattacagctttctgtcttctctatcatggaatgattttttttattgaatctccagatttgtatttgacagcttggtgggaagggaagcacactctgctgttctggaatcttatgcccagggtttttcacttctccccacatctccctttccacttgccagtgttgtgtagttagaacctgaaccactaacttctaggggcctttggtctgccctaccttaacccaaatgaaagtaaatccctttccccttagccaaaataaggttgggttttctaaaaaaatagtctatattagggaacaacaacagcaaattagacaaaacccagaaagcacaaagcatgaggtggagttactgtgcccaaagtcctcactcagaccagtgcccctccagttcagttgtctatgtattaccttccttaccttcataatgtttgccaggcttctgtacttctagtacttgagttacttaatatttttaaaaacaaaccttttaagtttaaatggatttttaagtgaaattttacacttaacatagatggaaagtaactaaaaataaatacaag

SEQ ID NO: 446380 - DNA, 3149 bp, Homo sapiens
cgcttccgggagagtccgcgtctcccgcaccttcctctctatcaaacgccgtctctgtggtagccggggccccgcccctcctcggactctacccagtactgaactaggggcagctgggctccagagtccctcgggtctcaggtcatggcggtcgcggggcccgcgcccggagctggcgccaggcccaggttagatctgcaatttctccagcggttcctgcagatactgaaggttttgtttccttcttggtcatcacaaaatgccttgatgttcctgacccttttgtgcctgaccctactggagcaatttgtgatctaccaggttggcttgatccccagtcagtactatggggtcctgggaaacaaagacttggaagggtttaagactctgacattcctggctgtcatgctcattgttctgaactccacgctgaagagctttgatcagttcacctgcaacctgctgtatgtgagctggaggaaggacctcactgagcaccttcaccgcctctacttccggggccgtgcgtactacaccctcaacgtgctgcgggatgacatcgataacccggaccagcgcatcagccaggacgtggagcgattctgccggcagctcagcagcatggccagcaagctcatcatctccccgttcaccctcgtctactacacttaccagtgcttccaaagcacaggctggctcgggcctgtgagcatcttcgggtatttcatcctggggaccgtggtgaacaaaactttgatgggccccattgtgatgaagctggtgcatcaggagaagctggagggagattttaggttcaagcacatgcagattcgggtgaatgcggagcctgctgctttctacagagctgggcatgtggagcacatgaggacagaccgcaggctgcagagactccttcagacccagagggagctgatgtccaaggagctctggctgtacatcggcatcaacacctttgactatctgggcagcatcctgagttacgttgtcatcgcaatccccattttcagcggggtctatggagacctgagtcccgcagagcttagcaccctggtcagcaagaatgcctttgtgtgcatctacctcatcagctgcttcacccagctcatcgacctgtccacgacgctctcagatgtggctggctacacgcacagaattgggcagcttcgggagacgcttctggacatgtccctgaagtcacaggactgcgagatcctgggcgagagcgagtggggcttggacacacccccagggtggccagcggcagagccagcagacacagcatttctccttgagcgggtctccatctctgccccctcctctgacaaacccctaatcaaggatctgagcctaaagatctccgagggacagagcctgctcatcacaggcaacacgggcactggcaagacctccttgctccgggttctgggtggcctctggacgagtacacggggctcagtgcagatgctgacggactttgggccccatggggtgctattcctgccacaaaagccattcttcactgacgggacccttcgggagcaggtgatatatcccctgaaggaggtctaccccgactcaggttctgccgatgatgagaggatcttgaggttcttggaattggcaggcctgtccaacttggtggcaaggacagagggcctggaccagcaggtggactggaactggtatgatgttctgtccccgggggagatgcaacggctctcctttgcccgactcttctacctgcagccgaagtacgcagtgcttgatgaagccaccagtgccctgacagaggaagtggagagcgagctctatcgcatcggccagcagctggggatgacgttcatcagtgtgggacatcggcagagccttgagaagtttcattccttggttctgaaactctgtggaggaggaagatgggagctgatgagaatcaaagtggaatgaagctctggcttttggaaggagagccacactgtggcgggtcggcggccctcaggagagaccaggaggactgacagcgaagatcgagctcaggttcgccacatagatcccgtgcaggagccacatgggtcctgtgcaggacccctagcagtggtgggctgagcccaggtctaggtttctgtgggggacactgaatctcccagtgttcagtctcccaggactctgctgcctcagccagagcctccatatgcttgaagtgctgattacctacaaatgatttcagatcatgtttgctaaagagaaatctggaagtgtgagatctgtaagaaatgaaagaaatgactcttggagtcaagagatctggaaatcttttaatcagttaaattgtgcagcaatagatttttaactttaactgaccatttaagttttttaataagttttttacaaagaaaagttaaacattaaaaagaattacagctttctgtcttctctatcatggaatgattttttttattgaatctccagatttgtatttgacagcttggtgggaagggaagcacactctgctgttctggaatcttatgcccagggtttttcacttctccccacatctccctttccacttgccagtgttgtgtagttagaacctgaaccactaacttctaggggcctttggtctgccctaccttaacccaaatgaaagtaaatccctttccccttagccaaaataaggttgggttttctaaaaaaatagtctatattagggaacaacaacagcaaattagacaaaacccagaaagcacaaagcatgaggtggagttactgtgcccaaagtcctcactcagaccagtgcccctccagttcagttgtctatgtattaccttccttaccttcataatgtttgccaggcttctgtacttctagtacttgagttacttaatatttttaaaaacaaaccttttaagtttaaatggatttttaagtgaaattttacacttaacatagatggaaagtaactaaaaataaatacaagaaaaaccatcggtgttattaacttacggctagatgctgttgcctgcatagactctgggcctgaggcttgttcattttgtaaaaaagagaggtgaggagttagacggactggcactcaactgagatttttctccttaataaaatcagaaagatgg

SEQ ID NO: 446381 - DNA, 3028 bp, Homo sapiens
gcaggctggtacggtcggagtgtgggatcggtcgcggggccgcgcccggagctggcgccaggcccaggttagatctgcaatttctccagcggttcctgcagatactgaaggttttgtttccttcttggtcatcacaaaatgccttgatgttcctgacccttttgtgcctgaccctactggagcaatttgtgatctaccaggttggcttgatccccagtcagtactatggggtcctgggaaacaaagacttggaagggtttaagactctgacattcctggctgtcatgctcattgttctgaactccacgctgaagagctttgatcagttcacctgcaacctgctgtatgtgagctggaggaaggacctcactgagcaccttcaccgcctctacttccggggccgtgcgtactacaccctcaacgtgctgcgggatgacatcgataacccggaccagcgcatcagccaggacgtggagcgattctgccggcagctcagcagcatggccagcaagctcatcatctccccgttcaccctcgtctactacacttaccagtgcttccaaagcacaggctggctcgggcctgtgagcatcttcgggtatttcatcctggggaccgtggtgaacaaaactttgatgggccccattgtgatgaagctggtgcatcaggagaagctggagggagattttaggttcaagcacatgcagattcgggtgaatgcggagcctgctgctttctacagagctgggcatgtggagcacatgaggacagaccgcaggctgcagagactccttcagacccagagggagctgatgtccaaggagctctggctgtacatcggcatcaacacctttgactatctgggcagcatcctgagttacgttgtcatcgcaatccccattttcagcggggtctatggagacctgagtcccgcagagcttagcaccctggtcagcaagaatgcctttgtgtgcatctacctcatcagctgcttcacccagctcatcgacctgtccacgacgctctcagatgtggctggctacacgcacagaattgggcagcttcgggagacgcttctggacatgtccctgaagtcacaggactgcgagatcctgggcgagagcgagtggggcttggacacacccccagggtggccagcggcagagccagcagacacagcatttctccttgagcgggtctccatctctgccccctcctctgacaaacccctaatcaaggatctgagcctaaagatctccgagggacagagcctgctcatcacaggcaacacgggcactggcaagacctccttgctccgggttctgggtggcctctggacgagtacacggggctcagtgcagatgctgacggactttgggccccatggggtgctattcctgccacaaaagccattcttcactgacgggacccttcgggagcaggtgatatatcccctgaaggaggtctaccccgactcaggttctgccgatgatgagaggatcttgaggttcttggaattggcaggcctgtccaacttggtggcaaggacagagggcctggaccagcaggtggactggaactggtatgatgttctgtccccgggggagatgcaacggctctcctttgcccgactcttctacctgcagccgaagtacgcagtgcttgatgaagccaccagtgccctgacagaggaagtggagagcgagctctatcgcatcggccagcagctggggatgacgttcatcagtgtgggacatcggcagagccttgagaagtttcattccttggttctgaaactctgtggaggaggaagatgggagctgatgagaatcaaagtggaatgaagctctggcttttggaaggagagccacactgtggcgggtcggcggccctcaggagagaccaggaggactgacagcgaagatcgagctcaggttcgccacatagatcccgtgcaggagccacatgggtcctgtgcaggacccctagcagtggtgggctgagcccaggtctaggtttctgtgggggacactgaatctcccagtgttcagtctcccaggactctgctgcctcagccagagcctccatatgcttgaagtgctgattacctacaaatgatttcagatcatgtttgctaaagagaaatctggaagtgtgagatctgtaagaaatgaaagaaatgactcttggagtcaagagatctggaaatcttttaatcagttaaattgtgcagcaatagatttttaactttaactgaccatttaagttttttaataagttttttacaaagaaaagttaaacattaaaaagaattacagctttctgtcttctctatcatggaatgattttttttattgaatctccagatttgtatttgacagcttggtgggaagggaagcacactctgctgttctggaatcttatgcccagggtttttcacttctccccacatctccctttccacttgccagtgttgtgtagttagaacctgaaccactaacttctaggggcctttggtctgccctaccttaacccaaatgaaagtaaatccctttccccttagccaaaataaggttgggttttctaaaaaaatagtctatattagggaacaacaacagcaaattagacaaaacccagaaagcacaaagcatgaggtggagttactgtgcccaaagtcctcactcagaccagtgcccctccagttcagttgtctatgtattaccttccttaccttcataatgtttgccaggcttctgtacttctagtacttgagttacttaatatttttaaaaacaaaccttttaagtttaaatggatttttaagtgaaattttacacttaacatagatggaaagtaactaaaaataaatacaagaaaaaccatcggtgttattaacttacggctagatgctgttgcctgcatagactctgggcctgaggcttgttcattttgtaaaaaagagaggtgaggagttagacggactggcactcaactgagatttttctccttaataaaatcagaaagatgg

SEQ ID NO: 446382 - DNA, 4111 bp, Homo sapiens
  misc_feature (1980)..(1980): n is a, c, g, or t
  misc_feature (1987)..(1987): n is a, c, g, or t
  misc_feature (1999)..(1999): n is a, c, g, or t
  misc_feature (2003)..(2003): n is a, c, g, or t
cgcttccgggagagtccgcgtctcccgcaccttcctctctatcaaacgccgtctctgtggtagccggggccccgcccctcctcggactctacccagtactgaactaggggcagctgggctccagagtccctcgggtctcaggtcatggcggtcgcggggcccgcgcccggagctggcgccaggcccaggttagatctgcaatttctccagcggttcctgcagatactgaaggttttgtttccttcttggtcatcacaaaatgccttgatgttcctgacccttttgtgcctgaccctactggagcaatttgtgatctaccaggttggcttgatccccagtcagtactatggggtcctgggaaacaaagacttggaagggtttaagactctgacattcctggctgtcatgctcattgttctgaactccacgctgaagagctttgatcagttcacctgcaacctgctgtatgtgagctggaggaaggacctcactgagcaccttcaccgcctctacttccggggccgtgcgtactacaccctcaacgtgctgcgggatgacatcgataacccggaccagcgcatcagccaggacgtggagcgattctgccggcagctcagcagcatggccagcaagctcatcatctccccgttcaccctcgtctactacacttaccagtgcttccaaagcacaggctggctcgggcctgtgagcatcttcgggtatttcatcctggggaccgtggtgaacaaaactttgatgggccccattgtgatgaagctggtgcatcaggagaagctggagggagattttaggttcaagcacatgcagattcgggtgaatgcggagcctgctgctttctacagagctgggcatgtggagcacatgaggacagaccgcaggctgcagagactccttcagacccagagggagctgatgtccaaggagctctggctgtacatcggcatcaacacctttgactatctgggcagcatcctgagttacgttgtcatcgcaatccccattttcagcggggtctatggagacctgagtcccgcagagcttagcaccctggtcagcaagaatgcctttgtgtgcatctacctcatcagctgcttcacccagctcatcgacctgtccacgacgctctcagatgtggctggctacacgcacagaattgggcagcttcgggagacgcttctggacatgtccctgaagtcacaggactgcgagatcctgggcgagagcgagtggggcttggacacacccccagggtggccagcggcagagccagcagacacagcatttctccttgagcgggtctccatctctgccccctcctctgacaaacccctaatcaaggatctgagcctaaagatctccgagggacagagcctgctcatcacaggcaacacgggcactggcaagacctccttgctccgggttctgggtggcctctggacgagtacacggggctcagtgcagatgctgacggactttgggccccatggggtgctattcctgccacaaaagccattcttcactgacgggacccttcgggagcagggtcagtctagttcagggggctcactcctccctcctcaaccccgcccacccacagctgggacctctggcactgtgacaagtctcaggtcctagagtcagggcaaaaggtgaggtggtgaagtggcccgggcctgggaactgctggctctaagaaccttctattcacatccatggattgggcccactactcatagcagctcctgaggcaggtaaatggggcaaggactcacgccaaataccacacgcgtatgtcaaacacccaaggtcggattctggggcccctgccctcaggaggctgtcagactgttccccctaaacacacttctgaaggttgtagggaccttgccctgctgtctgccggccagagcctctcccatctgacccaggccaggcgttcccacctctcctccttgggangttccantgggttctggangganggtgggctgtgtgcactccgtcttttgctcgccctcctaggttggtgtggtttttttcttttctcaggtgatatatcccctgaaggaggtctaccccgactcaggttctgccgatgatgagaggatcttgaggttcttggaattggcaggcctggtaagtggggagagggaccctcaggacccgagcccacctgggagcaccagctacaggtaggcaggtgctggccctgctatgctgggcccaggactggaagtctgaacctggggtggagaatgggagtatcagttgacagtgtgtgctgttggccaggtttaggcacgaagggggtagtgctctcattggagaattttaagacaagaataggattgatgaaggcggtttgctttttactgtcatcatgctccagcaagtctaaacagtgtcattggtagaatattcctctctgcctggggcagactgtcccacagtcccccgccttggtatgccactggggcatatatttgtcttagaggtgtgtgtgtatgctggggagtgagggaggttccccatgatggcaggtagcagggctggccatttcatggacatcctgccctctgggtctgttacagtccaacttggtggcaaggacagagggcctggaccagcaggtggactggaactggtatgatgttctgtccccgggggagatgcaacggctctcctttgcccgactcttctacctgcagccgaagtacgcagtgcttgatgaagccaccagtgccctgacagaggaagtggagagcgagctctatcgcatcggccagcagctggggatgacgttcatcagtgtgggacatcggcagagccttgagaagtttcattccttggttctgaaactctgtggaggaggaagatgggagctgatgagaatcaaagtggaatgaagctctggcttttggaaggagagccacactgtggcgggtcggcggccctcaggagagaccaggaggactgacagcgaagatcgagctcaggttcgccacatagatcccgtgcaggagccacatgggtcctgtgcaggacccctagcagtggtgggctgagcccaggtctaggtttctgtgggggacactgaatctcccagtgttcagtctcccaggactctgctgcctcagccagagcctccatatgcttgaagtgctgattacctacaaatgatttcagatcatgtttgctaaagagaaatctggaagtgtgagatctgtaagaaatgaaagaaatgactcttggagtcaagagatctggaaatcttttaatcagttaaattgtgcagcaatagatttttaactttaactgaccatttaagttttttaataagttttttacaaagaaaagttaaacattaaaaagaattacagctttctgtcttctctatcatggaatgattttttttattgaatctccagatttgtatttgacagcttggtgggaagggaagcacactctgctgttctggaatcttatgcccagggtttttcacttctccccacatctccctttccacttgccagtgttgtgtagttagaacctgaaccactaacttctaggggcctttggtctgccctaccttaacccaaatgaaagtaaatccctttccccttagccaaaataaggttgggttttctaaaaaaatagtctatattagggaacaacaacagcaaattagacaaaacccagaaagcacaaagcatgaggtggagttactgtgcccaaagtcctcactcagaccagtgcccctccagttcagttgtctatgtattaccttccttaccttcataatgtttgccaggcttctgtacttctagtacttgagttacttaatatttttaaaaacaaaccttttaagtttaaatggatttttaagtgaaattttacacttaacatagatggaaagtaactaaaaataaatacaagaaaaaccatcggtgttattaacttacggctagatgctgttgcctgcatagactctgggcctgaggcttgttcattttgtaaaaaagagaggtgaggagttagacggactggcactcaactgagatttttctccttaataaaatcagaaagatgg

SEQ ID NO: 446383 - DNA, 3198 bp, Homo sapiens
cactttgttggttggggtacctctcagctcaagcttagctttggtgcaaagatgcgtgggaggctgctgctgctgcctaacttctaggcctctttctgatggctatggcttccatcctgcctctgccccctgagtagctgggactacaggtgtgcctcacagcctggagctttcacagccagataactaaaggggccaggctagggcttatataagagaaatttgggaggattgagataaaggggatagtcttcttgatcatccaaaacagctcatctaccttcaagtttttctttggctctgctcagagctggctcaggcccctgggtactggacctttcagttcccactttttcaggggattaactaaggcaccgtaagatgcaactctctagaaccctgtttaaaggccctgggatttagttgcccctaggaaaccagccttgtctggttccctcttcccatagggtcagtgttcacagcactgtgaggcaaggtcaagagcagaggtgatgtgaaagtttcttgttctctctacctttgggcccatctccctgggtccagctactctgtgtcattggctccagggaccagcgcatcagccaggacgtggagcgattctgccggcagctcagcagcatggccagcaagctcatcatctccccgttcaccctcgtctactacacttaccagtgcttccaaagcacaggctggctcgggcctgtgagcatcttcgggtatttcatcctggggaccgtggtgaacaaaactttgatgggccccattgtgatgaagctggtgcatcaggagaagctggagggagattttaggttcaagcacatgcagattcgggtgaatgcggagcctgctgctttctacagccctgtggacatcccagcctttccttgtcagagctgggcatgtggagcacatgaggacagaccgcaggctgcagagactccttcagacccagagggagctgatgtccaaggagctctggctgtacatcggcatcaacacctttgactatctgggcagcatcctgagttacgttgtcatcgcaatccccattttcagcggggtctatggagacctgagtcccgcagagcttagcaccctggtcagcaagaatgcctttgtgtgcatctacctcatcagctgcttcacccagctcatcgacctgtccacgacgctctcagatgtggctggctacacgcacagaattgggcagcttcgggagacgcttctggacatgtccctgaagtcacaggactgcgagatcctgggcgagagcgagtggggcttggacacacccccagggtggccagcggcagagccagcagacacagcatttctccttgagcgggtctccatctctgccccctcctctgacaaacccctaatcaaggatctgagcctaaagatctccgagggacagagcctgctcatcacaggcaacacgggcactggcaagacctccttgctccgggttctgggtggcctctggacgagtacacggggctcagtgcagatgctgacggactttgggccccatggggtgctattcctgccacaaaagccattcttcactgacgggacccttcgggagcaggtgatatatcccctgaaggaggtctaccccgactcaggttctgccgatgatgagaggatcttgaggttcttggaattggcaggcctgtccaacttggtggcaaggacagagggcctggaccagcaggtggactggaactggtatgatgttctgtccccgggggagatgcaacggctctcctttgcccgactcttctacctgcagccgaagtacgcagtgcttgatgaagccaccagtgccctgacagaggaagtggagagcgagctctatcgcatcggccagcagctggggatgacgttcatcagtgtgggacatcggcagagccttgagaagtttcattccttggttctgaaactctgtggaggaggaagatgggagctgatgagaatcaaagtggaatgaagctctggcttttggaaggagagccacactgtggcgggtcggcggccctcaggagagaccaggaggactgacagcgaagatcgagctcaggttcgccacatagatcccgtgcaggagccacatgggtcctgtgcaggacccctagcagtggtgggctgagcccaggtctaggtttctgtgggggacactgaatctcccagtgttcagtctcccaggactctgctgcctcagccagagcctccatatgcttgaagtgctgattacctacaaatgatttcagatcatgtttgctaaagagaaatctggaagtgtgagatctgtaagaaatgaaagaaatgactcttggagtcaagagatctggaaatcttttaatcagttaaattgtgcagcaatagatttttaactttaactgaccatttaagttttttaataagttttttacaaagaaaagttaaacattaaaaagaattacagctttctgtcttctctatcatggaatgattttttttattgaatctccagatttgtatttgacagcttggtgggaagggaagcacactctgctgttctggaatcttatgcccagggtttttcacttctccccacatctccctttccacttgccagtgttgtgtagttagaacctgaaccactaacttctaggggcctttggtctgccctaccttaacccaaatgaaagtaaatccctttccccttagccaaaataaggttgggttttctaaaaaaatagtctatattagggaacaacaacagcaaattagacaaaacccagaaagcacaaagcatgaggtggagttactgtgcccaaagtcctcactcagaccagtgcccctccagttcagttgtctatgtattaccttccttaccttcataatgtttgccaggcttctgtacttctagtacttgagttacttaatatttttaaaaacaaaccttttaagtttaaatggatttttaagtgaaattttacacttaacatagatggaaagtaactaaaaataaatacaagaaaaaccatcggtgttattaacttacggctagatgctgttgcctgcatagactctgggcctgaggcttgttcattttgtaaaaaagagaggtgaggagttagacggactggcactcaactgagatttttctccttaataaaatcagaaagatgg

SEQ ID NO: 446384 - DNA, 1869 bp, Homo sapiens
tagaacaagcagaggagaagcaccgtccttctctggagatcgcctcatcctctttctcgttggttatccccctctcgtcgctccatatttcggtgtctccccttcttgcaccttctgttcgccactcttgtgggtgtgaccccctctgccaccgccccggcaaccccatctccagttttcgccctggccgtacatcgggtcatccagtcggaccgcctttgctcccggggtgctatctccaccgaccatggcttccgtgtccgggccctcgggtgcagctgatatatcccctcacgaggtcttccccgactccccttcggcctgatgatgagaggatccttgaggctcattggaatagacatgccctgtccaacctcggtgacaaacgccagaggtccgggaaccaccgttgactggccactggtatgatgttctgtccccgggggagatgcaacggctctcctttgcccgactcttctacctgcagccgaagtacgcagtgcttgatgaagccaccagtgccctgacagaggaagtggagagcgagctctatcgcatcggccagcagctggggatgacgttcatcagtgtgggacatcggcagagccttgagaagtttcattccttggttctgaaactctgtggaggaggaagatgggagctgatgagaatcaaagtggaatgaagctctggcttttggaaggagagccacactgtggcgggtcggcggccctcaggagagaccaggaggactgacagcgaagatcgagctcaggttcgccacatagatcccgtgcaggagccacatgggtcctgtgcaggacccctagcagtggtgggctgagcccaggtctaggtttctgtgggggacactgaatctcccagtgttcagtctcccaggactctgctgcctcagccagagcctccatatgcttgaagtgctgattacctacaaatgatttcagatcatgtttgctaaagagaaatctggaagtgtgagatctgtaagaaatgaaagaaatgactcttggagtcaagagatctggaaatcttttaatcagttaaattgtgcagcaatagatttttaactttaactgaccatttaagttttttaataagttttttacaaagaaaagttaaacattaaaaagaattacagctttctgtcttctctatcatggaatgattttttttattgaatctccagatttgtatttgacagcttggtgggaagggaagcacactctgctgttctggaatcttatgcccagggtttttcacttctccccacatctccctttccacttgccagtgttgtgtagttagaacctgaaccactaacttctaggggcctttggtctgccctaccttaacccaaatgaaagtaaatccctttccccttagccaaaataaggttgggttttctaaaaaaatagtctatattagggaacaacaacagcaaattagacaaaacccagaaagcacaaagcatgaggtggagttactgtgcccaaagtcctcactcagaccagtgcccctccagttcagttgtctatgtattaccttccttaccttcataatgtttgccaggcttctgtacttctagtacttgagttacttaatatttttaaaaacaaaccttttaagtttaaatggatttttaagtgaaattttacacttaacatagatggaaagtaactaaaaataaatacaagaaaaaccatcggtgttattaacttacggctagatgctgttgcctgcatagactctgggcctgaggcttgttcattttgtaaaaaagagaggtgaggagttagacggactggcactcaactgagatttttctccttaataaaatcagaaagatgg

SEQ ID NO: 446385 - DNA, 2339 bp, Homo sapiens
cgcttccgggagagtccgcgtctcccgcaccttcctctctatcaaacgccgtctctgtggtagccggggccccgcccctcctcggactctacccagtactgaactaggggcagctgggctccagagtccctcgggtctcaggtcatggcggtcgcggggcccgcgcccggagctggcgccaggcccaggttagatctgcaatttctccagcggttcctgcagatactgaaggttttgtttccttcttggtcatcacaaaatgccttgatgttcctgacccttttgtgcctgaccctactggagcaatttgtgatctaccaggttggcttgatccccagtcagtactatggggtcctgggaaacaaagacttggaagggtttaagactctgacattcctggctgtcatgctcattgttctgaactccacgctgaagagctttgatcagttcacctgcaacctgctgtatgtgagctggaggaaggacctcactgagcaccttcaccgcctctacttccggggccgtgcgtactacaccctcaacgtgctgcgggatgacatcgataacccggaccagcgcatcagccaggacgtggagcgattctgccggcagctcagcagcatggccagcaagctcatcatctccccgttcaccctcgtctactacacttaccagtgcttccaaagcacaggctggctcgggcctgtgagcatcttcgggtatttcatcctggggaccgtggtgaacaaaactttgatgggccccattgtgatgaagctggtgcatcaggagaagctggagggagattttaggttcaagcacatgcagattcgggtgaatgcggagcctgctgctttctacagagctgggcatgtggagcacatgaggacagaccgcaggctgcagagactccttcagacccagagggagctgatgtccaaggagctctggctgtacatcggcatcaacacctttgactatctgggcagcatcctgagttacgttgtcatcgcaatccccattttcagcggggtctatggagacctgagtcccgcagagcttagcaccctggtcagcaagaatgcctttgtgtgcatctacctcatcagctgcttcacccagctcatcgacctgtccacgacgctctcagatgtggctggctacacgcacagaattgggcagcttcgggagacgcttctggacatgtccctgaagtcacaggatgacagcgaagatcgagctcaggttcgccacatagatcccgtgcaggagccacatgggtcctgtgcaggacccctagcagtggtgggctgagcccaggtctaggtttctgtgggggacactgaatctcccagtgttcagtctcccaggactctgctgcctcagccagagcctccatatgcttgaagtgctgattacctacaaatgatttcagatcatgtttgctaaagagaaatctggaagtgtgagatctgtaagaaatgaaagaaatgactcttggagtcaagagatctggaaatcttttaatcagttaaattgtgcagcaatagatttttaactttaactgaccatttaagttttttaataagttttttacaaagaaaagttaaacattaaaaagaattacagctttctgtcttctctatcatggaatgattttttttattgaatctccagatttgtatttgacagcttggtgggaagggaagcacactctgctgttctggaatcttatgcccagggtttttcacttctccccacatctccctttccacttgccagtgttgtgtagttagaacctgaaccactaacttctaggggcctttggtctgccctaccttaacccaaatgaaagtaaatccctttccccttagccaaaataaggttgggttttctaaaaaaatagtctatattagggaacaacaacagcaaattagacaaaacccagaaagcacaaagcatgaggtggagttactgtgcccaaagtcctcactcagaccagtgcccctccagttcagttgtctatgtattaccttccttaccttcataatgtttgccaggcttctgtacttctagtacttgagttacttaatatttttaaaaacaaaccttttaagtttaaatggatttttaagtgaaattttacacttaacatagatggaaagtaactaaaaataaatacaagaaaaaccatcggtgttattaacttacggctagatgctgttgcctgcatagactctgggcctgaggcttgttcattttgtaaaaaagagaggtgaggagttagacggactggcactcaactgagatttttctccttaataaaatcagaaagatgg

SEQ ID NO: 446386 - DNA, 2910 bp, Homo sapiens
cgcttccgggagagtccgcgtctcccgcaccttcctctctatcaaacgccgtctctgtggtagccggggccccgcccctcctcggactctacccagtactgaactaggggcagctgggctccagagtccctcgggtctcaggtcatggcggtcgcggggcccgcgcccggagctggcgccaggcccaggttagatctgcaatttctccagcggttcctgcagatactgaaggttttgtttccttcttggtcatcacaaaatgccttgatgttcctgacccttttgtgcctgaccctactggagcaatttgtgatctaccaggttggcttgatccccagtcagtactatggggtcctgggaaacaaagacttggaagggtttaagactctgacattcctggctgtcatgctcattgttctgaactccacgctgaagagctttgatcagttcacctgcaacctgctgtatgtgagctggaggaaggacctcactgagcaccttcaccgcctctacttccggggccgtgcgtactacaccctcaacgtgctgcgggatgacatcgataacccggaccagcgcatcagccaggacgtggagcgattctgccggcagctcagcagcatggccagcaagctcatcatctccccgttcaccctcgtctactacacttaccagtgcttccaaagcacaggctggctcgggcctgtgagcatcttcgggtatttcatcctggggaccgtggtgaacaaaactttgatgggccccattgtgatgaagctggtgcatcaggagaagctggagggagattttaggttcaagcacatgcagattcgggtgaatgcggagcctgctgctttctacagagctgggcatgtggagcacatgaggacagaccgcaggctgcagagactccttcagacccagagggagctgatgtccaaggagctctggctgtacatcggcatcaacacctttgactatctgggcagcatcctgagttacgttgtcatcgcaatccccattttcagcggggtctatggagacctgagtcccgcagagcttagcaccctggtcagcaagaatgcctttgtgtgcatctacctcatcagctgcttcacccagctcatcgacctgtccacgacgctctcagatgtggctggctacacgcacagaattgggcagcttcgggagacgcttctggacatgtccctgaagtcacaggactgcgagatcctgggcgagagcgagtggggcttggacacacccccagggtggccagcggcagagccagcagacacagcatttctccttgagcgggtctccatctctgccccctcctctgacaaacccctaatcaaggatctgagcctaaagatctccgagggacagagcctgctcatcacaggcaacacgggcactggcaagacctccttgctccgggttctgggtggcctctggacgagtacacggggctcagtgcagatgctgacggactttgggccccatggggtgctattcctgccacaaaagccattcttcactgacgggacccttcgggagcaggtgatatatcccctgaaggaggtctaccccgactcaggttctgccgatgatgagaggatcttgaggttcttggaattggcaggcctgtccaacttggtggcaaggacagagggcctggaccagcaggtggactggaactggtatgatgttctgtccccgggggagatgcaacggctctcctttgcccgactcttctacctgcagccgaagtacgcagtgcttgatgaagccaccagtgccctgacagaggaagtggagagcgagctctatcgcatcggccagcagctggggatgacgttcatcagtgtgggacatcggcagagccttgagaagtttcattccttggttctgaaactctgtggaggaggaagatgggagctgatgagaatcaaagtggaatgaagcatatgcttgaagtgctgattacctacaaatgatttcagatcatgtttgctaaagagaaatctggaagtgtgagatctgtaagaaatgaaagaaatgactcttggagtcaagagatctggaaatcttttaatcagttaaattgtgcagcaatagatttttaactttaactgaccatttaagttttttaataagttttttacaaagaaaagttaaacattaaaaagaattacagctttctgtcttctctatcatggaatgattttttttattgaatctccagatttgtatttgacagcttggtgggaagggaagcacactctgctgttctggaatcttatgcccagggtttttcacttctccccacatctccctttccacttgccagtgttgtgtagttagaacctgaaccactaacttctaggggcctttggtctgccctaccttaacccaaatgaaagtaaatccctttccccttagccaaaataaggttgggttttctaaaaaaatagtctatattagggaacaacaacagcaaattagacaaaacccagaaagcacaaagcatgaggtggagttactgtgcccaaagtcctcactcagaccagtgcccctccagttcagttgtctatgtattaccttccttaccttcataatgtttgccaggcttctgtacttctagtacttgagttacttaatatttttaaaaacaaaccttttaagtttaaatggatttttaagtgaaattttacacttaacatagatggaaagtaactaaaaataaatacaagaaaaaccatcggtgttattaacttacggctagatgctgttgcctgcatagactctgggcctgaggcttgttcattttgtaaaaaagagaggtgaggagttagacggactggcactcaactgagatttttctccttaataaaatcagaaagatgg

SEQ ID NO: 446387 - DNA, 1934 bp, Homo sapiens
cgcttccgggagagtccgcgtctcccgcaccttcctctctatcaaacgccgtctctgtggtagccggggccccgcccctcctcggactctacccagtactgaactaggggcagctgggctccagagtccctcgggtctcaggtcatggcggtcgcggggcccgcgcccggagctggcgccaggcccaggttagatctgcaatttctccagcggttcctgcagatactgaaggttttgtttccttcttggtcatcacaaaatgccttgatgttcctgacccttttgtgcctgaccctactggagcaatttgtgatctaccaggttggcttgatccccagtcagtactatggggtcctgggaaacaaagacttggaagggtttaagactctgacattcctggctgtcatgctcattgttctgaactccacgctgaagagctttgatcagttcacctgcaacctgctgtatgtgagctggaggaaggacctcactgagcaccttcaccgcctctacttccggggccgtgcgtactacaccctcaacgtgctgcgggatgacatcgataacccggaccagcgcatcagccaggacgtggagcgattctgccggcagctcagcagcatggccagcaagctcatcatctccccgttcaccctcgtctactacacttaccagtgcttccaaagcacaggctggctcgggcctgtgagcatcttcgggtatttcatcctggggaccgtggtgaacaaaactttgatgggccccattgtgatgaagctggtgcatcaggagaagctggagggagattttaggttcaagcacatgcagattcgggtgaatgcggagcctgctgctttctacaggtgagtctggagagatggttccccttctgccttgccagagctgagagtggagaaggacaagatgaatcctcaaacctcccaccaccaccgagctcaggggctgagtgttgtcacacttggctgtgaccctctccctctacctccccctgcccttgcctgcctcatccttaggtccaggggtttgcttctgaagcttggtggttcctttactgggccagctttagtcttagtggctagcgtggggcctgaaattgtcaaatgaatgaatgcctcatcctcttgctggtgactgtaagacatccgtctgcctctgctcttctgtctgttaagaagctttcttgccagtgcctgaggttcaagcctgatcctttgtctccgtagcgtgggatggaatgggagcttctcagaaaaccaggagacctgctccccacaatgctgtctaatggagccaagcgtctggtctcctgacggcagcagcaggagcagcagcagcggcatgaaatcccatcccttccctccagggccagaaccggtccctgtgctctgccttatgtgaggcctctgaaatcagcgttaggattgatagtgcaggcagaggtttgcgtttaagaagtggaagctactccttggctctgtacttggggtggatgtgatagccctgggacctttgctcctcagtctctgctgcagtttgcaacctccaccacttgagggcaccaagaatactgggaatctgcgctggggtggggttgtgaggtgggcagggctgggtgtgtaaaaaagttgcttttggaggccgggcatggtggctcatgcctgtaatcccagcactttgggaggccgaggcgggtggattgcctgaggtcaagagttcgagaccagccatggccaacatggtgaaaccctgtctctactaaaaatacaaaaaattagctgagcatggtggcgggcacctgtaatcccagctactggggaggctgaggcaggagaatcacttgaatccgggaggcagaggttgcagtaaggcaagatcctgccattgcactccagcctgggtgacagagcaagact

SEQ ID NO: 446388 - DNA, 3130 bp, Homo sapiens
tcccgcgaaggagaagcgcgcttttttccctggcgggggatttggctagaaggctgggccggcagcggttgtgaggagttagctcgcggcattgcaggctctgagaggaggggacccggttcccgggtgagtgtccaggcatgccagcggaacggcccgcgggcagcggcggctcggaggctccagcaatggttgaacaactggacactgctgtgattaccccggccatgctagaagaggaagaacagcttgaagctgctggactagagagagagcggaagatgctggaaaaggctcgcatgtcttgggatagagagtcgacagaaattcggtaccgtagacttcaacatttgcttgaaaaaagcaatatctactccaaatttttattgacgaaaatggaacagcaacaattagaggaacagaagaagaaagaaaaattggagagaaaaaaggagtctttaaaagttaaaaagggtaaaaattcaattgatgcaagtgaagagaagccagttatgaggaaaaaaagaggaagagaagatgaatcatacaatatttcagaggtcatgtcaaaagaggaaattttgtctgtggctaaaaaaaataaaaaggagaatgaggatgaaaactcctcctctactaatctctgtgtggaagatcttcagaaaaataaagattcgaatagtataattaaagatagattgtctgaaacggttaggcagaatactaaattcttttttgacccagtccggaagtgtaatggtcagccagtaccttttcaacaaccaaagcacttcactggaggagtgatgcgatggtaccaagtagaaggcatggaatggcttaggatgctttgggaaaatggaattaatggcattttagcagatgaaatgggattgggtaagacagttcagtgcattgctactattgcattgatgattcagagaggagtaccaggaccttttcttgtctgtggccctttgtctacacttcctaactggatggctgaattcaaaagatttacaccagatatccctacaatgttatatcatggaacccaggaggaacgtcaaaaattggtaagaaatatttacaaacggaaagggactttgcagattcatcctgtggtaatcacgtcatttgaaatagccatgagagaccgaaatgcgttacagcattgctattggaaatacttaatagtagatgaaggacacaggattaagaatatgaagtgccgtctaatcagggagttaaaacgattcaatgctgataacaaacttcttttgactggtactcccttgcaaaacaatttatcagaactttggtcattgctaaactttttgttgccagatgtatttgatgacttgaaaagctttgagtcttggttgacatcactagtctttctgaaactgctgaagatattatgctaaagaaagagaacagaatgtattgcatatgctgcaccagattttaacacctttcttatgagaagactgaagtctgatgttgctcttgaagttcctcctaaacgagaagtagtcgtttatgctccactttcaaagaagcaggagatcttttatacagccattgtgaaccgtacaattgcaaacatgtttggatccagtgagaaagaaacaattgagttaagtcctactggtcgaccaaaacgacgaactagaaaatcaataaattacagcaaaatagatgatttccctaatgaattggaaaaactgatcagtcaaatacagccagaggtggaccgagaaagagctgttgtggaagtgaatatccctgtagaatctgaagttaatctgaagctgcagaatataatgatgctacttcgtaaatgttgtaatcatccatatttgattgaatatcctatagaccctgttacacaagaatttaagatcgatgaagaattggtaacaaattctgggaagttcttgattttggatcgaatgctgccagaactaaaaaaaagaggtcacaaggtgctgcttttttcacaaatgacaagcatgttggacattttgatggattactgccatctcagagatttcaacttcagcaggcttgatgggtccatgtcttactcagagagagaaaaaaacatgcacagcttcaacacggatccagaggtgtttatcttcttagtgagtacacgagctggtggcctgggcattaatctgactgcagcagatacagttatcatttatgatagtgattggaacccccagtcggatcttcaggcccaggatagatgtcatagaattggtcagacaaagccagttgttgtttatcgccttgttacagcaaatactatcgatcagaaaattgtggaaagagcagctgctaaaaggaaactggaaaagttgatcatccataaaaatcatttcaaaggtggtcagtctggattaaatctgtctaagaatttcttagatcctaaggaattaatggaattattaaaatctagagattatgaaagggaaataaaaggatcaagagagaaggtcattagtgataaagatctagagttgttgttagatcgaagtgatcttattgatcaaatgaatgcttcaggaccaattaaagagaagatggggatattcaagatattagaaaattctgaagattccagtcctgaatgtttgttttaaagtggagctcaagaatagcttttaaaagttcttatttacatctagtgatttccctgtattgggtttgaaatactgattgtccacttcaccttttttattatatcagttgacatgtaactagtaccatgcgtacttaaatagatggtaattttctgagccttaccaagaacaaagaagtatccatattaagtttagattttcagttaatttttgagactgagtagtattcttggatacaggctgatgtgtacttaaccacttccagatttatacagtcttcctgtggaagtttagtaaatgtctttttccctcctttcttctagtaatgcagttcatgggctttaggtacttcagttatgaagtaggcttttcatggggagagattgggattatgctctctgttgtttaagaaactgtttgattttagagtctatttctatgagatagtttaccaaataaatgttccttataagatg

SEQ ID NO: 446389 - DNA, 2723 bp, Homo sapiens
atttcttaaggtggagtctcgcactgtcacctgggctggagtgcagtggcatgatctcggctcactacaacctttgcctcttgggttcaagtgagtctcctgtctcagcctcccaagtagctgggattacaagtgcccaccaccacgcccagctaattttttgtatttttagtagagacagggtttcaccatgttggccaggctggtctcaaactcctgaccttgtgatttgcctgacttggcctcccaaagtgctgggattacaggcttgagccaccatgcccggccaagactattttttagaaccataaccacaatacagttaccacacttttgaaagtcgatgggaattccttaatatttaaatttctcaataggctaatttttatttttagggatgggggcttgctgtattgacgagactggagtgcagtggctattcctgagtattgtcatagtgactacacctcaaacacctgggctcacatgatcctcctgcctcagtgtcccgagtagtagtgcagggactgtaggcacttaccgctgtgatctgcttagctcatacattttaaaaaaatagttggttcaaatcaggatccaaaaaagttacataaattgtgtttgattaatgcgtatcttgggtctcttttagatctagagtgtctctcatcttttttaagaaacattatttgttgaagaaaatgagtaattctgtataattccccacattctagactttactgattgtatccccatgatttctctgcctcttgtgtttcctgttaactatagtaactataagttaaatacggaagtttgtgattaaggtgtttttttatttttttttttatttttatttttttttgggagacaagatctttctctgttgcccagggtggagtgcagtggtgccatctcggctcattgaacctctgattgctgggctcaagcaatcctcccacctcatcctcctgagtagctgggactacaggcgtgtaccaccaagcccagccaacatttatattttttgtagagatgggatctcaccatgttgcccatgcttgatttttaataagaatacttcattggtggtatttatagattttgatttatttccaaattgttctttcaagtttcattttatctagtcattttacaggacagcttttatcagttcctggtataaaatccttttagcctcagccttataatatgaatatctatacatacataatacttcatacacacacgatatacatatattcccatgtatatatatgtgtgtgtgtcagccacttacatgtcctgttactcttctatgaatcttaaatttgatattgctgttttgaatctacttcatcccctatgccttctatattctctctgcttgaaatctaccctcactatcttgaatgatgaagcctggtgacaactttttagataattttatgtaagataattatttgctaagtcatccagtgacatactcgggtattgtttgtctccctaccagcagcatctagtaggtacttcaaaatcagagcactttattctgtatttttaattttttctgtctttgcctcttacccaggaatgcaaactcagatgtctatccacagaggcctaaagtgggctgtaacatggtttggcaaactttttctgtaaatagccagatagtaaatatttttagcttttgagtagttttgtgggcaactactcaaccctgtactctgctgttgttgcttgaaagcagccatagacaaaccgtaaacaagtgaggctgactttgttccaatttatcccatttctttgcttttaaaaaaatacctgtgtattcgcttagctggagttggtctacaggctgtagtttgctgaccccaggactagaggtttgttgccatgtgtgaatttgtacttaatctactcagattaaaagaaagaaaagctggaaaatcactgtatttgatgaaatatcccattgtataagtgttcccaaattagcctagaatgttatgaaatattatgagccagtaatgtctataggcttatttctgcctgaaggctactagttttatcttgagaatctcatcctcatttcctggcaaaatgagcacagaataaatgcttgttgaataaataaataaatgaacttcatacattattaatttgtttttgttttctcaaactactaggaaattttgtctgtggctaaaaaaaataaaaaggagaatgaggatgaaaactcctcctctactaatctctgtgtggaagatcttcagaaaaataaagattcgaatagtataattaaagatagattgtctgaaacggttaggcagaatactaaattcttttttgacccagtccggaagtgtaatggtcagccagtaccttttcaacaaccaaagcacttcactggaggagtgatgcgatggtaccaagtagaaggcatggaatggcttagggtaatgaattggaatttttaatacaagatactggttttatttctatagtagcctaatgatttgaggtaccacaacttgagtcatttctatcatgtttcactattatacatttgtatgtggatacttgctttctgatttctttaccctgaatttttagaagtagaaattaccttgttaatggcttccagcacttttatggctttgataaaggactttcctgtgttgttataatttatggtgtgaatatatcagctttaacat

SEQ ID NO: 446390 - DNA, 772 bp, Homo sapiens
ttaaattagtctagaatatgtttataaatttatttacatttggttgaaatgtattcttaaaacttattccacagtttccagtttgaggataaatgaggtctaaagacagtatgaacttgttaataatttttcctattgtcctttttagaaatcttacatatcctttagcctaattatagattggccctgcaagcatgtcactgtatcttttatgtcttcctgagtcttagcactttaaattcttctatatccttcactgtctttcttacagcaccctaaaagagtagcatgtgaactgttgctcttctctaaggtattttaggacatttttaaaataatatatgagtggttgtcatgctaaatactgtctaccacaactcatacaattaaagtggtcaaagaaaggtctctttcatttcttttttcattttaaaaagaaatgttatttgtaaaacagtatagtcataacacagatatggcagttttttagtttttttttttctttttcttcactgtgtcatccaggcagtagcgtgattataattcactgcagcctccaactcctgggcttgagggatcctctcactgagccttctgagcagctgggactgcaaacgtgtgccagtactcctggctaatttttaaatttttttgtagaattgaggtgtatgaaggcttttggtctccctgggagtgggtggaggcagccagggcttacctgtacactgacttgagaccagttgaataaaagtgcacaccttaaaaaaaaaaa

SEQ ID NO: 446391 - DNA, 896 bp, Homo sapiens
agtttagtgttttattttgatgtttcttcagatgccttgggatcatttactgttcctcatatttaagagcaaatgcttaaaaattcttagaaataccttcttgaaaagcctgcattcctaccacctctcaccacttcaacatgaaataatgatcccttacatctttttagtgtagttatataacttttgattggctcaataattacttttattatggctgtgtaagtattattaaagctttagataagccatggaatatgctgtgattttattttcattcttgtgcagctttttttttctccctgaagttaatacttaactgttttttacctaccagtaatttatatctaatcactctggaaatataagcccctcagtatattaaaacagatctcatgattcagtaataaacctccccctccaaatatatcccatcacctctactccctggaacattcttctagtttggactgtagaactgattccatctggaaccttcctttaccatactcctgggtattcctgttggctgtttcatgttttggaattactgtttaatgtgtcttgtgtctcccccccccccctttttttttcctttaagacagagtttcactcttgttgcccaggctggagtgcaatggcttgatctcggctcactgcaacctctgtctcccaggtttaaacgatcctcctgcctcaacctcccatagtagctagaattacaagcgcccaccaccatgcccagctaatttttgtatttttagtagggacagggtttcaccatgttggccacgctggtctcgaactcctgacctcaggtgatccaccctcctcggctccaagtgtggtctgggtgtggcatggccggtggctactttttccctgtacgcactggg

SEQ ID NO: 446392 - DNA, 592 bp, Homo sapiens
ctcaacgctttatacttcccctaatgtaatatttttctgtaatccccactactctggaggctgaagcaggggaatctcttgaacctggcaggcggaggttgagtgagccgagatgtaccagtgcacactatcctgggcgacaagagtgaaactccgtctccaaaaaacaaacaaacgaaatgccaactatgtttaattttgaaatttctcttctaaatggaaaaaaatggacagaagtagagcccttgggaaaaagcagagattatgaacaagttatagtagggaaatacagaaaaatattacatgtaggtaagtataatagtgaaaaattgtggatgtggctcaatggcaggaaacatattttttctcaagttaatcagtgccttttaacgtataatactataaaggtccttaataaaatcaatattctgaatccttgttttgtagggtaaaaattcaattgatgcaagtgaagagaagccagtgatctttgagataacacaggaaaggaattcaaaaatttatcagaggaatttagcaaacagatggaaataatttacaaaatcaaaaatcttgggactaagaaatacat

SEQ ID NO: 446393 - DNA, 4167 bp, Homo sapiens
tcccgcgaaggagaagcgcgcttttttccctggcgggggatttggctagaaggctgggccggcagcggttgtgaggagttagctcgcggcattgcaggctctgagaggaggggacccggttcccgggtgagtgtccaggcatgccagcggaacggcccgcgggcagcggcggctcggaggctccagcaatggttgaacaactggacactgctgtgattaccccggccatgctagaagaggaagaacagcttgaagctgctggactagagagagagcggaagatgctggaaaaggctcgcatgtcttgggatagagagtcgacagaaattcggtaccgtagacttcaacatttgcttgaaaaaagcaatatctactccaaatttttattgacgaaaatggaacagcaacaattagaggaacagaagaagaaagaaaaattggagagaaaaaaggagtctttaaaagttaaaaagggtaaaaattcaattgatgcaagtgaagagaagccagttatgaggaaaaaaagaggaagagaagatgaatcatacaatatttcagaggtcatgtcaaaagaggaatgcaaactcagatgtctatccacagaggcctaaagtgggctgtaacatggtttggcaaactttttctgtaaatagccagatagtaaatatttttagcttttgagtagttttgtgggcaactactcaaccctgtactctgctgttgttgcttgaaagcagccatagacaaaccgtaaacaagtgaggctgactttgttccaatttatcccatttctttgcttttaaaaaaatacctgtgtattcgcttagctggagttggtctacaggctgtagtttgctgaccccaggactagaggtttgttgccatgtgtgaatttgtacttaatctactcagattaaaagaaagaaaagctggaaaatcactgtatttgatgaaatatcccattgtataagtgttcccaaattagcctagaatgttatgaaatattatgagccagtaatgtctataggcttatttctgcctgaaggctactagttttatcttgagaatctcatcctcatttcctggcaaaatgagcacagaataaatgcttgttgaataaataaataaatgaacttcatacattattaatttgtttttgttttctcaaactactaggaaattttgtctgtggctaaaaaaaataaaaaggagaatgaggatgaaaactcctcctctactaatctctgtgtggaagatcttcagaaaaataaagattcgaatagtataattaaagatagattgtctgaaacggttaggcagaatactaaattcttttttgacccagtccggaagtgtaatggtcagccagtaccttttcaacaaccaaagcacttcactggaggagtgatgcgatggtaccaagtagaaggcatggaatggcttaggatgctttgggaaaatggaattaatggcattttagcagatgaaatgggattgggtaagacagttcagtgcattgctactattgcattgatgattcagagaggagtaccaggaccttttcttgtctgtggccctttgtctacacttcctaactggatggctgaattcaaaagatttacaccagatatccctacaatgttatatcatggaacccaggaggaacgtcaaaaattggtaagaaatatttacaaacggaaagggactttgcagattcatcctgtggtaatcacgtcatttgaaatagccatgagagaccgaaatgcgttacagcattgctattggaaatacttaatagtagatgaaggacacaggattaagaatatgaagtgccgtctaatcagggagttaaaacgattcaatgctgataacaaacttcttttgactggtactcccttgcaaaacaatttatcagaactttggtcattgctaaactttttgttgccagatgtatttgatgacttgaaaagctttgagtcttggttgacatcactagtctttctgaaactgctgaagatattatgctaaagaaagagaacagaatgtattgcatatgctgcaccagattttaacacctttcttatgagaagactgaagtctgatgttgctcttgaagttcctcctaaacgagaagtagtcgtttatgctccactttcaaagaagcaggagatcttttatacagccattgtgaaccgtacaattgcaaacatgtttggatccagtgagaaagaaacaattgagttaagtcctactggtcgaccaaaacgacgaactagaaaatcaataaattacagcaaaatagatgatttccctaatgaattggaaaaactgatcagtcaaatacagccagaggtggaccgagaaagagctgttgtggaagtgaatatccctgtagaatctgaagttaatctgaagctgcagaatataatgatgctacttcgtaaatgttgtaatcatccatatttgattgaatatcctatagaccctgttacacaagaatttaagatcgatgaagaattggtaacaaattctgggaagttcttgattttggatcgaatgctgccagaactaaaaaaaagaggtcacaaggtgctgcttttttcacaaatgacaagcatgttggacattttgatggattactgccatctcagagatttcaacttcagcaggcttgatgggtccatgtcttactcagagagagaaaaaaacatgcacagcttcaacacggatccagaggtgtttatcttcttagtgagtacacgagctggtggcctgggcattaatctgactgcagcagatacagttatcatttatgatagtgattggaacccccagtcggatcttcaggcccaggatagatgtcatagaattggtcagacaaagccagttgttgtttatcgccttgttacagcaaatactatcgatcagaaaattgtggaaagagcagctgctaaaaggaaactggaaaagttgatcatccataaaaatcatttcaaaggtggtcagtctggattaaatctgtctaagaatttcttagatcctaaggaattaatggaattattaaaatctagagattatgaaagggaaataaaaggatcaagagagaaggtcattagtgataaagatctagagttgttgttagatcgaagtgatcttattgatcaaatgaatgcttcaggaccaattaaagagaagatggggatattcaagatattagaaaattctgaagattccagtcctgaattggagacggggtttcaccatcttggcctgactggtcccgaactgatctcaggtgatctgcccacctcggcctcccaaagtgctgggattacaagcgtgagccactgcgtggcctgagcactagggcgcaagagaagccgtactggaatattacactactcagcacaagacaggtttaatctttttcttgggggacaagattggaaaattgaggtctgagcagacctgaagagaggcatccagcaactctgagattaaattcatcattgatcaattcgttattgtttggaattgacgtttagctgtgttcctcactcagatacgtgcatgatagctgcttgctaatttggtcttagctcacatttcacctagaatgtatggtctccctctcccctgcaaaatatcccactgttgctaatctgtctgcctcataatttccatgagattgagcatcttgtttgttttgtcaccactatataacagcatgttggaaacaaagcagtaataaagctagaaaaaccaagcgaatacactggattaaaaaaaatactgtttcctagaattaaagaaataaatgaggccgggcgcagtggtgcctgtaatcccagcagtttgggaggctgaggctagtggatcatgtggccgagatcgcgtcactgcactccagtctagcaacagagcgataccttgtttcttacttaaaaaaaaaaaaagacctcatttgttaactgttaaacagaaaacaagaaattccctatacctgtatgcattatagagcaaataagagcatcaaaaacaatcttagaaatctttcagagaaaggtcacctacaaaggaacattgatcagataatagatttttttttttctcagatggagttctgctccagtctagcaacagagcgataccttgtttcttacttaa

SEQ ID NO: 446394 - DNA, 3521 bp, Homo sapiens
tcccgcgaaggagaagcgcgcttttttccctggcgggggatttggctagaaggctgggccggcagcggttgtgaggagttagctcgcggcattgcaggctctgagaggaggggacccggttcccgggctcggaggctccagcaatggttgaacaactggacactgctgtgattaccccggccatgctagaagaggaagaacagcttgaagctgctggactagagagagagcggaagatgctggaaaaggctcgcatgtcttgggatagagagtcgacagaaattcggtaccgtagacttcaacatttgcttgaaaaaagcaatatctactccaaatttttattgacgaaaatggaacagcaacaattagaggaacagaagaagaaagaaaaattggagagaaaaaaggagtctttaaaagttaaaaagggtaaaaattcaattgatgcaagtgaagagaagccagttatgaggaaaaaaagaggaagagaagatgaatcatacaatatttcagaggtcatgtcaaaagaggaaattttgtctgtggctaaaaaaaataaaaaggagaatgaggatgaaaactcctcctctactaatctctgtgtggaagatcttcagaaaaataaagattcgaatagtataattaaagatagattgtctgaaacggttaggcagaatactaaattcttttttgacccagtccggaagtgtaatggtcagccagtaccttttcaacaaccaaagcacttcactggaggagtgatgcgatggtaccaagtagaaggcatggaatggcttaggatgctttgggaaaatggaattaatggcattttagcagatgaaatgggattgggtaagacagttcagtgcattgctactattgcattgatgattcagagaggagtaccaggaccttttcttgtctgtggccctttgtctacacttcctaactggatggctgaattcaaaagatttacaccagatatccctacaatgttatatcatggaacccaggaggaacgtcaaaaattggtaagaaatatttacaaacggaaagggactttgcagattcatcctgtggtaatcacgtcatttgaaatagccatgagagaccgaaatgcgttacagcattgctattggaaatacttaatagtagatgaaggacacaggattaagaatatgaagtgccgtctaatcagggagttaaaacgattcaatgctgataacaaacttcttttgactggtactcccttgcaaaacaatttatcagaactttggtcattgctaaactttttgttgccagatgtatttgatgacttgaaaagctttgagtcttggttgacatcactagtctttctgaaactgctgaagatattatgctaaagaaagagaacagaatgtattgcatatgctgcaccagattttaacacctttcttatgagaagactgaagtctgatgttgctcttgaagttcctcctaaacgagaagtagtcgtttatgctccactttcaaagaagcaggagatcttttatacagccattgtgaaccgtacaattgcaaacatgtttggatccagtgagaaagaaacaattgagttaagtcctactggtcgaccaaaacgacgaactagaaaatcaataaattacagcaaaatagatgatttccctaatgaattggaaaaactgatcagtcaaatacagccagaggtggaccgagaaagagctgttgtggaagtgaatatccctgtagaatctgaagttaatctgaagctgcagaatataatgatgctacttcgtaaatgttgtaatcatccatatttgattgaatatcctatagaccctgttacacaagaatttaagatcgatgaagaattggtaacaaattctgggaagttcttgattttggatcgaatgctgccagaactaaaaaaaagaggtcacaaggtgctgcttttttcacaaatgacaagcatgttggacattttgatggattactgccatctcagagatttcaacttcagcaggcttgatgggtccatgtcttactcagagagagaaaaaaacatgcacagcttcaacacggatccagaggtgtttatcttcttagtgagtacacgagctggtggcctgggcattaatctgactgcagcagatacagttatcatttatgatagtgattggaacccccagtcggatcttcaggcccaggatagatgtcatagaattggtcagacaaagccagttgttgtttatcgccttgttacagcaaatactatcgatcagaaaattgtggaaagagcagctgctaaaaggaaactggaaaagttgatcatccataaaaatcatttcaaaggtggtcagtctggattaaatctgtctaagaatttcttagatcctaaggaattaatggaattattaaaatctagagattatgaaagggaaataaaaggatcaagagagaaggtcattagtgataaagatctagagttgttgttagatcgaagtgatcttattgatcaaatgaatgcttcaggaccaattaaagagaagatggggatattcaagatattagaaaattctgaagattccagtcctgaattggagacggggtttcaccatcttggcctgactggtcccgaactgatctcaggtgatctgcccacctcggcctcccaaagtgctgggattacaagcgtgagccactgcgtggcctgagcactagggcgcaagagaagccgtactggaatattacactactcagcacaagacaggtttaatctttttcttgggggacaagattggaaaattgaggtctgagcagacctgaagagaggcatccagcaactctgagattaaattcatcattgatcaattcgttattgtttggaattgacgtttagctgtgttcctcactcagatacgtgcatgatagctgcttgctaatttggtcttagctcacatttcacctagaatgtatggtctccctctcccctgcaaaatatcccactgttgctaatctgtctgcctcataatttccatgagattgagcatcttgtttgttttgtcaccactatataacagcatgttggaaacaaagcagtaataaagctagaaaaaccaagcgaatacactggattaaaaaaaatactgtttcctagaattaaagaaataaatgaggccgggcgcagtggtgcctgtaatcccagcagtttgggaggctgaggctagtggatcatgtggccgagatcgcgtcactgcactccagtctagcaacagagcgataccttgtttcttacttaaaaaaaaaaaaagacctcatttgttaactgttaaacagaaaacaagaaattccctatacctgtatgcattatagagcaaataagagcatcaaaaacaatcttagaaatctttcagagaaaggtcacctacaaaggaacattgatcagataatagatttttttttttctcagatggagttctgctccagtctagcaacagagcgataccttgtttcttacttaa

SEQ ID NO: 446395 - DNA, 3312 bp, Homo sapiens
ggaaataggaaagtatttaatggtttcaacataaaatcaaaacacataagtcataaatagaataattatgacttgcataattatgaccagtattgtcaggttttatgtgtctgctggtaaaactttggaatatgatttgcagaaatctcagttcaggagtttagcaaagtttatgaatgtgtacagcattaaaaagtatttaaaccaggctagcctcgaactcctgaactcaggtgatctgcctgcctcggcctcacaaagtgctgtgattacagggtgtgagccactgcacctggccgataacagatgttttaatagtaagataaaaagtaaaatttccagtgtgtcgaaggaagaaaattacagcctagaattttatcttcatgtacattatttaagtgtgagggaatagtttcagtgacattatgtcattgaagaccttagaagatttccctcgctaaaggagataaagcgactggcacaacatgtatttctctgagtaattagaagtgttcttttctggctgtactgaagggactttcatgatttcttcgtttttgtactcttagttttataatattgcatagtagctaaggcctggctgtagcagttataaactgttctgcaagtgcgggaagtaatagttattcctatctcaaggatgtggggtttaaatgggttagtgcacaaaaggacatttattaaatttagtcataatcatctcaaggacatggtaagtgaaagagtgtacataaagtacttaatgtaatgtttgctacttaatgttcaataactcaaagagaccaccaccactactacattttacttttattagtaattaataataattaataattagtaattcagtggtaattagtatactaccaaagaaagtacttgagcagaagagccaaaattcaaaccatagaatcattttactgtgcttttattctacctcaaacactaatctccaggccttggataaagggattatttctctgaaggggaaagttatcctcttttgcccaagtcacacttgtgtcatttcttatactgtaaacatgtggttccaattctgaggtattttcccggcttgtaggacccaaaaagaagttaggcttgagaaattttaagtgaagagaacaattctagttcagagtgattggctcttcctaaaagctgacatttgactgaaaattttgaggggagggaaagaaacaataccttttacggcatgtaataggaagaagacctggattttagttgctgctctgatgtcccaacttgggtaaggcaacataacataaatgtcagtttcttcagatttgtgatgaagctgataatccatgctcagcttcctttatgggtctcttgcctatcaaataaggtacagtatgtgaagatacattgcagattatcttatgcattgcttcaggggatgattaaaccatcctttattatagccagagtctagtctaagggaagaaggtcattctctataccagtgaaggctccatccaaaccagtgtttgggggcatagtcataattgaaaaatgattgttttccttatctgtaagacaggtaaatggtattaatcctcaggtggttgtgaggattaagtgatacatgtaaaaaaaagaaagctttggatagtacctattataagaaactcagtgttgctgcaatgtatgtattataatggatttgaaatttgccctaaccaagagtcacagacagaaaaaaggaagttaatgtatctcttgatcactatcaagatgtggtattgaaccttcaagatccttttcagggaatatgtgagatcaaaatttttatactggcactatgatgttatttgccttttcctcatattcacaagtgaacagtggagttttacagaagctatataatgtcatgacatcactgatgggtaatagaatgtgtgcttgtatattccgaaactttcagttccaatttcttcgatcaatgtaatcctcataagtaaaagttatttgaggacctcagacatttttaaaaatgtaaagggggtggggtcaggctcagtggctcatgcctgtaatcccagcattttggaaggccgaggcgaacggatcacttgaggccaggagtttgaaactagtctggtcaacatggtgaaaccccgtctccactaaaacaaaaagttttctggatgtggtggcacacatacctgtaatcccagctactttggtggctgaggcatgagaatcacttgaacccagaagacaggttgcagtgagccaagattgtgcccctgcattctagcctgggtgacagtgagactgtctcaaaaaataaaggtgtacagggattgtatatttgacaacttggtatgtaggatgtgctacctctaatgttccatgctgttacttagttttcactcactactatattttggagatttgttcatattgctctgtgtacatttaattcttcagtgtgtatccaccacatttaacttattcacttacagaactatgcaagaatttctctggtaaatttcactaagtacttatgtacttttcagaacgattgtgagtttacacccctaccagcaggactgagttgagtacccatttcctcacatccttgccagtacttcatttgcctaatttttgccattctcataatgtggcaattgttcaattttgcatttcttccattttatttttttgcatctctgcttttcttttggttagctttgccagttctgcctattatattaatctcccagaatcagcttttagttttgttaaatctctgacatgtttcgttgattcctgctttcatcttaaacatttcttcgttgttaatttgtgtttgctataaaataagcaacatcttaaatgcttgatttgctttcgatgtttattctgtaataagatatttaaagatataattttttccctaaatgctttattagacttttctcataagttttgactggtactgttttcattgttatttaattttgtgttttttaacttctttcatgatttccttttaactgaaggttttcttagatatttagtttgctggtatattcttttaaaattgtatcattgctttctttctatattggattattgtcagagaacatgatttgcatgatattaactttttggagtatattgttgcatctttgtggcctagtacatagttaatttagtgaatgcttccagttgtacttgaaaagaatgtatattttctgattattgagggtaaatttctctatatatgttttcctgtttaataaatatgtagctatgtgctta

SEQ ID NO: 446396 - DNA, 3809 bp, Homo sapiens
tcccgcgaaggagaagcgcgcttttttccctggcgggggatttggctagaaggctgggccggcagcggttgtgaggagttagctcgcggcattgcaggctctgagaggaggggacccggttcccgggtgagtgtccaggcatgccagcggaacggcccgcgggcagcggcggctcggaggctccagcaatggttgaacaactggacactgctgtgattaccccggccatgctagaagaggaagaacagcttgaagctgctggactagagagagagcggaagatgctggaaaaggctcgcatgtcttgggatagagagtcgacagaaattcggtaccgtagacttcaacatttgcttgaaaaaagcaatatctactccaaatttttattgacgaaaatggaacagcaacaattagaggaacagaagaagaaagaaaaattggagagaaaaaaggagtctttaaaagttaaaaagggtaaaaattcaattgatgcaagtgaagagaagccagttatgaggaaaaaaagaggaagagaagatgaatcatacaatatttcagaggtcatgtcaaaagaggaatgcaaactcagatgtctatccacagaggcctaaagtgggctgtaacatggtttggcaaactttttctgtaaatagccagatagtaaatatttttagcttttgagtagttttgtgggcaactactcaaccctgtactctgctgttgttgcttgaaagcagccatagacaaaccgtaaacaagtgaggctgactttgttccaatttatcccatttctttgcttttaaaaaaatacctgtgtattcgcttagctggagttggtctacaggctgtagtttgctgaccccaggactagaggtttgttgccatgtgtgaatttgtacttaatctactcagattaaaagaaagaaaagctggaaaatcactgtatttgatgaaatatcccattgtataagtgttcccaaattagcctagaatgttatgaaatattatgagccagtaatgtctataggcttatttctgcctgaaggctactagttttatcttgagaatctcatcctcatttcctggcaaaatgagcacagaataaatgcttgttgaataaataaataaatgaacttcatacattattaatttgtttttgttttctcaaactactaggaaattttgtctgtggctaaaaaaaataaaaaggagaatgaggatgaaaactcctcctctactaatctctgtgtggaagatcttcagaaaaataaagattcgaatagtataattaaagatagattgtctgaaacggttaggcagaatactaaattcttttttgacccagtccggaagtgtaatggtcagccagtaccttttcaacaaccaaagcacttcactggaggagtgatgcgatggtaccaagtagaaggcatggaatggcttaggatgctttgggaaaatggaattaatggcattttagcagatgaaatgggattgggtaagacagttcagtgcattgctactattgcattgatgattcagagaggagtaccaggaccttttcttgtctgtggccctttgtctacacttcctaactggatggctgaattcaaaagatttacaccagatatccctacaatgttatatcatggaacccaggaggaacgtcaaaaattggtaagaaatatttacaaacggaaagggactttgcagattcatcctgtggtaatcacgtcatttgaaatagccatgagagaccgaaatgcgttacagcattgctattggaaatacttaatagtagatgaaggacacaggattaagaatatgaagtgccgtctaatcagggagttaaaacgattcaatgctgataacaaacttcttttgactggtactcccttgcaaaacaatttatcagaactttggtcattgctaaactttttgttgccagatgtatttgatgacttgaaaagctttgagtcttggttgacatcactagtctttctgaaactgctgaagatattatgctaaagaaagagaacagaatgtattgcatatgctgcaccagattttaacacctttcttatgagaagactgaagtctgatgttgctcttgaagttcctcctaaacgagaagtagtcgtttatgctccactttcaaagaagcaggagatcttttatacagccattgtgaaccgtacaattgcaaacatgtttggatccagtgagaaagaaacaattgagttaagtcctactggtcgaccaaaacgacgaactagaaaatcaataaattacagcaaaatagatgatttccctaatgaattggaaaaactgatcagtcaaatacagccagaggtggaccgagaaagagctgttgtggaagtgaatatccctgtagaatctgaagttaatctgaagctgcagaatataatgatgctacttcgtaaatgttgtaatcatccatatttgattgaatatcctatagaccctgttacacaagaatttaagatcgatgaagaattggtaacaaattctgggaagttcttgattttggatcgaatgctgccagaactaaaaaaaagaggtcacaaggtgctgcttttttcacaaatgacaagcatgttggacattttgatggattactgccatctcagagatttcaacttcagcaggcttgatgggtccatgtcttactcagagagagaaaaaaacatgcacagcttcaacacggatccagaggtgtttatcttcttagtgagtacacgagctggtggcctgggcattaatctgactgcagcagatacagttatcatttatgatagtgattggaacccccagtcggatcttcaggcccaggatagatgtcatagaattggtcagacaaagccagttgttgtttatcgccttgttacagcaaatactatcgatcagaaaattgtggaaagagcagctgctaaaaggaaactggaaaagttgatcatccataaaaatcatttcaaaggtggtcagtctggattaaatctgtctaagaatttcttagatcctaaggaattaatggaattattaaaatctagagattatgaaaggtgagtttttaattttagaaagatttaatttgtagctttgaattattcacatagacttgaatattttgttttctatagggaaataaaaggatcaagagagaaggtcattagtgataaagatctagagttgttgttagatcgaagtgatcttattgatcaaatgaatgcttcaggaccaattaaagagaagatggggatattcaagatattagaaaattctgaagattccagtcctgaatgtttgttttaaagtggagctcaagaatagcttttaaaagttcttatttacatctagtgatttccctgtattgggtttgaaatactgattgtccacttcaccttttttattatatcagttgacatgtaactagtaccatgcgtacttaaatagatggtaattttctgagccttaccaagaacaaagaagtatccatattaagtttagattttcagttaatttttgagactgagtagtattcttggatacaggctgatgtgtacttaaccacttccagatttatacagtcttcctgtggaagtttagtaaatgtctttttccctcctttcttctagtaatgcagttcatgggctttaggtacttcagttatgaagtaggcttttcatggggagagattgggattatgctctctgttgtttaagaaactgtttgattttagagtctatttctatgagatagtttaccaaataaatgttccttataagatg

SEQ ID NO: 446397 - DNA, 4260 bp, Homo sapiens
tcccgcgaaggagaagcgcgcttttttccctggcgggggatttggctagaaggctgggccggcagcggttgtgaggagttagctcgcggcattgcaggctctgagaggaggggacccggttcccgggtgagtgtccaggcatgccagcggaacggcccgcgggcagcggcggctcggaggctccagcaatggttgaacaactggacactgctgtgattaccccggccatgctagaagaggaagaacagcttgaagctgctggactagagagagagcggaagatgctggaaaaggctcgcatgtcttgggatagagagtcgacagaaattcggtaccgtagacttcaacatttgcttgaaaaaagcaatatctactccaaatttttattgacgaaaatggaacagcaacaattagaggaacagaagaagaaagaaaaattggagagaaaaaaggagtctttaaaagttaaaaagggtaaaaattcaattgatgcaagtgaagagaagccagttatgaggaaaaaaagaggaagagaagatgaatcatacaatatttcagaggtcatgtcaaaagaggaatgcaaactcagatgtctatccacagaggcctaaagtgggctgtaacatggtttggcaaactttttctgtaaatagccagatagtaaatatttttagcttttgagtagttttgtgggcaactactcaaccctgtactctgctgttgttgcttgaaagcagccatagacaaaccgtaaacaagtgaggctgactttgttccaatttatcccatttctttgcttttaaaaaaatacctgtgtattcgcttagctggagttggtctacaggctgtagtttgctgaccccaggactagaggtttgttgccatgtgtgaatttgtacttaatctactcagattaaaagaaagaaaagctggaaaatcactgtatttgatgaaatatcccattgtataagtgttcccaaattagcctagaatgttatgaaatattatgagccagtaatgtctataggcttatttctgcctgaaggctactagttttatcttgagaatctcatcctcatttcctggcaaaatgagcacagaataaatgcttgttgaataaataaataaatgaacttcatacattattaatttgtttttgttttctcaaactactaggaaattttgtctgtggctaaaaaaaataaaaaggagaatgaggatgaaaactcctcctctactaatctctgtgtggaagatcttcagaaaaataaagattcgaatagtataattaaagatagattgtctgaaacggttaggcagaatactaaattcttttttgacccagtccggaagtgtaatggtcagccagtaccttttcaacaaccaaagcacttcactggaggagtgatgcgatggtaccaagtagaaggcatggaatggcttaggatgctttgggaaaatggaattaatggcattttagcagatgaaatgggattgggtaagacagttcagtgcattgctactattgcattgatgattcagagaggagtaccaggaccttttcttgtctgtggccctttgtctacacttcctaactggatggctgaattcaaaagatttacaccagatatccctacaatgttatatcatggaacccaggaggaacgtcaaaaattggtaagaaatatttacaaacggaaagggactttgcagattcatcctgtggtaatcacgtcatttgaaatagccatgagagaccgaaatgcgttacagcattgctattggaaatacttaatagtagatgaaggacacaggattaagaatatgaagtgccgtctaatcagggagttaaaacgattcaatgctgataacaaacttcttttgactggtactcccttgcaaaacaatttatcagaactttggtcattgctaaactttttgttgccagatgtatttgatgacttgaaaagctttgagtcttggttgacatcactagtctttctgaaactgctgaagatattatgctaaagaaagagaacagaatgtattgcatatgctgcaccagattttaacacctttcttatgagaagactgaagtctgatgttgctcttgaagttcctcctaaacgagaagtagtcgtttatgctccactttcaaagaagcaggagatcttttatacagccattgtgaaccgtacaattgcaaacatgtttggatccagtgagaaagaaacaattgagttaagtcctactggtcgaccaaaacgacgaactagaaaatcaataaattacagcaaaatagatgatttccctaatgaattggaaaaactgatcagtcaaatacagccagaggtggaccgagaaagagctgttgtggaagtgaatatccctgtagaatctgaagttaatctgaagctgcagaatataatgatgctacttcgtaaatgttgtaatcatccatatttgattgaatatcctatagaccctgttacacaagaatttaagatcgatgaagaattggtaacaaattctgggaagttcttgattttggatcgaatgctgccagaactaaaaaaaagaggtcacaagttcacaaatgacaaggcgccctaagacagaggttgacaaagttctttttttttgagatggagtttcgctcttactgcccaggctggagtgcagtggtgcgatcttggctcattgcaacttccacctcccaggttcaagcgattctcctgcctccatcttccgagtaggtggcattacaggcatgtgccaccacgcccggcgagttttgtatttttagtagagatgaggtttctccatgttggtcaggctagtctcgaactcctgacctcaggtgatccacccaccttggcctcccaaagtgctgggattacaggcatgagccactgcgcccagtatatatccaccactttaccatccacattagcatttcattagcttctctttgcccttttagttaataaccccatctcagggtgattcactttcataatccgtattaccatggattaattctgcatagcaaaaactatgataggtgtgttaagtaatgaagtttggggaatgttaataagatgatttctcttactgtagatgaaatacatcgtaagagaatccctcgtgagaccagatcagttacatgtatatcttgcctctcttaagtctctaccatttattactgtacttgagttaggatttggaagtgccactgaacactaaaattattctgtctgggtatttgaatggtatgagacaaaaatccattttaatgttttatcaagttgagatgtctcacatgagtagttagtgctgagaatcagacacaggcacatttgggagcatggcgtggcaagaagctttgctttttcctgttcctattgtactcaaacttgtttctacatttttcattgatttctcttcgtactagcactagggcgcaagagaagccgtactggaatattacactactcagcacaagacaggtttaatctttttcttgggggacaagattggaaaattgaggtctgagcagacctgaagagaggcatccagcaactctgagattaaattcatcattgatcaattcgttattgtttggaattgacgtttagctgtgttcctcactcagatacgtgcatgatagctgcttgctaatttggtcttagctcacatttcacctagaatgtatggtctccctctcccctgcaaaatatcccactgttgctaatctgtctgcctcataatttccatgagattgagcatcttgtttgttttgtcaccactatataacagcatgttggaaacaaagcagtaataaagctagaaaaaccaagcgaatacactggattaaaaaaaatactgtttcctagaattaaagaaataaatgaggccgggcgcagtggtgcctgtaatcccagcagtttgggaggctgaggctagtggatcatgtggccgagatcgcgtcactgcactccagtctagcaacagagcgataccttgtttcttacttaaaaaaaaaaaaagacctcatttgttaactgttaaacagaaaacaagaaattccctatacctgtatgcattatagagcaaataagagcatcaaaaacaatcttagaaatctttcagagaaaggtcacctacaaaggaacattgatcagataatagatttttttttttctcagatggagttctgctccagtctagcaacagagcgataccttgtttcttacttaa

SEQ ID NO: 446398 - DNA, 2162 bp, Homo sapiens
catggccgggagtggtgaacgacacgttcattccttaggcccctattcaccccagggagggaaagaaacaataccttttacggcatgtaataggaagaagacctggattttagttgctgctctgatgtcccaacttgggtaaggcaacataacataaatgtcagtttcttcagatttgtgatgaagctgataatccatgctcagcttcctttatgggtctcttgcctatcaaataaggtacagtatgtgaagatacattgcagattatcttatgcattgcttcaggggatgattaaaccatcctttattatagccagagtctagtctaagggaagaaggtcattctctataccagtgaaggctccatccaaaccagtgtttgggggcatagtcataattgaaaaatgattgttttccttatctgtaagacaggtaaatggtattaatcctcaggtggttgtgaggattaagtgatacatgtaaaaaaaagaaagctttggatagtacctattataagaaactcagtgttgctgcaatgtatgtattataatggatttgaaatttgccctaaccaagagtcacagacagaaaaaaggaagttaatgtatctcttgatcactatcaagatgtggtattgaaccttcaagatccttttcagggaatatgtgagatcaaaatttttatactggcactatgatgttatttgccttttcctcatattcacaagtgaacagtggagttttacagaagctatataatgtcatgacatcactgatgggtaatagaatgtgtgcttgtatattccgaaactttcagttccaatttcttcgatcaatgtaatcctcataagtaaaagttatttgaggacctcagacatttttaaaaatgtaaagggggtggggtcaggctcagtggctcatgcctgtaatcccagcattttggaaggccgaggcgaacggatcacttgaggccaggagtttgaaactagtctggtcaacatggtgaaaccccgtctccactaaaacaaaaagttttctggatgtggtggcacacatacctgtaatcccagctactttggtggctgaggcatgagaatcacttgaacccagaagacaggttgcagtgagccaagattgtgcccctgcattctagcctgggtgacagtgagactgtctcaaaaaataaaggtgtacagggattgtatatttgacaacttggtatgtaggatgtgctacctctaatgttccatgctgttacttagttttcactcactactatattttggagatttgttcatattgctctgtgtacatttaattcttcagtgtgtatccaccacatttaacttattcacttacagaactatgcaagaatttctctggtaaatttcactaagtacttatgtacttttcagaacgattgtgagtttacacccctaccagcaggactgagttgagtacccatttcctcacatccttgccagtacttcatttgcctaatttttgccattctcataatgtggcaattgttcaattttgcatttcttccattttatttttttgcatctctgcttttcttttggttagctttgccagttctgcctattatattaatctcccagaatcagcttttagttttgttaaatctctgacatgtttcgttgattcctgctttcatcttaaacatttcttcgttgttaatttgtgtttgctataaaataagcaacatcttaaatgcttgatttgctttcgatgtttattctgtaataagatatttaaagatataattttttccctaaatgctttattagacttttctcataagttttgactggtactgttttcattgttatttaattttgtgttttttaacttctttcatgatttccttttaactgaaggttttcttagatatttagtttgctggtatattcttttaaaattgtatcattgctttctttctatattggattattgtcagagaacatgatttgcatgatattaactttttggagtatattgttgcatctttgtggcctagtacatagttaatttagtgaatgcttccagttgtacttgaaaagaatgtatattttctgattattgagggtaaatttctctatatatgttttcctgtttaataaatatgtagctatgtgctta

SEQ ID NO: 446399 - DNA, 3781 bp, Homo sapiens
aatgtctctccataccgtgaaccctgcgtagctgggaccgcagacgcacaccaccaagctcagctaaatttttttgatgttttttgtagacacagggtctcaccacgttgcccaggctggtcttgaactcctgaacccgagagatcctcctgcctcaacctcccatagtagctagaattacaagcgcccaccaccatgcccagctaatttttgtatttttagtagggacagggtttcaccatgttggccacgctggtctcgaactcctgacctcaggtgatccaccctcctcggcctcccaaagtgttggtactacaggtgtgagccactgcgcctggctggatctaactttttttcctccttggtttactcgctcactttgatggattatgttgtcttgtgttttcccaagaaaagaattcaagggaaatgaattttttgagaactcgcatatctggctgtatttttgttggattcttatatttgatggatagttctggtttgggattttagagtaggaattattatcttctcagaatttcgaaagttgttgtgttgtctcagaacttccagtgttgtgggagagaaaattaatggttcctttttttttttgagacagggtctcattctgtcacctaggcatgaatacagctcactgcagccttgacctcccgggctcaagtgatcctcctgcctcagccaccaatttagtttggaccacagccatgcaccaaatgccctgctaaatttttaattttttgtggagacagggtctcaccatgttgcccaggctggtcctgaactcctgggctccagcaattccccccggcttggcctcccaaagggctgggattacaggtgtgagctcctgcacctggcccgaatgctgctttgatttccagtctgttgaaggtggggggaaccagccttttgttaatgtgagcttccagtgtttctttgtcttttgtattctaaattaataacacagtgatgtgtcttggtatgggtcttttttttttttctttttttttttcatttttaaagagactcctgctatgttgcacagacttgtgaattcctggtttcaagttatctttccccctatgtcactcaagtaatgtggactacactcatgtgacaccatgcccatctttatgttgtgtatcttatttttgttttgttttactcttgaatcagctcagtctgaaaatctgtcttttaattcatggggattttttagaatgatttcttggagggttttgtcttttgaatgtgtggtcccttctctgcctagaatttttttgtttgaatgagacatggtcttgctgttgtccaggttggagagcagtggtgcaactatagctcactacattcttgaatttctgggctcaagccatcttcccatctcagctttcagaatatcttggctacaggcatgtgacactatgcccagataatttaaaaaaaaaaaaaaaatttcttgagacagggtcttgctatgttgcccaggctcgtcttgaattcctgttctcagagggtcctcctatgtttgcttcccaaagcattggtattatatgtatgagccaccaccactagcacttctgcctagaactcgtaacaaaatttctttcccccatctgcatagtcttgtttcattaaatgattcttccctttttaaagtttagtctgtcttttattttgatgcttcttcaaatgccttgggatcatttactgttcctcaaatttaagagctagaagaaatctctctaagctccatgcatgagggttctcaacaggtggattttactccagtgtgatttcactagaccatttatttgagggtcacccaattgtcagtatatgtatatgagagagaatatgtacatatatatctgagagaaattctctaatcacttgtcctgtgtgagtatatgtactttgccagttttcttttggggtgaggtggagggacagtgtattagagattttactgttcaaaatgtagacttcctcagttttcagtaaaatactctaccctgtctatatgtggattcccctattccagactgattcacccttttcagtgagttagtcgtgacatttcttacactgtgagggggagtggtaattactttacagggaggtatggggccatggtgtttgactcttctttcaaccacttctgggttttttagtgaaaacctctatctaacactgatactttcatttctgttgtctattgagtcagttaacactgatccatttatttttcagttcccaaaatcttgctttgccattgcttctattttattgtctgggggtgtttaacacctgtttcattttttacagtcatttagtttccagattttagtaagggacagaggggaatagatggactcatttcatgatgtagaaacaaatactccctgtcttgtcttacatgaaaaattattcttaaactaggccttgtctttgagaacctgatcaaagtataaaaaatactttttggctttatttctttagtgagtcactattccatattttgaaggtgttaagaggtatggtaaaggtggtacttgaacatttccaagcaaacgtgtgatgaaatctttcatcaatgtcttagcaatggtatatgatttttttagtcttagcaattttagataagttttttttttgtcttgtttttttgagacggagtcttgctctgtcgcctaggctacagtgtagtggcgtgatctcggctcactgcagcctctgcctccgagcggggtccagcgattctcctgcatcagcctcctgggtagttgggattacaggtgcatgccaccacacccaactgatttttgtatttttagtggagacggggtttcaccatcttggcctgactggtcccgaactgatctcaggtgatctgcccacctcggcctcccaaagtgctgggattacaagcgtgagccactgcgtggcctgagcactagggcgcaagagaagccgtactggaatattacactactcagcacaagacaggtttaatctttttcttgggggacaagattggaaaattgaggtctgagcagacctgaagagaggcatccagcaactctgagattaaattcatcattgatcaattcgttattgtttggaattgacgtttagctgtgttcctcactcagatacgtgcatgatagctgcttgctaatttggtcttagctcacatttcacctagaatgtatggtctccctctcccctgcaaaatatcccactgttgctaatctgtctgcctcataatttccatgagattgagcatcttgtttgttttgtcaccactatataacagcatgttggaaacaaagcagtaataaagctagaaaaaccaagcgaatacactggattaaaaaaaatactgtttcctagaattaaagaaataaatgaggccgggcgcagtggtgcctgtaatcccagcagtttgggaggctgaggctagtggatcatgtggccgagatcgcgtcactgcactccagtctagcaacagagcgataccttgtttcttacttaaaaaaaaaaaaagacctcatttgttaactgttaaacagaaaacaagaaattccctatacctgtatgcattatagagcaaataagagcatcaaaaacaatcttagaaatctttcagagaaaggtcacctacaaaggaacattgatcagataatagatttttttttttctcagatggagttctgctccagtctagcaacagagcgataccttgtttcttacttaa

SEQ ID NO: 446400 - DNA, 4300 bp, Homo sapiens
ggaaataggaaagtatttaatggtttcaacataaaatcaaaacacataagtcataaatagaataattatgacttgcataattatgaccagtattgtcaggttttatgtgtctgctggtaaaactttggaatatgatttgcagaaatctcagttcaggagtttagcaaagtttatgaatgtgtacagcattaaaaagtatttaaaccaggctagcctcgaactcctgaactcaggtgatctgcctgcctcggcctcacaaagtgctgtgattacagggtgtgagccactgcacctggccgataacagatgttttaatagtaagataaaaagtaaaatttccagtgtgtcgaaggaagaaaattacagcctagaattttatcttcatgtacattatttaagtgtgagggaatagtttcagtgacattatgtcattgaagaccttagaagatttccctcgctaaaggagataaagcgactggcacaacatgtatttctctgagtaattagaagtgttcttttctggctgtactgaagggactttcatgatttcttcgtttttgtactcttagttttataatattgcatagtagctaaggcctggctgtagcagttataaactgttctgcaagtgcgggaagtaatagttattcctatctcaaggatgtggggtttaaatgggttagtgcacaaaaggacatttattaaatttagtcataatcatctcaaggacatggtaagtgaaagagtgtacataaagtacttaatgtaatgtttgctacttaatgttcaataactcaaagagaccaccaccactactacattttacttttattagtaattaataataattaataattagtaattcagtggtaattagtatactaccaaagaaagtacttgagcagaagagccaaaattcaaaccatagaatcattttactgtgcttttattctacctcaaacactaatctccaggccttggataaagggattatttctctgaaggggaaagttatcctcttttgcccaagtcacacttgtgtcatttcttatactgtaaacatgtggttccaattctgaggtattttcccggcttgtaggacccaaaaagaagttaggcttgagaaattttaagtgaagagaacaattctagttcagagtgattggctcttcctaaaagctgacatttgactgaaaattttgaggggagggaaagaaacaataccttttacggcatgtaataggaagaagacctggattttagttgctgctctgatgtcccaacttgggtaaggcaacataacataaatgtcagtttcttcagatttgtgatgaagctgataatccatgctcagcttcctttatgggtctcttgcctatcaaataaggtacagtatgtgaagatacattgcagattatcttatgcattgcttcaggggatgattaaaccatcctttattatagccagagtctagtctaagggaagaaggtcattctctataccagtgaaggctccatccaaaccagtgtttgggggcatagtcataattgaaaaatgattgttttccttatctgtaagacaggtaaatggtattaatcctcaggtggttgtgaggattaagtgatacatgtaaaaaaaagaaagctttggatagtacctattataagaaactcagtgttgctgcaatgtatgtattataatggatttgaaatttgccctaaccaagagtcacagacagaaaaaaggaagttaatgtatctcttgatcactatcaagatgtggtattgaaccttcaagatccttttcagggaatatgtgagatcaaaatttttatactggcactatgatgttatttgccttttcctcatattcacaagtgaacagtggagttttacagaagctatataatgtcatgacatcactgatgggtaatagaatgtgtgcttgtatattccgaaactttcagttccaatttcttcgatcaatgtaatcctcataagtaaaagttatttgaggacctcagacatttttaaaaatgtaaagggggtggggtcaggctcagtggctcatgcctgtaatcccagcattttggaaggccgaggcgaacggatcacttgaggccaggagtttgaaactagtctggtcaacatggtgaaaccccgtctccactaaaacaaaaagttttctggatgtggtggcacacatacctgtaatcccagctactttggtggctgaggcatgagaatcacttgaacccagaagacaggttgcagtgagccaagattgtgcccctgcattctagcctgggtgacagtgagactgtctcaaaaaataaaggtgtacagggattgtatatttgacaacttggtatgtaggatgtgctacctctaatgttccatgctgttacttagttttcactcactactatattttggagatttgttcatattgctctgtgtacatttaattcttcagtgtgtatccaccacatttaacttattcacttacagaactatgcaagaatttctctggtaaatttcactaagtacttatgtacttttcagaacgattgtgagtttacacccctaccagcaggactgagttgagtacccatttcctcacatccttgccagtacttcatttgcctaatttttgccattctcataatgtggcaattgttcaattttgcatttcttccattttatttttttgcatctctgcttttcttttggttagctttgccagttctgcctattatattaatctcccagaatcagcttttagttttgttaaatctctgacatgtttcgttgattcctgctttcatcttaaacatttcttcgttgttaatttgtgtttgctataaaataagcaacatcttaaatgcttgatttgctttcgatgtttattctgtaataagatatttaaagatataattttttccctaaatgctttattagacttttctcataagttttgactggtactgttttcattgttatttaattttgtgttttttaacttctttcatgatttccttttaactgaaggttttcttagatatttagtttgctggtatattcttttaaaattgtatcattgctttctttctatattggattattgtcagagaacatgatttgcatgatattaactttttggagtatattgttgcatctttgtggcctagtacatagttaatttagtgaatgcttccagttgtacttgaaaagaatgtatattttctgattattgagggtaaatttctctatatatgttttcctgtttaataaatatgtagctatgtgcttaaaaaaaaaaaaaaaaaaaaaaaaaaaaaaaaaaaaaaaaaaaaaaaaaaaaaaaaaaaaacaagccacacacaaagagacacaacgctacacccacaaaaaacaccaacagggacgaccacagacgcacccgccataacctaccgccagatctttgccacccccatgggccgcgccacatctcagcaccgaccaccaaagaccaaggcgacagtcgctcacacagacgcaacgtaacaccgaaggaatggccgagagagacaaccactgagcacacgcggaggacaacacaccacgagagagacgcgacccaagccggtaccggagacatcacacacaagacccgacgacccaactcaaccacatcaaggtcataaagacggaagaccaaacagcgaaagcaacacacaacgagactacagacgcccagacacagacctcagcaaaaccacaacgcccaagcaacacagggcagcgtccgcaggagaaaaacccagcctcgacacagacgacgccagcctcgcatcacaccaaccgcccaacaaccgaccagcaccgacgcccacaaaccacccaacccaacgagcagaccgacaaagagccaacccacacatcgaaacaaaggggcgcagcggacgacgacgaagacaacagacgagcacacgaagagggggacgagaaggaagcagaaaaggcgagcagagcgacgcagactaacaagcgaaaggacacgaagacacgagaaccgaacgcgagcccgggagacagactagggcagcagaccggagcaaacgacaccgagacacagcagggacgaacggacagacgcaccgagcgaggcgacggcgcagccacggcacaccgcagagcgccaccgcaccgaccgagacgagccaagccgagagcaacccctagatgctccgaggcacgacgcaccacacagcgcaaggcccaaggcagaagacgcccacgagacgacgcgaccgcgc

SEQ ID NO: 446401 - DNA, 4323 bp, Homo sapiens
agtttagtgttttattttgatgtttcttcagatgccttgggatcatttactgttcctcatatttaagagcaaatgcttaaaaattcttagaaataccttcttgaaaagcctgcattcctaccacctctcaccacttcaacatgaaataatgatcccttacatctttttagtgtagttatataacttttgattggctcaataattacttttattatggctgtgtaagtattattaaagctttagataagccatggaatatgctgtgattttattttcattcttgtgcagctttttttttctccctgaagttaatacttaactgttttttacctaccagtaatttatatctaatcactctggaaatataagcccctcagtatattaaaacagatctcatgattcagtaataaacctccccctccaaatatatcccatcacctctactccctggaacattcttctagtttggactgtagaactgattccatctggaaccttcctttaccatactcctgggtattcctgttggctgtttcatgttttggaattactgtttaatgtgtcttgtgtctcccccccccccctttttttttcctttaagacagagtttcactcttgttgcccaggctggagtgcaatggcttgatctcggctcactgcaacctctgtctcccaggtttaaacgatcctcctgcctcaacctcccatagtagctagaattacaagcgcccaccaccatgcccagctaatttttgtatttttagtagggacagggtttcaccatgttggccacgctggtctcgaactcctgacctcaggtgatccaccctcctcggcctcccaaagtgttggtactacaggtgtgagccactgcgcctggctggatctaactttttttcctccttggtttactcgctcactttgatggattatgttgtcttgtgttttcccaagaaaagaattcaagggaaatgaattttttgagaactcgcatatctggctgtatttttgttggattcttatatttgatggatagttctggtttgggattttagagtaggaattattatcttctcagaatttcgaaagttgttgtgttgtctcagaacttccagtgttgtgggagagaaaattaatggttcctttttttttttgagacagggtctcattctgtcacctaggcatgaatacagctcactgcagccttgacctcccgggctcaagtgatcctcctgcctcagccaccaatttagtttggaccacagccatgcaccaaatgccctgctaaatttttaattttttgtggagacagggtctcaccatgttgcccaggctggtcctgaactcctgggctccagcaattccccccggcttggcctcccaaagggctgggattacaggtgtgagctcctgcacctggcccgaatgctgctttgatttccagtctgttgaaggtggggggaaccagccttttgttaatgtgagcttccagtgtttctttgtcttttgtattctaaattaataacacagtgatgtgtcttggtatgggtcttttttttttttctttttttttttcatttttaaagagactcctgctatgttgcacagacttgtgaattcctggtttcaagttatctttccccctatgtcactcaagtaatgtggactacactcatgtgacaccatgcccatctttatgttgtgtatcttatttttgttttgttttactcttgaatcagctcagtctgaaaatctgtcttttaattcatggggattttttagaatgatttcttggagggttttgtcttttgaatgtgtggtcccttctctgcctagaatttttttgtttgaatgagacatggtcttgctgttgtccaggttggagagcagtggtgcaactatagctcactacattcttgaatttctgggctcaagccatcttcccatctcagctttcagaatatcttggctacaggcatgtgacactatgcccagataatttaaaaaaaaaaaaaaaatttcttgagacagggtcttgctatgttgcccaggctcgtcttgaattcctgttctcagagggtcctcctatgtttgcttcccaaagcattggtattatatgtatgagccaccaccactagcacttctgcctagaactcgtaacaaaatttctttcccccatctgcatagtcttgtttcattaaatgattcttccctttttaaagtttagtctgtcttttattttgatgcttcttcaaatgccttgggatcatttactgttcctcaaatttaagagctagaagaaatctctctaagctccatgcatgagggttctcaacaggtggattttactccagtgtgatttcactagaccatttatttgagggtcacccaattgtcagtatatgtatatgagagagaatatgtacatatatatctgagagaaattctctaatcacttgtcctgtgtgagtatatgtactttgccagttttcttttggggtgaggtggagggacagtgtattagagattttactgttcaaaatgtagacttcctcagttttcagtaaaatactctaccctgtctatatgtggattcccctattccagactgattcacccttttcagtgagttagtcgtgacatttcttacactgtgagggggagtggtaattactttacagggaggtatggggccatggtgtttgactcttctttcaaccacttctgggttttttagtgaaaacctctatctaacactgatactttcatttctgttgtctattgagtcagttaacactgatccatttatttttcagttcccaaaatcttgctttgccattgcttctattttattgtctgggggtgtttaacacctgtttcattttttacagtcatttagtttccagattttagtaagggacagaggggaatagatggactcatttcatgatgtagaaacaaatactccctgtcttgtcttacatgaaaaattattcttaaactaggccttgtctttgagaacctgatcaaagtataaaaaatactttttggctttatttctttagtgagtcactattccatattttgaaggtgttaagaggtatggtaaaggtggtacttgaacatttccaagcaaacgtgtgatgaaatctttcatcaatgtcttagcaatggtatatgatttttttagtcttagcaattttagataagttttttttttgtcttgtttttttgagacggagtcttgctctgtcgcctaggctacagtgtagtggcgtgatctcggctcactgcagcctctgcctccgagcggggtccagcgattctcctgcatcagcctcctgggtagttgggattacaggtgcatgccaccacacccaactgatttttgtatttttagtggagacggggtttcaccatcttggcctgactggtcccgaactgatctcaggtgatctgcccacctcggcctcccaaagtgctgggattacaagcgtgagccactgcgtggcctgagcactagggcgcaagagaagccgtactggaatattacactactcagcacaagacaggtttaatctttttcttgggggacaagattggaaaattgaggtctgagcagacctgaagagaggcatccagcaactctgagattaaattcatcattgatcaattcgttattgtttggaattgacgtttagctgtgttcctcactcagatacgtgcatgatagctgcttgctaatttggtcttagctcacatttcacctagaatgtatggtctccctctcccctgcaaaatatcccactgttgctaatctgtctgcctcataatttccatgagattgagcatcttgtttgttttgtcaccactatataacagcatgttggaaacaaagcagtaataaagctagaaaaaccaagcgaatacactggattaaaaaaaatactgtttcctagaattaaagaaataaatgaggccgggcgcagtggtgcctgtaatcccagcagtttgggaggctgaggctagtggatcatgtggccgagatcgcgtcactgcactccagtctagcaacagagcgataccttgtttcttacttaaaaaaaaaaaaagacctcatttgttaactgttaaacagaaaacaagaaattccctatacctgtatgcattatagagcaaataagagcatcaaaaacaatcttagaaatctttcagagaaaggtcacctacaaaggaacattgatcagataatagatttttttttttctcagatggagttctgctccagtctagcaacagagcgataccttgtttcttacttaa

SEQ ID NO: 446402 - DNA, 1446 bp, Homo sapiens
ctacgtaatatgtaactcatttttttaattttatttctacctgaacagtcctatgcagaatctgttccctcaattgaaaatgttacaggcatgagccactgcgcccagtatatatccaccactttaccatccacattagcatttcattagcttctctttgcccttttagttaataaccccatctcagggtgattcactttcataatccgtattaccatggattaattctgcatagcaaaaactatgataggtgtgttaagtaatgaagtttggggaatgttaataagatgatttctcttactgtagatgaaatacatcgtaagagaatccctcgtgagaccagatcagttacatgtatatcttgcctctcttaagtctctaccatttattactgtacttgagttaggatttggaagtgccactgaacactaaaattattctgtctgggtatttgaatggtatgagacaaaaatccattttaatgttttatcaagttgagatgtctcacatgagtagttagtgctgagaatcagacacaggcacatttgggagcatggcgtggcaagaagctttgctttttcctgttcctattgtactcaaacttgtttctacatttttcattgatttctcttcgtactagcactagggcgcaagagaagccgtactggaatattacactactcagcacaagacaggtttaatctttttcttgggggacaagattggaaaattgaggtctgagcagacctgaagagaggcatccagcaactctgagattaaattcatcattgatcaattcgttattgtttggaattgacgtttagctgtgttcctcactcagatacgtgcatgatagctgcttgctaatttggtcttagctcacatttcacctagaatgtatggtctccctctcccctgcaaaatatcccactgttgctaatctgtctgcctcataatttccatgagattgagcatcttgtttgttttgtcaccactatataacagcatgttggaaacaaagcagtaataaagctagaaaaaccaagcgaatacactggattaaaaaaaatactgtttcctagaattaaagaaataaatgaggccgggcgcagtggtgcctgtaatcccagcagtttgggaggctgaggctagtggatcatgtggccgagatcgcgtcactgcactccagtctagcaacagagcgataccttgtttcttacttaaaaaaaaaaaaagacctcatttgttaactgttaaacagaaaacaagaaattccctatacctgtatgcattatagagcaaataagagcatcaaaaacaatcttagaaatctttcagagaaaggtcacctacaaaggaacattgatcagataatagatttttttttttctcagatggagttctgctccagtctagcaacagagcgataccttgtttcttacttaa

SEQ ID NO: 446403 - DNA, 1431 bp, Homo sapiens
cctggcttgctcaggtctgtaatcccagcacttagtccgaggcagatgatcagttgaggtgaggagtttacaggcatgagccactgcgcccagtatatatccaccactttaccatccacattagcatttcattagcttctctttgcccttttagttaataaccccatctcagggtgattcactttcataatccgtattaccatggattaattctgcatagcaaaaactatgataggtgtgttaagtaatgaagtttggggaatgttaataagatgatttctcttactgtagatgaaatacatcgtaagagaatccctcgtgagaccagatcagttacatgtatatcttgcctctcttaagtctctaccatttattactgtacttgagttaggatttggaagtgccactgaacactaaaattattctgtctgggtatttgaatggtatgagacaaaaatccattttaatgttttatcaagttgagatgtctcacatgagtagttagtgctgagaatcagacacaggcacatttgggagcatggcgtggcaagaagctttgctttttcctgttcctattgtactcaaacttgtttctacatttttcattgatttctcttcgtactagcactagggcgcaagagaagccgtactggaatattacactactcagcacaagacaggtttaatctttttcttgggggacaagattggaaaattgaggtctgagcagacctgaagagaggcatccagcaactctgagattaaattcatcattgatcaattcgttattgtttggaattgacgtttagctgtgttcctcactcagatacgtgcatgatagctgcttgctaatttggtcttagctcacatttcacctagaatgtatggtctccctctcccctgcaaaatatcccactgttgctaatctgtctgcctcataatttccatgagattgagcatcttgtttgttttgtcaccactatataacagcatgttggaaacaaagcagtaataaagctagaaaaaccaagcgaatacactggattaaaaaaaatactgtttcctagaattaaagaaataaatgaggccgggcgcagtggtgcctgtaatcccagcagtttgggaggctgaggctagtggatcatgtggccgagatcgcgtcactgcactccagtctagcaacagagcgataccttgtttcttacttaaaaaaaaaaaaagacctcatttgttaactgttaaacagaaaacaagaaattccctatacctgtatgcattatagagcaaataagagcatcaaaaacaatcttagaaatctttcagagaaaggtcacctacaaaggaacattgatcagataatagatttttttttttctcagatggagttctgctccagtctagcaacagagcgataccttgtttcttacttaa

SEQ ID NO: 446404 - DNA, 2843 bp, Homo sapiens
tcccgcgaaggagaagcgcgcttttttccctggcgggggatttggctagaaggctgggccggcagcggttgtgaggagttagctcgcggcattgcaggctctgagaggaggggacccggttcccgggtgagtgtccaggcatgccagcggaacggcccgcgggcagcggcggctcggaggctccagcaatggttgaacaactggacactgctgtgattaccccggccatgctagaagaggaagaacagcttgaagctgctggactagagagagagcggaagatgctggaaaaggctcgcatgtcttgggatagagagtcgacagaaattcggtaccgtagacttcaacatttgcttgaaaaaagcaatatctactccaaatttttattgacgaaaatggaacagcaacaattagaggaacagaagaagaaagaaaaattggagagaaaaaaggagtctttaaaagttaaaaagggtaaaaattcaattgatgcaagtgaagagaagccagttatgaggaaaaaaagaggaagagaagatgaatcatacaatatttcagaggtcatgtcaaaagaggaatgcaaactcagatgtctatccacagaggcctaaagtgggctgtaacatggtttggcaaactttttctgtaaatagccagatagtaaatatttttagcttttgagtagttttgtgggcaactactcaaccctgtactctgctgttgttgcttgaaagcagccatagacaaaccgtaaacaagtgaggctgactttgttccaatttatcccatttctttgcttttaaaaaaatacctgtgtattcgcttagctggagttggtctacaggctgtagtttgctgaccccaggactagaggtttgttgccatgtgtgaatttgtacttaatctactcagattaaaagaaagaaaagctggaaaatcactgtatttgatgaaatatcccattgtataagtgttcccaaattagcctagaatgttatgaaatattatgagccagtaatgtctataggcttatttctgcctgaaggctactagttttatcttgagaatctcatcctcatttcctggcaaaatgagcacagaataaatgcttgttgaataaataaataaatgaacttcatacattattaatttgtttttgttttctcaaactactaggaaattttgtctgtggctaaaaaaaataaaaaggagaatgaggatgaaaactcctcctctactaatctctgtgtggaagatcttcagaaaaataaagattcgaatagtataattaaagatagattgtctgaaacggttaggcagaatactaaattcttttttgacccagtccggaagtgtaatggtcagccagtaccttttcaacaaccaaagcacttcactggaggagtgatgcgatggtaccaagtagaaggcatggaatggcttaggatgctttgggaaaatggaattaatggcattttagcagatgaaatgggattgggtaagacagttcagtgcattgctactattgcattgatgattcagagaggagtaccaggaccttttcttgtctgtggccctttgtctacacttcctaactggatggctgaattcaaaagatttacaccagatatccctacaatgttatatcatggaacccaggaggaacgtcaaaaattggtaagaaatatttacaaacggaaagggactttgcagattcatcctgtggtaatcacgtcatttgaaatagccatgagagaccgaaatgcgttacagcattgctattggaaatacttaatagtagatgaaggacacaggattaagaatatgaagtgccgtctaatcagggagttaaaacgattcaatgctgataacaaacttcttttgactggtactcccttgcaaaacaatttatcagaactttggtcattgctaaactttttgttgccagatgtatttgatgacttgaaaagctttgagtcttggttgacatcactagtctttctgaaactgctgaagatattatgctaaagaaagagaacagaatgtattgcatatgctgcaccagattttaacacctttcttatgagaagactgaagtctgatgttgctcttgaagttcctcctaaacgagaagtagtcgtttatgctccactttcaaagaagcaggagatcttttatacagccattgtgaaccgtacaattgcaaacatgtttggatccagtgagaaagaaacaattgagttaagtcctactggtcgaccaaaacgacgaactagaaaatcaataaattacagcaaaatagatgatttccctaatgaattggaaaaactgatcagtcaaatacagccagaggtggaccgagaaagagctgttgtggaagtgaatatccctgtagaatctgaagttaatctgaagctgcagaatataatgatgctacttcgtaaatgttgtaatcatccatatttgattgaatatcctatagaccctgttacacaagaatttaagatcgatgaagaattggtaacaaattctgggaagttcttgattttggatcgaatgctgccagaactaaaaaaaagaggtcacaaggtacttttgattggaattttggattgttcaattatttttttatcaatcattagaaatattaagatatgtttaatttcaggtgctgcttttttcacaaatgacaagcatgttggacattttgatggattactgccatctcagagatttcaacttcagcaggcttgatgggtccatgtcttactcagagagagaaaaaaactgcactccagcctgggtgacagagcgagactctgtctcttaaaaaaaaaaaaaaa

SEQ ID NO: 446405 - DNA, 1180 bp, Homo sapiens
ttaaattagtctagaatatgtttataaatttatttacatttggttgaaatgtattcttaaaacttattccacagtttccagtttgaggataaatgaggtctaaagacagtatgaacttgttaataatttttcctattgtcctttttagaaatcttacatatcctttagcctaattatagattggccctgcaagcatgtcactgtatcttttatgtcttcctgagtcttagcactttaaattcttctatatccttcactgtctttcttacagcaccctaaaagagtagcatgtgaactgttgctcttctctaaggtattttaggacatttttaaaataatatatgagtggttgtcatgctaaatactgtctaccacaactcatacaattaaagtggtcaaagaaaggtctctttcatttcttttttcattttaaaaagaaatgttatttgtaaaacagtatagtcataacacagatatggcagttttttagtttttttttttctttttcttcactgtgtcatccaggcagtagcgtgattataattcactgcagcctccaactcctgggcttgagggatcctctcactgagccttctgagcagctgggactgcaaacgtgtgccagtactcctggctaatttttaaatttttttgtagaattgaggtgtttttttaaatttttttaaagccttgtttgcaaactgttgcaacttctggcggctgcaacttctggcctcaagcaatcttcctgtcttggcctcccaatagcataagctaccgcacccagcccacaattttctttcagtacaatataaacatcttgcaagcgctagcttgatttacactttttgcctgtaatcccagcagtttgggaggctgaggctagtggatcatgtggccgagatcgcgtcactgcactccagtctagcaacagagcgataccttgtttcttacttaaaaaaaaaaaaagacctcatttgttaactgttaaacagaaaacaagaaattccctatacctgtatgcattatagagcaaataagagcatcaaaaacaatcttagaaatctttcagagaaaggtcacctacaaaggaacattgatcagataatagatttttttttttctcagatggagttctgctccagtctagcaacagagcgataccttgtttcttacttaa

SEQ ID NO: 446406 - DNA, 410 bp, Homo sapiens
agaaatctttcagagaaaggtcacctacaaaggaacattgatcagataatagatttttttttttctcagatggagttctgctcttgtcgcccagactggagtgcaatggcacgatgttggctcactgcaatctccgcttcccaggttcaagcagttctccagccttagcctcccaagtagctgggattacaggctcccactaccattcccagaatttttgtattttaattagtagagacggggtttcgccatgttggccaggctagcctcgaactcctgaactcaggtgatctgcctgcctcggcctcacaaagtgctgtgattacagggtgtgagccactgcacctggccgataacagatgttttaatagtaagataaaaagtaaaatttccagtgtgtcgaaggaaga

SEQ ID NO: 446407 - DNA, 429 bp, Homo sapiens
acacataagtcataaatagaataattatgacttgcataattatgaccagtattgtcaggttttatgtgtctgctggtaaaactttggaatatgatttgcagaaatctcagttcaggagtttagcaaagtttatgaatgtgtacagcattaaaaagtatttaaaccaggccgggcatgaaggcttatgccagtaattccagcacttgggagtctgaggtgggcagatcccttgaggccaggagttccagaccagcctggccaacatgacgaaaccctgtctccactaaaaatacaaaaattaggccggacgcggtggctcacgcctgtaatcccagcactttgggaggccgaggcgggtggatcatgaggtcaggatatcgagaccatcctggctaacaaggtgaaaccccgtctctactaaaaattaca

SEQ ID NO: 446408 - DNA, 447 bp, Homo sapiens
atttgactgaaaattttgaggggagggaaagaaacaataccttttacggcatgtaataggaagaagacctggattttagttgctgctctgatgtcccaacttgggtaaggcaacataacataaatgtcagtttcttcagatttgtgatgaagctgataatccatgctcagcttcctttatgggtctcttgcctatcaaataaggtacagtatgtgaagatacattgcagattatcttatgcattgcttcaggggatgattaaaccatcctttattatagccagagtctagtctaagggaagaaggtcattctctataccagtgaaggctccatccaaaccagtgtttgggggcatagtcataattgaaaaatgattgttttccttatctgtaagacaggtaaatggtattaatcctcaggtggttgtgaggattaagtgatacatgt

SEQ ID NO: 446409 - DNA, 4122 bp, Homo sapiens
tcccgcgaaggagaagcgcgcttttttccctggcgggggatttggctagaaggctgggccggcagcggttgtgaggagttagctcgcggcattgcaggctctgagaggaggggacccggttcccgggctcggaggctccagcaatggttgaacaactggacactgctgtgattaccccggccatgctagaagaggaagaacagcttgaagctgctggactagagagagagcggaagatgctggaaaaggctcgcatgtcttgggatagagagtcgacagaaattcggtaccgtagacttcaacatttgcttgaaaaaagcaatatctactccaaatttttattgacgaaaatggaacagcaacaattagaggaacagaagaagaaagaaaaattggagagaaaaaaggagtctttaaaagttaaaaagggtaaaaattcaattgatgcaagtgaagagaagccagttatgaggaaaaaaagaggaagagaagatgaatcatacaatatttcagaggtcatgtcaaaagaggaatgcaaactcagatgtctatccacagaggcctaaagtgggctgtaacatggtttggcaaactttttctgtaaatagccagatagtaaatatttttagcttttgagtagttttgtgggcaactactcaaccctgtactctgctgttgttgcttgaaagcagccatagacaaaccgtaaacaagtgaggctgactttgttccaatttatcccatttctttgcttttaaaaaaatacctgtgtattcgcttagctggagttggtctacaggctgtagtttgctgaccccaggactagaggtttgttgccatgtgtgaatttgtacttaatctactcagattaaaagaaagaaaagctggaaaatcactgtatttgatgaaatatcccattgtataagtgttcccaaattagcctagaatgttatgaaatattatgagccagtaatgtctataggcttatttctgcctgaaggctactagttttatcttgagaatctcatcctcatttcctggcaaaatgagcacagaataaatgcttgttgaataaataaataaatgaacttcatacattattaatttgtttttgttttctcaaactactaggaaattttgtctgtggctaaaaaaaataaaaaggagaatgaggatgaaaactcctcctctactaatctctgtgtggaagatcttcagaaaaataaagattcgaatagtataattaaagatagattgtctgaaacggttaggcagaatactaaattcttttttgacccagtccggaagtgtaatggtcagccagtaccttttcaacaaccaaagcacttcactggaggagtgatgcgatggtaccaagtagaaggcatggaatggcttaggatgctttgggaaaatggaattaatggcattttagcagatgaaatgggattgggtaagacagttcagtgcattgctactattgcattgatgattcagagaggagtaccaggaccttttcttgtctgtggccctttgtctacacttcctaactggatggctgaattcaaaagatttacaccagatatccctacaatgttatatcatggaacccaggaggaacgtcaaaaattggtaagaaatatttacaaacggaaagggactttgcagattcatcctgtggtaatcacgtcatttgaaatagccatgagagaccgaaatgcgttacagcattgctattggaaatacttaatagtagatgaaggacacaggattaagaatatgaagtgccgtctaatcagggagttaaaacgattcaatgctgataacaaacttcttttgactggtactcccttgcaaaacaatttatcagaactttggtcattgctaaactttttgttgccagatgtatttgatgacttgaaaagctttgagtcttggttgacatcactagtctttctgaaactgctgaagatattatgctaaagaaagagaacagaatgtattgcatatgctgcaccagattttaacacctttcttatgagaagactgaagtctgatgttgctcttgaagttcctcctaaacgagaagtagtcgtttatgctccactttcaaagaagcaggagatcttttatacagccattgtgaaccgtacaattgcaaacatgtttggatccagtgagaaagaaacaattgagttaagtcctactggtcgaccaaaacgacgaactagaaaatcaataaattacagcaaaatagatgatttccctaatgaattggaaaaactgatcagtcaaatacagccagaggtggaccgagaaagagctgttgtggaagtgaatatccctgtagaatctgaagttaatctgaagctgcagaatataatgatgctacttcgtaaatgttgtaatcatccatatttgattgaatatcctatagaccctgttacacaagaatttaagatcgatgaagaattggtaacaaattctgggaagttcttgattttggatcgaatgctgccagaactaaaaaaaagaggtcacaaggtgctgcttttttcacaaatgacaagcatgttggacattttgatggattactgccatctcagagatttcaacttcagcaggcttgatgggtccatgtcttactcagagagagaaaaaaacatgcacagcttcaacacggatccagaggtgtttatcttcttagtgagtacacgagctggtggcctgggcattaatctgactgcagcagatacagttatcatttatgatagtgattggaacccccagtcggatcttcaggcccaggatagatgtcatagaattggtcagacaaagccagttgttgtttatcgccttgttacagcaaatactatcgatcagaaaattgtggaaagagcagctgctaaaaggaaactggaaaagttgatcatccataaaaatcatttcaaaggtggtcagtctggattaaatctgtctaagaatttcttagatcctaaggaattaatggaattattaaaatctagagattatgaaagggaaataaaaggatcaagagagaaggtcattagtgataaagatctagagttgttgttagatcgaagtgatcttattgatcaaatgaatgcttcaggaccaattaaagagaagatggggatattcaagatattagaaaattctgaagattccagtcctgaattggagacggggtttcaccatcttggcctgactggtcccgaactgatctcaggtgatctgcccacctcggcctcccaaagtgctgggattacaagcgtgagccactgcgtggcctgagcactagggcgcaagagaagccgtactggaatattacactactcagcacaagacaggtttaatctttttcttgggggacaagattggaaaattgaggtctgagcagacctgaagagaggcatccagcaactctgagattaaattcatcattgatcaattcgttattgtttggaattgacgtttagctgtgttcctcactcagatacgtgcatgatagctgcttgctaatttggtcttagctcacatttcacctagaatgtatggtctccctctcccctgcaaaatatcccactgttgctaatctgtctgcctcataatttccatgagattgagcatcttgtttgttttgtcaccactatataacagcatgttggaaacaaagcagtaataaagctagaaaaaccaagcgaatacactggattaaaaaaaatactgtttcctagaattaaagaaataaatgaggccgggcgcagtggtgcctgtaatcccagcagtttgggaggctgaggctagtggatcatgtggccgagatcgcgtcactgcactccagtctagcaacagagcgataccttgtttcttacttaaaaaaaaaaaaagacctcatttgttaactgttaaacagaaaacaagaaattccctatacctgtatgcattatagagcaaataagagcatcaaaaacaatcttagaaatctttcagagaaaggtcacctacaaaggaacattgatcagataatagatttttttttttctcagatggagttctgctccagtctagcaacagagcgataccttgtttcttacttaa

SEQ ID NO: 446410 - DNA, 5183 bp, Homo sapiens
atttcttaaggtggagtctcgcactgtcacctgggctggagtgcagtggcatgatctcggctcactacaacctttgcctcttgggttcaagtgagtctcctgtctcagcctcccaagtagctgggattacaagtgcccaccaccacgcccagctaattttttgtatttttagtagagacagggtttcaccatgttggccaggctggtctcaaactcctgaccttgtgatttgcctgacttggcctcccaaagtgctgggattacaggcttgagccaccatgcccggccaagactattttttagaaccataaccacaatacagttaccacacttttgaaagtcgatgggaattccttaatatttaaatttctcaataggctaatttttatttttagggatgggggcttgctgtattgacgagactggagtgcagtggctattcctgagtattgtcatagtgactacacctcaaacacctgggctcacatgatcctcctgcctcagtgtcccgagtagtagtgcagggactgtaggcacttaccgctgtgatctgcttagctcatacattttaaaaaaatagttggttcaaatcaggatccaaaaaagttacataaattgtgtttgattaatgcgtatcttgggtctcttttagatctagagtgtctctcatcttttttaagaaacattatttgttgaagaaaatgagtaattctgtataattccccacattctagactttactgattgtatccccatgatttctctgcctcttgtgtttcctgttaactatagtaactataagttaaatacggaagtttgtgattaaggtgtttttttatttttttttttatttttatttttttttgggagacaagatctttctctgttgcccagggtggagtgcagtggtgccatctcggctcattgaacctctgattgctgggctcaagcaatcctcccacctcatcctcctgagtagctgggactacaggcgtgtaccaccaagcccagccaacatttatattttttgtagagatgggatctcaccatgttgcccatgcttgatttttaataagaatacttcattggtggtatttatagattttgatttatttccaaattgttctttcaagtttcattttatctagtcattttacaggacagcttttatcagttcctggtataaaatccttttagcctcagccttataatatgaatatctatacatacataatacttcatacacacacgatatacatatattcccatgtatatatatgtgtgtgtgtcagccacttacatgtcctgttactcttctatgaatcttaaatttgatattgctgttttgaatctacttcatcccctatgccttctatattctctctgcttgaaatctaccctcactatcttgaatgatgaagcctggtgacaactttttagataattttatgtaagataattatttgctaagtcatccagtgacatactcgggtattgtttgtctccctaccagcagcatctagtaggtacttcaaaatcagagcactttattctgtatttttaattttttctgtctttgcctcttacccaggaatgcaaactcagatgtctatccacagaggcctaaagtgggctgtaacatggtttggcaaactttttctgtaaatagccagatagtaaatatttttagcttttgagtagttttgtgggcaactactcaaccctgtactctgctgttgttgcttgaaagcagccatagacaaaccgtaaacaagtgaggctgactttgttccaatttatcccatttctttgcttttaaaaaaatacctgtgtattcgcttagctggagttggtctacaggctgtagtttgctgaccccaggactagaggtttgttgccatgtgtgaatttgtacttaatctactcagattaaaagaaagaaaagctggaaaatcactgtatttgatgaaatatcccattgtataagtgttcccaaattagcctagaatgttatgaaatattatgagccagtaatgtctataggcttatttctgcctgaaggctactagttttatcttgagaatctcatcctcatttcctggcaaaatgagcacagaataaatgcttgttgaataaataaataaatgaacttcatacattattaatttgtttttgttttctcaaactactaggaaattttgtctgtggctaaaaaaaataaaaaggagaatgaggatgaaaactcctcctctactaatctctgtgtggaagatcttcagaaaaataaagattcgaatagtataattaaagatagattgtctgaaacggttaggcagaatactaaattcttttttgacccagtccggaagtgtaatggtcagccagtaccttttcaacaaccaaagcacttcactggaggagtgatgcgatggtaccaagtagaaggcatggaatggcttaggatgctttgggaaaatggaattaatggcattttagcagatgaaatgggattgggtaagacagttcagtgcattgctactattgcattgatgattcagagaggagtaccaggaccttttcttgtctgtggccctttgtctacacttcctaactggatggctgaattcaaaagatttacaccagatatccctacaatgttatatcatggaacccaggaggaacgtcaaaaattggtaagaaatatttacaaacggaaagggactttgcagattcatcctgtggtaatcacgtcatttgaaatagccatgagagaccgaaatgcgttacagcattgctattggaaatacttaatagtagatgaaggacacaggattaagaatatgaagtgccgtctaatcagggagttaaaacgattcaatgctgataacaaacttcttttgactggtactcccttgcaaaacaatttatcagaactttggtcattgctaaactttttgttgccagatgtatttgatgacttgaaaagctttgagtcttggttgacatcactagtctttctgaaactgctgaagatattatgctaaagaaagagaacagaatgtattgcatatgctgcaccagattttaacacctttcttatgagaagactgaagtctgatgttgctcttgaagttcctcctaaacgagaagtagtcgtttatgctccactttcaaagaagcaggagatcttttatacagccattgtgaaccgtacaattgcaaacatgtttggatccagtgagaaagaaacaattgagttaagtcctactggtcgaccaaaacgacgaactagaaaatcaataaattacagcaaaatagatgatttccctaatgaattggaaaaactgatcagtcaaatacagccagaggtggaccgagaaagagctgttgtggaagtgaatatccctgtagaatctgaagttaatctgaagctgcagaatataatgatgctacttcgtaaatgttgtaatcatccatatttgattgaatatcctatagaccctgttacacaagaatttaagatcgatgaagaattggtaacaaattctgggaagttcttgattttggatcgaatgctgccagaactaaaaaaaagaggtcacaaggtgctgcttttttcacaaatgacaagcatgttggacattttgatggattactgccatctcagagatttcaacttcagcaggcttgatgggtccatgtcttactcagagagagaaaaaaacatgcacagcttcaacacggatccagaggtgtttatcttcttagtgagtacacgagctggtggcctgggcattaatctgactgcagcagatacagttatcatttatgatagtgattggaacccccagtcggatcttcaggcccaggatagatgtcatagaattggtcagacaaagccagttgttgtttatcgccttgttacagcaaatactatcgatcagaaaattgtggaaagagcagctgctaaaaggaaactggaaaagttgatcatccataaaaatcatttcaaaggtggtcagtctggattaaatctgtctaagaatttcttagatcctaaggaattaatggaattattaaaatctagagattatgaaagggaaataaaaggatcaagagagaaggtcattagtgataaagatctagagttgttgttagatcgaagtgatcttattgatcaaatgaatgcttcaggaccaattaaagagaagatggggatattcaagatattagaaaattctgaagattccagtcctgaattggagacggggtttcaccatcttggcctgactggtcccgaactgatctcaggtgatctgcccacctcggcctcccaaagtgctgggattacaagcgtgagccactgcgtggcctgagcactagggcgcaagagaagccgtactggaatattacactactcagcacaagacaggtttaatctttttcttgggggacaagattggaaaattgaggtctgagcagacctgaagagaggcatccagcaactctgagattaaattcatcattgatcaattcgttattgtttggaattgacgtttagctgtgttcctcactcagatacgtgcatgatagctgcttgctaatttggtcttagctcacatttcacctagaatgtatggtctccctctcccctgcaaaatatcccactgttgctaatctgtctgcctcataatttccatgagattgagcatcttgtttgttttgtcaccactatataacagcatgttggaaacaaagcagtaataaagctagaaaaaccaagcgaatacactggattaaaaaaaatactgtttcctagaattaaagaaataaatgaggccgggcgcagtggtgcctgtaatcccagcagtttgggaggctgaggctagtggatcatgtggccgagatcgcgtcactgcactccagtctagcaacagagcgataccttgtttcttacttaaaaaaaaaaaaagacctcatttgttaactgttaaacagaaaacaagaaattccctatacctgtatgcattatagagcaaataagagcatcaaaaacaatcttagaaatctttcagagaaaggtcacctacaaaggaacattgatcagataatagatttttttttttctcagatggagttctgctccagtctagcaacagagcgataccttgtttcttacttaa

SEQ ID NO: 446411 - DNA, 3809 bp, Homo sapiens
tcccgcgaaggagaagcgcgcttttttccctggcgggggatttggctagaaggctgggccggcagcggttgtgaggagttagctcgcggcattgcaggctctgagaggaggggacccggttcccgggtgagtgtccaggcatgccagcggaacggcccgcgggcagcggcggctcggaggctccagcaatggttgaacaactggacactgctgtgattaccccggccatgctagaagaggaagaacagcttgaagctgctggactagagagagagcggaagatgctggaaaaggctcgcatgtcttgggatagagagtcgacagaaattcggtaccgtagacttcaacatttgcttgaaaaaagcaatatctactccaaatttttattgacgaaaatggaacagcaacaattagaggaacagaagaagaaagaaaaattggagagaaaaaaggagtctttaaaagttaaaaagggtaaaaattcaattgatgcaagtgaagagaagccagttatgaggaaaaaaagaggaagagaagatgaatcatacaatatttcagaggtcatgtcaaaagaggaatgcaaactcagatgtctatccacagaggcctaaagtgggctgtaacatggtttggcaaactttttctgtaaatagccagatagtaaatatttttagcttttgagtagttttgtgggcaactactcaaccctgtactctgctgttgttgcttgaaagcagccatagacaaaccgtaaacaagtgaggctgactttgttccaatttatcccatttctttgcttttaaaaaaatacctgtgtattcgcttagctggagttggtctacaggctgtagtttgctgaccccaggactagaggtttgttgccatgtgtgaatttgtacttaatctactcagattaaaagaaagaaaagctggaaaatcactgtatttgatgaaatatcccattgtataagtgttcccaaattagcctagaatgttatgaaatattatgagccagtaatgtctataggcttatttctgcctgaaggctactagttttatcttgagaatctcatcctcatttcctggcaaaatgagcacagaataaatgcttgttgaataaataaataaatgaacttcatacattattaatttgtttttgttttctcaaactactaggaaattttgtctgtggctaaaaaaaataaaaaggagaatgaggatgaaaactcctcctctactaatctctgtgtggaagatcttcagaaaaataaagattcgaatagtataattaaagatagattgtctgaaacggttaggcagaatactaaattcttttttgacccagtccggaagtgtaatggtcagccagtaccttttcaacaaccaaagcacttcactggaggagtgatgcgatggtaccaagtagaaggcatggaatggcttaggatgctttgggaaaatggaattaatggcattttagcagatgaaatgggattgggtaagacagttcagtgcattgctactattgcattgatgattcagagaggagtaccaggaccttttcttgtctgtggccctttgtctacacttcctaactggatggctgaattcaaaagatttacaccagatatccctacaatgttatatcatggaacccaggaggaacgtcaaaaattggtaagaaatatttacaaacggaaagggactttgcagattcatcctgtggtaatcacgtcatttgaaatagccatgagagaccgaaatgcgttacagcattgctattggaaatacttaatagtagatgaaggacacaggattaagaatatgaagtgccgtctaatcagggagttaaaacgattcaatgctgataacaaacttcttttgactggtactcccttgcaaaacaatttatcagaactttggtcattgctaaactttttgttgccagatgtatttgatgacttgaaaagctttgagtcttggttgacatcactagtctttctgaaactgctgaagatattatgctaaagaaagagaacagaatgtattgcatatgctgcaccagattttaacacctttcttatgagaagactgaagtctgatgttgctcttgaagttcctcctaaacgagaagtagtcgtttatgctccactttcaaagaagcaggagatcttttatacagccattgtgaaccgtacaattgcaaacatgtttggatccagtgagaaagaaacaattgagttaagtcctactggtcgaccaaaacgacgaactagaaaatcaataaattacagcaaaatagatgatttccctaatgaattggaaaaactgatcagtcaaatacagccagaggtggaccgagaaagagctgttgtggaagtgaatatccctgtagaatctgaagttaatctgaagctgcagaatataatgatgctacttcgtaaatgttgtaatcatccatatttgattgaatatcctatagaccctgttacacaagaatttaagatcgatgaagaattggtaacaaattctgggaagttcttgattttggatcgaatgctgccagaactaaaaaaaagaggtcacaaggtgctgcttttttcacaaatgacaagcatgttggacattttgatggattactgccatctcagagatttcaacttcagcaggcttgatgggtccatgtcttactcagagagagaaaaaaacatgcacagcttcaacacggatccagaggtgtttatcttcttagtgagtacacgagctggtggcctgggcattaatctgactgcagcagatacagttatcatttatgatagtgattggaacccccagtcggatcttcaggcccaggatagatgtcatagaattggtcagacaaagccagttgttgtttatcgccttgttacagcaaatactatcgatcagaaaattgtggaaagagcagctgctaaaaggaaactggaaaagttgatcatccataaaaatcatttcaaaggtggtcagtctggattaaatctgtctaagaatttcttagatcctaaggaattaatggaattattaaaatctagagattatgaaagggaaataaaaggatcaagagagaaggtcattagtgataaagatctagagttgttgttagatcgaagtgatcttattgatcaaatgaatgcttcaggaccaattaaagagaagatggggatattcaagatattagaaaattctgaagattccagtcctgaatgtttgttttaaagtggagctcaagaatagcttttaaaagttcttatttacatctagtgatttccctgtattgggtttgaaatactgattgtccacttcaccttttttattatatcagttgacatgtaactagtaccatgcgtacttaaatagatggtaattttctgagccttaccaagaacaaagaagtatccatattaagtttagattttcagttaatttttgagactgagtagtattcttggatacaggctgatgtgtacttaaccacttccagatttatacagtcttcctgtggaagtttagtaaatgtctttttccctcctttcttctagtaatgcagttcatgggctttaggtacttcagttatgaagtaggcttttcatggggagagattgggattatgctctctgttgtttaagaaactgtttgattttagagtctatttctatgagatagtttaccaaataaatgttccttataagatgatctcattaaattatttcttcaggaatagcttaggtgcaataatagcaaaagacttggctgtcggtaggatttggtta

SEQ ID NO: 446412 - DNA, 1032 bp, Homo sapiens
tcccgcgaaggagaagcgcgcttttttccctggcgggggatttggctagaaggctgggccggcagcggttgtgaggagttagctcgcggcattgcaggctctgagaggaggggacccggttcccgggtgagtgtccaggcatgccagcggaacggcccgcgggcagcggcggctcggaggctccagcaatggttgaacaactggacactgctgtgattaccccggccatgctagaagaggaagaacagcttgaagctgctggactagagagagagcggaagatgctggaaaaggctcgcatgtcttgggatagagagtcgacagaaattcggtaccgtagacttcaacatttgcttgaaaaaagcaatatctactccaaatttttattgacgaaaatggaacagcaacaattagaggaacagaagaagaaagaaaaattggagagaaaaaaggagtctttaaaagttaaaaagggtaaaaattcaattgatgcaagtgaagagaagccagttatgaggaaaaaaagaggaagagaagatgaatcatacaatatttcagaggtcatgtcaaaagaggtaaaaataaaagggagagggcacctaacatttgatgttgagtaaaatgtaggttttaaaccaccttaaatctgtaaagattgaatattcaatatcacatgaaatatgttttgaatttaatattatatatcatttataggtgaagctgccaaaatgtttgaagctatctaccaacctacagtagacttgagactaatctgaaactaatgtcatctgaccttcatagacttttttttttttttgagatggagctctgtggtccatgctgccttgcagtgtcactatatctgctcactgcaacctccacctcgcgggttcaagcgattctcctgtctcagcctcccaagtagctgggataacaggtgccaaccaccacgcctggccaatttttgtattttcagtagagatggggtttcaccatgttggccaggctggtcttgaactcctgacttaaggt

SEQ ID NO: 446413 - DNA, 1659 bp, Homo sapiens
tgatccgcccgccctggcctctcagagtgctgggattacaggcatgacccaccccatccggccctctgagtctttcttatctgtaaaatgggtataataatacctatctaatcggctttagtaatggtggagataatgcctgaaagtgctagtatagaggtttaatagccagcaaggactgttattagaatgaatagtaatatgactactgtcacattttgcaaatgtgtaaagaagaaagagggctaagtgaatcaaagggagacagccccactcaccctgttctgccccagaggactgagcgatccccaccatctggcaagctgcctcaccaggaggtccagctggggctacaggactggctactttgctacaatggcccgtctttcctgagcccagtggagggtcccaggggggcagaagtcattgataggggccagtagggttgtagagccactgtctgaacttctgtggaggtctggtgcaggggaggtgtgaacagataggaggctaggtgaggatgcagcagaggaagggggcaggagtgccccaggagggggcggtaccgaggcagggattcagctgggtctgagagggaggcaaggctgagggggatggccctttggagtgggcagggacatgaccacagaaagcctgggaagtggaaacagacaggagcctgctggagctcttggagctttgtgtggggcactaggggaaggaggcaggcactccaccctgacctgcccctacctctggatgagggtcttctctgcctgttggatgatgtgctgcccctgctcttggaggaagaggcctcccagccaccccctcctgccagtcgccttgccctgctgacccagacagatctgctatccctacagcatccaggaaggccacagggagggggcccaggtggcatgggtttctgaggcctgggatctgctctcagtcccgctctcgccaaccccctttgcccctctgtgacagtgtgtgtacatatgcgtgcatgtgtgtacctgtgtggtgtggctcacaaggtcacccctgggggtgggataataagaggtaaagtgtgaccccctctcttccgtacattcattttttcaagcttgtgaatattcacattgttaatataatcttctgcagtcccatgacttcgaatagcacttagatgccgatgacccccccaccaaagaaaccccactgtctcccacagactccaggtctgtatctccaactgcctactcaatacaacacgtccacctgatgcaatgaacttaatgtgtctaaaccccaattccacatttccagtcctcctaccggctcctcccccagtcttctctactttactatatgacaactccatttttcccaatactggttttaaaaaccctggagtagtccttgactccagtctctctcacctttcaaccaattcagcagcaaatactgacagctctacctttgctcatcaaagcatatccccaaatcaccctattccagactgcacactgtcatctctcccttcaattacagcagtagcctcctaactagttttcttgattccactcttgcccatcagcagtgaaattaccccagagcagttaaaatgatcttttaggatgggcacagtggctcacgcctgtaataccagca

SEQ ID NO: 446414 - DNA, 475 bp, Homo sapiens
ggaagctggagccctagagcctggagaaaggatgagaaaaagaagagaacctggcagcccctgttgcacactgacctctgccctctcttaggtggaagagatcatgcagctggtgaatgcctacttggccaacccctcccccgagaggccctgcagcagctcttctcctccatgccaagacctgccagacacctcccctcccagccagcgcccgggcctggacgagccccagggacagtctggctgcttggggcagctgcaggactgagcctgccaagaggtcacgacttccctcctgcctgcagcctgggccaggactgctctgagatttgagggaaacatggacccttttggccctgcagggacagggcacatcccacacccaagggctacaatgggtgtgggtaattttctagtttgtttcttaatttatttgtagaagagaagcaaaaaaaaaaaagtttcttatttacac

SEQ ID NO: 446415 - DNA, 3395 bp, Homo sapiens
gtgacgaaacctggaccctgcctagtaaagaagggaggagagaaagaagagagagggggggcggggtcccagctctgtgctcgcgcccccagcgcgccagtcccggggctgcagggagcgcagcgcgcgcggcccgggccccggccaccggacgccctaccggacacgaccctccctggagcttggacaactgcccacctcggacgctgcaccggacactgccccccacagggctggacactccaacggacactacttcccagctccggacattgctccctcctctcccggggccctggacgcttttccccctcccccctccgggggcccagacactgagcccccctcagcgtctggctagcgtccccttgcaccccagcccaggacactgcctcctccctgtcctcttctcccttctgctcctcccacctcatctttcccctgctcgggtcggagccccgccagttcctccgaccccctactgctcggccgcggctgcccgcgcccccatccgcagctcctcgcccggatgcctctccccgggggactatggtggcttctctgctgccgtcgaggcttcactcttctgcaccgggactacggggacggcgagcttagcggggacggggacgaggacgaggacgaggaaacctttgagctgcggaccccgagtccagcgggcggcgggaggggtcccctggaagtgacgctgactcagccagtgaggagcgggcctgtctccaacaggctgcagagctgggaggagacttggagcctcatcccggagaaagggctgccggaggacgacccggacatcgttgtgaaaggttggctgtaccgggagccccgcggaggaggggcgcggccctggctgcccccgcgccgagcctggtttgtgctcacgcgggactccctggatcagttcagcagcagcgggaaaggggcgcggcgtctcgggagcctcgtgctcaccagcctgtgctcggtgaccggcccagagcgcaggcgtaaggagacaggtctgtggtcagtgactgtgtctggtcggaaacacagtgtccgcctctgctccccacgccaggcagaggctgagcgctggggggtggcattgcgggaagtgatcgcctccaaggcacccctggagacccccacccagctactgctcagggacatacaggaaagttgcggggacccagaggccgttgccctcatttacctgaggaacccgattctgagacacactagtggagccttgtatgccccactcctgcccctgccctatggagtcagcgccccaggtccgggctatgcacccctgcgcgaggaggcggtgcggctgttcttggcgctgcaggcgctggagggggcgcggcgccccgggcccttgatgcagggtgtgctccaaacctgccgggacttgcccgcgctccgggatgaactcttcctgcagctggctaagcagacctcgggccctgcaggtccccccgggctcccggctacccaagaccctgcggccctgcggtactggcaactcctcacctgcatgagctgcaccttccgacctgggggagctgtgcgggggcacctcctggggcacttggagaggaccgagcaggcactcccggactcggaactggcggaatatgcgcgcttcatccggaaagcgctgggccggacgcgcggcagagagctggtgccctcgctggcggagatttccgcgttgagccaacggcaggagctgctgtgtaccgtgcactgtccgggggctcccaacgcctttactttcacagcctctgcagcaaactgcggtcactataatcgctcctgtggcacagaggcatacccaggggaatctgcccagggggccactctgtgcccacgtgggaacccacacctgcttgtaaagcctcccctccctctgaccagcaaccaggacagtttgttgttccaagcagtgggctcatgtctgttttggctcagaacagggtggggagagcgggccagggacccgcaggaaggcttatccttgagattgcgtgggagacacaacaaggggtgggggcccgcaggcggggcggggcgaagcaggtgatatcaagcccagagccccagcctctccccacagtctcaccatggcccgcaccgtggtgctcatcaccggctgttcctcgggcatcggcctgcacttggccgtacgtctggcttcagatccatcccagagcttcaaagtgtatgccacgttgagggacctgaaaacacagggccggctgtgggaggcggcccgggccctggcatgccctccgggatccctggagacgttgcagctggacgtaagggactcaaaatccgtggccgctgcccgggaacgcgtgactgagggccgcgtggacgtgctggtgtgtaacgcaggcctgggcctgctggggccgctggaggcgctgggggaggacgccgtggcctctgtgctggacgtgaatgtagtagggactgtgcggatgctgcaggccttcctgccagacatgaagaggcgcggttcgggacgcgtgttggtgaccgggagcgtgggaggattgatggggctgcctttcaatgacgtttattgcgccagcaagttcgcgctcgaaggcttatgcgagagtctggcggttctgctgctgccctttggggtccacttgagcctgatcgagtgcggcccagtgcacaccgccttcatggagaaggtgttgggcagcccagaggaggtgctggaccgcacggacatccacaccttccaccgcttctaccaatacctcgcccacagcaagcaagtctttcgcgaggcggcgcagaaccctgaggaggtggcggaggtcttcctcaccgctttgcgcgccccgaagccgaccctgcgctacttcaccaccgagcgcttcctgcccctgctgcggatgcgcctggacgaccccagcggctccaactacgtcaccgccatgcaccgggaagtgttcggcgacgttccggcaaaggccgaggctggggccgaggctgggggcggggccgggcctggggcagaggacgaggccgggcgcggtgcggtgggggaccctgagctcggcgatcctccggccgccccgcagtaaaggcttcctcagccgctgtctcccgcgcccttctttgtcccctgggtctgtgtggtccctggggatggggcggcggtagcagctgtgggtggctaattaagatagatcgcgttagccagttttaccagcgcagctaggcgcgatgctgtcgcctgtaatgccagcgctttgggaggcggaggcaggaggatcgctcaagccccggagttggagaccagccagagcaacacagtgagacccccatctctacaaaaataaagaaaatttaaaaatcaa

SEQ ID NO: 446416 - DNA, 3038 bp, Homo sapiens
ctgggctccaacaatcccctttcctgggcctcccaaagtgctgggattagaggcatgagccaccgtgcccagcctcaaagcatattttaaaggatagaaataaacagccatatgaagagatacagacagggcggtctggaagggtccagagcaggagcttctatctccatagagttggggttacgtcaccctctgggcacattctgtcagcctccacacgttcagctctcagaagctcccgaaccctgtcctttgggccttttatggagaactccattggctgtccatgactgaagcatggacaactgtgataatgtgattgggcaaaaagggtctgatctaagcccagcaaggccagtccagattctttgggcctttgtgcagcattcctttctccagggtatggggcaaggacccactctggaatgaggatcctacaacccacaatcagattagagtcctgccttgggcagctgaaaagaggacaggagaaggtcagagagacgaaaggctgttttttgaggcctgaggcaccccaacatgacaacgtaagactgtaaccatggtcatgtgagttatgagctaggaaccctggacgaaaccaacacatatacaatcatctcccacctcccaacgcctttactttcacagcctctgcagcaaactgcggtcactataatcgctcctgtggcacagaggcatacccaggggaatctgcccagggggccactctgtgcccacgtgggaacccacacctgcttgtaaagcctcccctccctctgaccagcaaccaggacagtttgttgttccaagcagtgggctcatgtctgttttggctcagaacagggtggggagagcgggccagggacccgcaggaaggcttatccttgagattgcgtgggagacacaacaaggggtgggggcccgcaggcggggcggggcgaagcaggtgatatcaagcccagagccccagcctctccccacagtctcaccatggcccgcaccgtggtgctcatcaccggctgttcctcgggcatcggcctgcacttggccgtacgtctggcttcagatccatcccagagcttcaaagtgtatgccacgttgagggacctgaaaacacagggccggctgtgggaggcggcccgggccctggcatgccctccgggatccctggagacgttgcagctggacgtaagggactcaaaatccgtggccgctgcccgggaacgcgtgactgagggccgcgtggacgtgctggtgtgtaacgcaggcctgggcctgctggggccgctggaggcgctgggggaggacgccgtggcctctgtgctggacgtgaatgtagtagggactgtgcggatgctgcaggccttcctgccagacatgaagaggcgcggttcgggacgcgtgttggtgaccgggagcgtgggaggattgatggtgggtgagtggtagggagtggcctcggcagctccagattctttgtgtgcggagctgagccttgaaggcaggttccgcggggggggtggagtggggtgccgtcagcttggaggggcaccgtctgcccggggatgaccccctggccgctgcgcctcaggaacctcgtctccccacctaagggctgcctttcaatgacgtttattgcgccagcaagttcgcgctcgaaggcttatgcgagagtctggcggttctgctgctgccctttggggtccagtgagtcaacacccccgttccccgaaccctcttaactctgacctagagacgccgagcaccctgtcctgcgggagccgctctggggcgatctccctggccctctctgcccggctcacattagctgtgtgccaggcacttgggctgggcgcatggcacgcattgtgccacctgctgacctagctgctgaagtgttggtattgttatggggaagctccagcccagagaggttaggtgactggcccaaggtcacacagcggccagggaccccgctagattcgaatcctgacaccagggctcccttgtagcctcagatggatttgggagggctgctccggcaggaacccgcgtttcaaatgttctggttatccccagcgccctttccgcctcacttccccagcgcagcggtgctgctcgcggtcgggggccgggacgtggttggggctgggactggggttggggctgggactggggcctggctggcgtccgccccctcccactcgttgctctccggccagcagcttgagcctgatcgagtgcggcccagtgcacaccgccttcatggagaaggtgttgggcagcccagaggaggtgctggaccgcacggacatccacaccttccaccgcttctaccaatacctcgcccacagcaagcaagtctttcgcgaggcggcgcagaaccctgaggaggtggcggaggtgagcgccgggctggactccaggagtgggggcggtgcgtcctccggcgcgcagcggtggccacagctctcctcccgccgccgcaggtcttcctcaccgctttgcgcgccccgaagccgaccctgcgctacttcaccaccgagcgcttcctgcccctgctgcggatgcgcctggacgaccccagcggctccaactacgtcaccgccatgcaccgggaagtgttcggcgacgttccggcaaaggccgaggctggggccgaggctgggggcggggccgggcctggggcagaggacgaggccgggcgcggtgcggtgggggaccctgagctcggcgatcctccggccgccccgcagtaaaggcttcctcagccgctgtctcccgcgcccttctttgtcccctgggtctgtgtggtccctggggatggggcggcggtagcagctgtgggtggctaattaagatagatcgcgttagccagttttaccagcgcagctaggcgcgatgctgtcgcctgtaatgccagcgctttgggaggcggaggcaggaggatcgctcaagccccggagttggagaccagccagagcaacacagtgagacccccatctctacaaaaataaagaaaatttaaaaatcaa

SEQ ID NO: 446417 - DNA, 3188 bp, Homo sapiens
ctgggctccaacaatcccctttcctgggcctcccaaagtgctgggattagaggcatgagccaccgtgcccagcctcaaagcatattttaaaggatagaaataaacagccatatgaagagatacagacagggcggtctggaagggtccagagcaggagcttctatctccatagagttggggttacgtcaccctctgggcacattctgtcagcctccacacgttcagctctcagaagctcccgaaccctgtcctttgggccttttatggagaactccattggctgtccatgactgaagcatggacaactgtgataatgtgattgggcaaaaagggtctgatctaagcccagcaaggccagtccagattctttgggcctttgtgcagcattcctttctccagggtatggggcaaggacccactctggaatgaggatcctacaacccacaatcagattagagtcctgccttgggcagctgaaaagaggacaggagaaggtcagagagacgaaaggctgttttttgaggcctgaggcaccccaacatgacaacgtaagactgtaaccatggtcatgtgagttatgagctaggaaccctggacgaaaccaacacatatacaatcatctcccacctcccaacgcctttactttcacagcctctgcagcaaactgcggtcactataatcgctcctgtggcacagaggcatacccaggggaatctgcccagggggccactctgtgcccacgtgggaacccacacctgcttgtaaagcctcccctccctctgaccagcaaccaggacagtttgttgttccaagcagtgggctcatgtctgttttggctcagaacagggtggggagagcgggccagggacccgcaggaaggcttatccttgagattgcgtgggagacacaacaaggggtgggggcccgcaggcggggcggggcgaagcaggtgatatcaagcccagagccccagcctctccccacagtctcaccatggcccgcaccgtggtgctcatcaccggctgttcctcgggcatcggcctgcacttggccgtacgtctggcttcagatccatcccagagcttcaaagtgtatgccacgttgagggacctgaaaacacagggccggctgtgggaggcggcccgggccctggcatgccctccgggatccctggagacgttgcagctggacgtaagggactcaaaatccgtggccgctgcccgggaacgcgtgactgagggccgcgtggacgtgctgggtgagcctcctggaagcatatgggctcctaggagccttctccgccctgcgttgaaaccaacatgttcccaggcccagggagcacgaggggacaggccgtgctgagggtgatgctgaggcgggctggtcgggcctcttgtctccgcagtgttgtgtaacgcaggcctgggcctgctggggccgctggaggcgctgggggaggacgccgtggcctctgtgctggacgtgaatgtagtagggactgtgcggatgctgcaggccttcctgccagacatgaagaggcgcggttcgggacgcgtgttggtgaccgggagcgtgggaggattgatggtgggtgagtggtagggagtggcctcggcagctccagattctttgtgtgcggagctgagccttgaaggcaggttccgcggggggggtggagtggggtgccgtcagcttggaggggcaccgtctgcccggggatgaccccctggccgctgcgcctcaggaacctcgtctccccacctaagggctgcctttcaatgacgtttattgcgccagcaagttcgcgctcgaaggcttatgcgagagtctggcggttctgctgctgccctttggggtccagtgagtcaacacccccgttccccgaaccctcttaactctgacctagagacgccgagcaccctgtcctgcgggagccgctctggggcgatctccctggccctctctgcccggctcacattagctgtgtgccaggcacttgggctgggcgcatggcacgcattgtgccacctgctgacctagctgctgaagtgttggtattgttatggggaagctccagcccagagaggttaggtgactggcccaaggtcacacagcggccagggaccccgctagattcgaatcctgacaccagggctcccttgtagcctcagatggatttgggagggctgctccggcaggaacccgcgtttcaaatgttctggttatccccagcgccctttccgcctcacttccccagcgcagcggtgctgctcgcggtcgggggccgggacgtggttggggctgggactggggttggggctgggactggggcctggctggcgtccgccccctcccactcgttgctctccggccagcagcttgagcctgatcgagtgcggcccagtgcacaccgccttcatggagaaggtgttgggcagcccagaggaggtgctggaccgcacggacatccacaccttccaccgcttctaccaatacctcgcccacagcaagcaagtctttcgcgaggcggcgcagaaccctgaggaggtggcggaggtgagcgccgggctggactccaggagtgggggcggtgcgtcctccggcgcgcagcggtggccacagctctcctcccgccgccgcaggtcttcctcaccgctttgcgcgccccgaagccgaccctgcgctacttcaccaccgagcgcttcctgcccctgctgcggatgcgcctggacgaccccagcggctccaactacgtcaccgccatgcaccgggaagtgttcggcgacgttccggcaaaggccgaggctggggccgaggctgggggcggggccgggcctggggcagaggacgaggccgggcgcggtgcggtgggggaccctgagctcggcgatcctccggccgccccgcagtaaaggcttcctcagccgctgtctcccgcgcccttctttgtcccctgggtctgtgtggtccctggggatggggcggcggtagcagctgtgggtggctaattaagatagatcgcgttagccagttttaccagcgcagctaggcgcgatgctgtcgcctgtaatgccagcgctttgggaggcggaggcaggaggatcgctcaagccccggagttggagaccagccagagcaacacagtgagacccccatctctacaaaaataaagaaaatttaaaaatcaa

SEQ ID NO: 446418 - DNA, 2434 bp, Homo sapiens
ctgggctccaacaatcccctttcctgggcctcccaaagtgctgggattagaggcatgagccaccgtgcccagcctcaaagcatattttaaaggatagaaataaacagccatatgaagagatacagacagggcggtctggaagggtccagagcaggagcttctatctccatagagttggggttacgtcaccctctgggcacattctgtcagcctccacacgttcagctctcagaagctcccgaaccctgtcctttgggccttttatggagaactccattggctgtccatgactgaagcatggacaactgtgataatgtgattgggcaaaaagggtctgatctaagcccagcaaggccagtccagattctttgggcctttgtgcagcattcctttctccagggtatggggcaaggacccactctggaatgaggatcctacaacccacaatcagattagagtcctgccttgggcagctgaaaagaggacaggagaaggtcagagagacgaaaggctgttttttgaggcctgaggcaccccaacatgacaacgtaagactgtaaccatggtcatgtgagttatgagctaggaaccctggacgaaaccaacacatatacaatcatctcccacctcccaacgcctttactttcacagcctctgcagcaaactgcggtcactataatcgctcctgtggcacagaggcatacccaggggaatctgcccagggggccactctgtgcccacgtgggaacccacacctgcttgtaaagcctcccctccctctgaccagcaaccaggacagtttgttgttccaagcagtgggctcatgtctgttttggctcagaacagggtggggagagcgggccagggacccgcaggaaggcttatccttgagattgcgtgggagacacaacaaggggtgggggcccgcaggcggggcggggcgaagcaggtgatatcaagcccagagccccagcctctccccacagtctcaccatggcccgcaccgtggtgctcatcaccggctgttcctcgggcatcggcctgcacttggccgtacgtctggcttcagatccatcccagagcttcaaagtgtatgccacgttgagggacctgaaaacacagggccggctgtgggaggcggcccgggccctggcatgccctccgggatccctggagacgttgcagctggacgtaagggactcaaaatccgtggccgctgcccgggaacgcgtgactgagggccgcgtggacgtgctggtgtgtaacgcaggcctgggcctgctggggccgctggaggcgctgggggaggacgccgtggcctctgtgctggacgtgaatgtagtagggactgtgcggatgctgcaggccttcctgccagacatgaagaggcgcggttcgggacgcgtgttggtgaccgggagcgtgggaggattgatggtgggtgagtggtagggagtggcctcggcagctccagattctttgtgtgcggagctgagccttgaaggcaggttccgcggggggggtggagtggggtgccgtcagcttggaggggcaccgtctgcccggggatgaccccctggccgctgcgcctcaggaacctcgtctccccacctaagggctgcctttcaatgacgtttattgcgccagcaagttcgcgctcgaaggcttatgcgagagtctggcggttctgctgctgccctttggggtccacttgagcctgatcgagtgcggcccagtgcacaccgccttcatggagaaggtgttgggcagcccagaggaggtgctggaccgcacggacatccacaccttccaccgcttctaccaatacctcgcccacagcaagcaagtctttcgcgaggcggcgcagaaccctgaggaggtggcggaggtcttcctcaccgctttgcgcgccccgaagccgaccctgcgctacttcaccaccgagcgcttcctgcccctgctgcggatgcgcctggacgaccccagcggctccaactacgtcaccgccatgcaccgggaagtgttcggcgacgttccggcaaaggccgaggctggggccgaggctgggggcggggccgggcctggggcagaggacgaggccgggcgcggtgcggtgggggaccctgagctcggcgatcctccggccgccccgcagtaaaggcttcctcagccgctgtctcccgcgcccttctttgtcccctgggtctgtgtggtccctggggatggggcggcggtagcagctgtgggtggctaattaagatagatcgcgttagccagttttaccagcgcagctaggcgcgatgctgtcgcctgtaatgccagcgctttgggaggcggaggcaggaggatcgctcaagccccggagttggagaccagccagagcaacacagtgagacccccatctctacaaaaataaagaaaatttaaaaatcaa

SEQ ID NO: 446419 - DNA, 2005 bp, Homo sapiens
tgatccgcccgccctggcctctcagagtgctgggattacaggcatgacccaccccatccggccctctgagtctttcttatctgtaaaatgggtataataatacctatctaatcggctttagtaatggtggagataatgcctgaaagtgctagtatagaggtttaatagccagcaaggactgttattagaatgaatagtaatatgactactgtcacattttgcaaatgtgtaaagaagaaagagggctaagtgaatcaaagggagacagccccactcaccctgttctgccccagaggactgagcgatccccaccatctggcaagctgcctcaccaggaggtccagctggggctacaggactggctactttgctacaatggcccgtctttcctgagcccagtggaggtgggtgagtggtagggagtggcctcggcagctccagattctttgtgtgcggagctgagccttgaaggcaggttccgcggggggggtggagtggggtgccgtcagcttggaggggcaccgtctgcccggggatgaccccctggccgctgcgcctcaggaacctcgtctccccacctaagggctgcctttcaatgacgtttattgcgccagcaagttcgcgctcgaaggcttatgcgagagtctggcggttctgctgctgccctttggggtccagtgagtcaacacccccgttccccgaaccctcttaactctgacctagagacgccgagcaccctgtcctgcgggagccgctctggggcgatctccctggccctctctgcccggctcacattagctgtgtgccaggcacttgggctgggcgcatggcacgcattgtgccacctgctgacctagctgctgaagtgttggtattgttatggggaagctccagcccagagaggttaggtgactggcccaaggtcacacagcggccagggaccccgctagattcgaatcctgacaccagggctcccttgtagcctcagatggatttgggagggctgctccggcaggaacccgcgtttcaaatgttctggttatccccagcgccctttccgcctcacttccccagcgcagcggtgctgctcgcggtcgggggccgggacgtggttggggctgggactggggttggggctgggactggggcctggctggcgtccgccccctcccactcgttgctctccggccagcagcttgagcctgatcgagtgcggcccagtgcacaccgccttcatggagaaggtgttgggcagcccagaggaggtgctggaccgcacggacatccacaccttccaccgcttctaccaatacctcgcccacagcaagcaagtctttcgcgaggcggcgcagaaccctgaggaggtggcggaggtgagcgccgggctggactccaggagtgggggcggtgcgtcctccggcgcgcagcggtggccacagctctcctcccgccgccgcaggtcttcctcaccgctttgcgcgccccgaagccgaccctgcgctacttcaccaccgagcgcttcctgcccctgctgcggatgcgcctggacgaccccagcggctccaactacgtcaccgccatgcaccgggaagtgttcggcgacgttccggcaaaggccgaggctggggccgaggctgggggcggggccgggcctggggcagaggacgaggccgggcgcggtgcggtgggggaccctgagctcggcgatcctccggccgccccgcagtaaaggcttcctcagccgctgtctcccgcgcccttctttgtcccctgggtctgtgtggtccctggggatggggcggcggtagcagctgtgggtggctaattaagatagatcgcgttagccagttttaccagcgcagctaggcgcgatgctgtcgcctgtaatgccagcgctttgggaggcggaggcaggaggatcgctcaagccccggagttggagaccagccagagcaacacagtgagacccccatctctacaaaaataaagaaaatttaaaaatcaa

SEQ ID NO: 446420 - DNA, 2637 bp, Homo sapiens
ctgggctccaacaatcccctttcctgggcctcccaaagtgctgggattagaggcatgagccaccgtgcccagcctcaaagcatattttaaaggatagaaataaacagccatatgaagagatacagacagggcggtctggaagggtccagagcaggagcttctatctccatagagttggggttacgtcaccctctgggcacattctgtcagcctccacacgttcagctctcagaagctcccgaaccctgtcctttgggccttttatggagaactccattggctgtccatgactgaagcatggacaactgtgataatgtgattgggcaaaaagggtctgatctaagcccagcaaggccagtccagattctttgggcctttgtgcagcattcctttctccagggtatggggcaaggacccactctggaatgaggatcctacaacccacaatcagattagagtcctgccttgggcagctgaaaagaggacaggagaaggtcagagagacgaaaggctgttttttgaggcctgaggcaccccaacatgacaacgtaagactgtaaccatggtcatgtgagttatgagctaggaaccctggacgaaaccaacacatatacaatcatctcccacctcccaacgcctttactttcacagcctctgcagcaaactgcggtcactataatcgctcctgtggcacagaggcatacccaggggaatctgcccagggggccactctgtgcccacgtgggaacccacacctgcttgtaaagcctcccctccctctgaccagcaaccaggacagtttgttgttccaagcagtgggctcatgtctgttttggctcagaacagggtggggagagcgggccagggacccgcaggaaggcttatccttgagattgcgtgggagacacaacaaggggtgggggcccgcaggcggggcggggcgaagcaggtgatatcaagcccagagccccagcctctccccacagtctcaccatggcccgcaccgtggtgctcatcaccggctgttcctcgggcatcggcctgcacttggccgtacgtctggcttcagatccatcccagagcttcaaagtgtatgccacgttgagggacctgaaaacacagggccggctgtgggaggcggcccgggccctggcatgccctccgggatccctggagacgttgcagctggacgtaagggactcaaaatccgtggccgctgcccgggaacgcgtgactgagggccgcgtggacgtgctggtgtgtaacgcaggcctgggcctgctggggccgctggaggcgctgggggaggacgccgtggcctctgtgctggacgtgaatgtagtagggactgtgcggatgctgcaggccttcctgccagacatgaagaggcgcggttcgggacgcgtgttggtgaccgggagcgtgggaggattgatggtgggtgagtggtagggagtggcctcggcagctccagattctttgtgtgcggagctgagccttgaaggcaggttccgcggggggggtggagtggggtgccgtcagcttggaggggcaccgtctgcccggggatgaccccctggccgctgcgcctcaggaacctcgtctccccacctaagggctgcctttcaatgacgtttattgcgccagcaagttcgcgctcgaaggcttatgcgagagtctggcggttctgctgctgccctttggggtccagtgagtcaacacccccgttccccgaaccctcttaactctgacctagagacgccgagcaccctgtcctgcgggagccgctctggggcgatctccctggccctctctgcccggctcacattagctgtgtgccaggcacttgggctgggcgcatggcacgcattgtgccacctgctgacctagctgctgaagtgttggtattgttatggggaagctccagcccagagaggttaggtgactggcccaaggtcacacagcggccagggaccccgctagattcgaatcctgacaccagggctcccttgtagcctcagatggatttgggagggctgctccggcaggaacccgcgtttcaaatgttctggttatccccagcgccctttccgcctcacttccccagcgcagcggtgctgctcgcggtcgggggccgggacgtggttggggctgggactggggttggggctgggactggggcctggctggcgtccgccccctcccactcgttgctctccggccagcagcttgagcctgatcgagtgcggcccagtgcacaccgccttcatggagaaggtgttgggcagcccagaggaggtgctggaccgcacggacatccacaccttccaccgcttctaccaatacctcgccccgcagtaaaggcttcctcagccgctgtctcccgcgcccttctttgtcccctgggtctgtgtggtccctggggatggggcggcggtagcagctgtgggtggctaattaagatagatcgcgttagccagttttaccagcgcagctaggcgcgatgctgtcgcctgtaatgccagcgctttgggaggcggaggcaggaggatcgctcaagccccggagttggagaccagccagagcaacacagtgagacccccatctctacaaaaataaagaaaatttaaaaatcaa

SEQ ID NO: 446421 - DNA, 3127 bp, Homo sapiens
gtgacgaaacctggaccctgcctagtaaagaagggaggagagaaagaagagagagggggggcggggtcccagctctgtgctcgcgcccccagcgcgccagtcccggggctgcagggagcgcagcgcgcgcggcccgggccccggccaccggacgccctaccggacacgaccctccctggagcttggacaactgcccacctcggacgctgcaccggacactgccccccacagggctggacactccaacggacactacttcccagctccggacattgctccctcctctcccggggccctggacgcttttccccctcccccctccgggggcccagacactgagcccccctcagcgtctggctagcgtccccttgcaccccagcccaggacactgcctcctccctgtcctcttctcccttctgctcctcccacctcatctttcccctgctcgggtcggagccccgccagttcctccgaccccctactgctcggccgcggctgcccgcgcccccatccgcagctcctcgcccggatgcctctccccgggggactatggtggcttctctgctgccgtcgaggcttcactcttctgcaccgggactacggggacggcgagcttagcggggacggggacgaggacgaggacgaggaaacctttgagctgcggaccccgagtccagcgggcggcgggaggggtcccctggaagtgacgctgactcagccagtgaggagcgggcctgtctccaacaggctgcagagctgggaggagacttggagcctcatcccggagaaagggctgccggaggacgacccggacatcgttgtgaaaggttggctgtaccgggagccccgcggaggaggggcgcggccctggctgcccccgcgccgagcctggtttgtgctcacgcgggactccctggatcagttcagcagcagcgggaaaggggcgcggcgtctcgggagcctcgtgctcaccagcctgtgctcggtgaccggcccagagcgcaggcgtaaggagacaggtctgtggtcagtgactgtgtctggtcggaaacacagtgtccgcctctgctccccacgccaggcagaggctgagcgctggggggtggcattgcgggaagtgatcgcctccaaggcacccctggagacccccacccagctactgctcagggacatacaggaaagttgcggggacccagaggccgttgccctcatttacctgaggaacccgattctgagacacactagtggagccttgtatgccccactcctgcccctgccctatggagtcagcgccccaggtccgggctatgcacccctgcgcgaggaggcggtgcggctgttcttggcgctgcaggcgctggagggggcgcggcgccccgggcccttgatgcagggtgtgctccaaacctgccgggacttgcccgcgctccgggatgaactcttcctgcagctggctaagcagacctcgggccctgcaggtccccccgggctcccggctacccaagaccctgcggccctgcggtactggcaactcctcacctgcatgagctgcaccttccgacctgggggagctgtgcgggggcacctcctggggcacttggagaggaccgagcaggcactcccggactcggaactggcggaatatgcgcgcttcatccggaaagcgctgggccggacgcgcggcagagagctggtgccctcgctggcggagatttccgcgttgagccaacggcaggagctgctgtgtaccgtgcactgtccgggggctggtgcctgtgctgtggccatcgactcccacaccacggcgggggagggtggctcgagagctggtggggcggctgggcttggcccggagccgcaacgcattcgcgctgtacgagcagcgaggggcccaggagcgagccctggctggggggaccctcgtggccgacgtgctcaccaggtttgacttggccgcggaggaagctgggttggaggactcgcccgactccgggtggagactatgtctgcgtcttcacggacctctgcaccctgaggggctgtccccagacggtcacgaactgcctttcctctttgagcaggctcacgctctgctgctgcggggccggccgcccccacccgacgacacgctgcgcgccctggcggcgctgcgcctgcagagcctgcatcgggacttctctccgcgggtgcccctgccccgcctggaccgctgtcccgcgcgcggctcccgcccccggccccgccgcgcgaagacccgccccgcccgacccccaggccgcccccttccgctgccctgctggccggggcgctctggagcccgggcctggccaagaggcgggcggagcgggcccggcgcggcggggccggccgcactgcgggaagcattgcccgcgagggaggaggcggcgccggcacggcagctgccgtgctgggcggctggaagcggctacggggcatgggccgagctgaggccatggccgcctacctggccctggcggcgcagtgtccggggttcggcgctgctcggtatgacgttctggagctgagcacggagcctggtcggggtgctccacagaagctgtgcctgggcttgggagccaaggccatgtccctctcccggccaggggagacggagcccatccacagtgtcagctatggccatgtggccgcctgccagctaatgggcccccacaccctggccttgagggtgggagagagccagctcctcctgcagagcccccaggtggaagagatcatgcagctggtgaatgcctacttggccaacccctcccccgagaggccctgcagcagctcttctcctccatgccaagacctgccagacacctcccctcccagccagcgcccgggcctggacgagccccagggacagtctggctgcttggggcagctgcaggactgagcctgccaagaggtcacgacttccctcctgcctgcagcctgggccaggactgctctgagatttgagggaaacatggacccttttggccctgcagggacagggcacatcccacacccaagggctacaatgggtgtgggtaattttctagtttgtttcttaatttatttgtagaagagaagcaaaaaaaaaaaagtttcttatttacac

SEQ ID NO: 446422 - DNA, 1702 bp, Homo sapiens
gtgacgaaacctggaccctgcctagtaaagaagggaggagagaaagaagagagagggggggcggggtcccagctctgtgctcgcgcccccagcgcgccagtcccggggctgcagggagcgcagcgcgcgcggcccgggccccggccaccggacgccctaccggacacgaccctccctggagcttggacaactgcccacctcggacgctgcaccggacactgccccccacagggctggacactccaacggacactacttcccagctccggacattgctccctcctctcccggggccctggacgcttttccccctcccccctccgggggcccagacactgagcccccctcagcgtctggctagcgtccccttgcaccccagcccaggacactgcctcctccctgtcctcttctcccttctgctcctcccacctcatctttcccctgctcgggtcggagccccgccagttcctccgaccccctactgctcggccgcggctgcccgcgcccccatccgcagctcctcgcccggatgcctctccccgggggactatggtggcttctctgctgccgtcgaggcttcactcttctgcaccgggactacggggacggcgagcttagcggggacggggacgaggacgaggacgaggaaacctttgagctgcggaccccgagtccagcgggcggcgggaggggtcccctggaagtgacgctgactcagccagtgaggagcgggcctgtctccaacaggctgcagagctgggaggagacttggagcctcatcccggagaaagggctgccggaggacgacccggacatcgttgtgaaaggttggctgtaccgggagccccgcggaggaggggcgcggccctggctgcccccgcgccgagcctggtttgtgctcacgcgggactccctggatcagttcagcagcagcggggccggccgcactgcgggaagcattgcccgcgagggaggaggcggcgccggcacggcagctgccgtgctgggcggctggaagcggctacggggcatgggccgagctgaggccatggccgcctacctggccctggcggcgcagtgtccggggttcggcgctgctcggtatgacgttctggagctgagcacggagcctggtcggggtgctccacagaagctgtgcctgggcttgggagccaaggccatgtccctctcccggccaggggagacggagcccatccacagtgtcagctatggccatgtggccgcctgccagctaatgggcccccacaccctggccttgagggtgggagagagccagctcctcctgcagagcccccaggtggaagagatcatgcagctggtgaatgcctacttggccaacccctcccccgagaggccctgcagcagctcttctcctccatgccaagacctgccagacacctcccctcccagccagcgcccgggcctggacgagccccagggacagtctggctgcttggggcagctgcaggactgagcctgccaagaggtcacgacttccctcctgcctgcagcctgggccaggactgctctgagatttgagggaaacatggacccttttggccctgcagggacagggcacatcccacacccaagggctacaatgggtgtgggtaattttctagtttgtttcttaatttatttgtagaagagaagcaaaaaaaaaaaagtttcttatttacac

SEQ ID NO: 446423 - DNA, 3109 bp, Homo sapiens
  misc_feature (1815)..(1815): n is a, c, g, or t
  misc_feature (1826)..(1827): n is a, c, g, or t
  misc_feature (1829)..(1829): n is a, c, g, or t
  misc_feature (1835)..(1835): n is a, c, g, or t
  misc_feature (1838)..(1839): n is a, c, g, or t
  misc_feature (1849)..(1849): n is a, c, g, or t
  misc_feature (1854)..(1854): n is a, c, g, or t
  misc_feature (1884)..(1886): n is a, c, g, or t
  misc_feature (1909)..(1911): n is a, c, g, or t
  misc_feature (1921)..(1921): n is a, c, g, or t
  misc_feature (1926)..(1926): n is a, c, g, or t
  misc_feature (3061)..(3061): n is a, c, g, or t
  misc_feature (3073)..(3073): n is a, c, g, or t
gtgacgaaacctggaccctgcctagtaaagaagggaggagagaaagaagagagagggggggcggggtcccagctctgtgctcgcgcccccagcgcgccagtcccggggctgcagggagcgcagcgcgcgcggcccgggccccggccaccggacgccctaccggacacgaccctccctggagcttggacaactgcccacctcggacgctgcaccggacactgccccccacagggctggacactccaacggacactacttcccagctccggacattgctccctcctctcccggggccctggacgcttttccccctcccccctccgggggcccagacactgagcccccctcagcgtctggctagcgtccccttgcaccccagcccaggacactgcctcctccctgtcctcttctcccttctgctcctcccacctcatctttcccctgctcgggtcggagccccgccagttcctccgaccccctactgctcggccgcggctgcccgcgcccccatccgcagctcctcgcccggatgcctctccccgggggactatggtggcttctctgctgccgtcgaggcttcactcttctgcaccgggactacggggacggcgagcttagcggggacggggacgaggacgaggacgaggaaacctttgagctgcggaccccgagtccagcgggcggcgggaggggtcccctggaagtgacgctgactcagccagtgaggagcgggcctgtctccaacaggctgcagagctgggaggagacttggagcctcatcccggagaaagggctgccggaggacgacccggacatcgttgtgaaaggttggctgtaccgggagccccgcggaggaggggcgcggccctggctgcccccgcgccgagcctggtttgtgctcacgcgggactccctggatcagttcagcagcagcgggaaaggggcgcggcgtctcgggagcctcgtgctcaccagcctgtgctcggtgaccggcccagagcgcaggcgtaaggagacaggtctgtggtcagtgactgtgtctggtcggaaacacagtgtccgcctctgctccccacgccaggcagaggctgagcgctggggggtggcattgcgggaagtgatcgcctccaaggcacccctggagacccccacccagctactgctcagggacatacaggaaagttgcggggacccagaggccgttgccctcatttacctgaggaacccgattctgagacacactagtggagccttgtatgccccactcctgcccctgccctatggagtcagcgccccaggtccgggctatgcacccctgcgcgaggaggcggtgcggctgttcttggcgctgcaggcgctggagggggcgcggcgccccgggcccttgatgcagggtgtgctccaaacctgccgggacttgcccgcgctccgggatgaactcttcctgcagctggctaagcagacctcgggccctgcaggtccccccgggctcccggctacccaagaccctgcggccctgcggtactggcaactcctcacctgcatgagctgcaccttccgacctgggggagctgtgcgggggcacctcctggggcacttggagaggaccgagcaggcactcccggactcggaactggcggaatatgcgcgcttcatccggaaagcgctgggccggacgcgcggcagagagctggtgccctcgctggcggagatttccgcgttgagccaacggcaggagctgctgtgtaccgtgcactgtccgggggctggtgcctgtgctgtggccatcgactcccacaccacggcgggggaggnctctatatctnntntttctnctnntcttttcctnagccncaactcattctctctttactatcatctatnnncccaggatctagccctttcttgnnngacctctttnccgangtgctcaccagcttggccgcggaggaagctgggttggaggactcgcccgactccgggtggagactatgtctgcgtcttcacggacctctgcaccctgaggggctgtccccagacggtcacgaactgcctttcctctttgagcaggctcacgctctgctgctgcggggccggccgcccccacccgacgacacgctgcgcgccctggcggcgctgcgcctgcagagcctgcatcgggacttctctccgcgggtgcccctgccccgcctggaccgctgtcccgcgcgcggctcccgcccccggccccgccgcgcgaagacccgccccgcccgacccccaggccgcccccttccgctgccctgctggccggggcgctctggagcccgggcctggccaagaggcgggcggagcgggcccggcgcggcggggccggccgcactgcgggaagcattgcccgcgagggaggaggcggcgccggcacggcagctgccgtgctgggcggctggaagcggctacggggcatgggccgagctgaggccatggccgcctacctggccctggcggcgcagtgtccggggttcggcgctgctcggtatgacgttctggagctgagcacggagcctggtcggggtgctccacagaagctgtgcctgggcttgggagccaaggccatgtccctctcccggccaggggagacggagcccatccacagtgtcagctatggccatgtggccgcctgccagctaatgggcccccacaccctggccttgagggtgggagagagccagctcctcctgcagagcccccaggtggaagagatcatgcagctggtgaatgcctacttggccaacccctcccccgagaggccctgcagcagctcttctcctccatgccaagacctgccagacacctcccctcccagccagcgcccgggcctggacgagccccagggacagtctggctgcttggggcagctgcaggactgagcctgccaagaggtcacgacttccctcctgcctgcagcctgggccaggactgctctgagatttgagggaaacatggacccttttggccctgcagggacagggcacatcccacacccaagggctacaatgggtgtgggtaatttctctgcctntgtgattttgtnatttcaagaatgcttgataaatggaaacacacagta

SEQ ID NO: 446424 - DNA, 2397 bp, Homo sapiens
gtgacgaaacctggaccctgcctagtaaagaagggaggagagaaagaagagagagggggggcggggtcccagctctgtgctcgcgcccccagcgcgccagtcccggggctgcagggagcgcagcgcgcgcggcccgggccccggccaccggacgccctaccggacacgaccctccctggagcttggacaactgcccacctcggacgctgcaccggacactgccccccacagggctggacactccaacggacactacttcccagctccggacattgctccctcctctcccggggccctggacgcttttccccctcccccctccgggggcccagacactgagcccccctcagcgtctggctagcgtccccttgcaccccagcccaggacactgcctcctccctgtcctcttctcccttctgctcctcccacctcatctttcccctgctcgggtcggagccccgccagttcctccgaccccctactgctcggccgcggctgcccgcgcccccatccgcagctcctcgcccggatgcctctccccgggggactatggtggcttctctgctgccgtcgaggcttcactcttctgcaccgggactacggggacggcgagcttagcggggacggggacgaggacgaggacgaggaaacctttgagctgcggaccccgagtccagcgggcggcgggaggggtcccctggaagtgacgctgactcagccagtgaggagcgggcctgtctccaacaggctgcagagctgggaggagacttggagcctcatcccggagaaagggctgccggaggacgacccggacatcgttgtgaaaggttggctgtaccgggagccccgcggaggaggggcgcggccctggctgcccccgcgccgagcctggtttgtgctcacgcgggactccctggatcagttcagcagcagcgggaaaggggcgcggcgtctcgggagcctcgtgctcaccagcctgtgctcggtgaccggcccagagcgcaggcgtaaggagacaggtctgtggtcagtgactgtgtctggtcggaaacacagtgtccgcctctgctccccacgccaggcagaggctgagcgctggggggtggcattgcgggaagtgatcgcctccaaggcacccctggagacccccacccagctactgctcagggacatacaggaaagttgcggggacccagaggccgttgccctcatttacctgaggaacccgattctgagacacactagtggagccttgtatgccccactcctgcccctgccctatggagtcagcgccccaggtccgggctatgcacccctgcgcgaggaggcggtgcggctgttcttggcgctgcaggcgctggagggggcgcggcgccccgggcccttgatgcagggtgtgctccaaacctgccgggacttgcccgcgctccgggatgaactcttcctgcagctggctaagcagacctcgggccctgcaggtccccccgggctcccggctacccaagaccctgcggccctgcggtactggcaactcctcacctgcatgagctgcaccttccgacctgggggagctgtgcgggggcacctcctggggcacttggagaggaccgagcaggcactcccggactcggaactggcggaatatgcgcgcttcatccggaaagcgctgggccggacgcgcggcagagagctggtgccctcgctggcggagatttccgcgttgagccaacggcaggagctgctgtgtaccgtgcactgtccgggggctggtgcctgtgctgtggccatcgactcccacaccacggcgggggagggtggctcgagagctggtggggcggctgggcttggcccggagccgcaacgcattcgcgctgtacgagcagcgaggggcccaggagcgagccctggctggggggaccctcgtggccgacgtgctcaccaggtttgacttggccgcggaggaagctgggttggaggactcgcccgactccgggtggagactatgtctgcgtcttcacggacctctgcaccctgaggggctgtccccagacggtcacgaactgcctttcctctttgagcagctcttctcctccatgccaagacctgccagacacctcccctcccagccagcgcccgggcctggacgagccccagggacagtctggctgcttggggcagctgcaggactgagcctgccaagaggtcacgacttccctcctgcctgcagcctgggccaggactgctctgagatttgagggaaacatggacccttttggccctgcagggacagggcacatcccacacccaagggctacaatgggtgtgggtaattttctagtttgtttcttaatttatttgtagaagagaagcaaaaaaaaaaaagtttcttatttacac

SEQ ID NO: 446425 - DNA, 3039 bp, Homo sapiens
  misc_feature (1815)..(1815): n is a, c, g, or t
  misc_feature (1826)..(1827): n is a, c, g, or t
  misc_feature (1829)..(1829): n is a, c, g, or t
  misc_feature (1835)..(1835): n is a, c, g, or t
  misc_feature (1838)..(1839): n is a, c, g, or t
  misc_feature (1849)..(1849): n is a, c, g, or t
  misc_feature (1854)..(1854): n is a, c, g, or t
  misc_feature (1884)..(1886): n is a, c, g, or t
  misc_feature (1909)..(1911): n is a, c, g, or t
  misc_feature (1921)..(1921): n is a, c, g, or t
  misc_feature (1926)..(1926): n is a, c, g, or t
gtgacgaaacctggaccctgcctagtaaagaagggaggagagaaagaagagagagggggggcggggtcccagctctgtgctcgcgcccccagcgcgccagtcccggggctgcagggagcgcagcgcgcgcggcccgggccccggccaccggacgccctaccggacacgaccctccctggagcttggacaactgcccacctcggacgctgcaccggacactgccccccacagggctggacactccaacggacactacttcccagctccggacattgctccctcctctcccggggccctggacgcttttccccctcccccctccgggggcccagacactgagcccccctcagcgtctggctagcgtccccttgcaccccagcccaggacactgcctcctccctgtcctcttctcccttctgctcctcccacctcatctttcccctgctcgggtcggagccccgccagttcctccgaccccctactgctcggccgcggctgcccgcgcccccatccgcagctcctcgcccggatgcctctccccgggggactatggtggcttctctgctgccgtcgaggcttcactcttctgcaccgggactacggggacggcgagcttagcggggacggggacgaggacgaggacgaggaaacctttgagctgcggaccccgagtccagcgggcggcgggaggggtcccctggaagtgacgctgactcagccagtgaggagcgggcctgtctccaacaggctgcagagctgggaggagacttggagcctcatcccggagaaagggctgccggaggacgacccggacatcgttgtgaaaggttggctgtaccgggagccccgcggaggaggggcgcggccctggctgcccccgcgccgagcctggtttgtgctcacgcgggactccctggatcagttcagcagcagcgggaaaggggcgcggcgtctcgggagcctcgtgctcaccagcctgtgctcggtgaccggcccagagcgcaggcgtaaggagacaggtctgtggtcagtgactgtgtctggtcggaaacacagtgtccgcctctgctccccacgccaggcagaggctgagcgctggggggtggcattgcgggaagtgatcgcctccaaggcacccctggagacccccacccagctactgctcagggacatacaggaaagttgcggggacccagaggccgttgccctcatttacctgaggaacccgattctgagacacactagtggagccttgtatgccccactcctgcccctgccctatggagtcagcgccccaggtccgggctatgcacccctgcgcgaggaggcggtgcggctgttcttggcgctgcaggcgctggagggggcgcggcgccccgggcccttgatgcagggtgtgctccaaacctgccgggacttgcccgcgctccgggatgaactcttcctgcagctggctaagcagacctcgggccctgcaggtccccccgggctcccggctacccaagaccctgcggccctgcggtactggcaactcctcacctgcatgagctgcaccttccgacctgggggagctgtgcgggggcacctcctggggcacttggagaggaccgagcaggcactcccggactcggaactggcggaatatgcgcgcttcatccggaaagcgctgggccggacgcgcggcagagagctggtgccctcgctggcggagatttccgcgttgagccaacggcaggagctgctgtgtaccgtgcactgtccgggggctggtgcctgtgctgtggccatcgactcccacaccacggcgggggaggnctctatatctnntntttctnctnntcttttcctnagccncaactcattctctctttactatcatctatnnncccaggatctagccctttcttgnnngacctctttnccgangtgctcaccagcttggccgcggaggaagctgggttggaggactcgcccgactccgggtggagactatgtctgcgtcttcacggacctctgcaccctgaggggctgtccccagacggtcacgaactgcctttcctctttgagcaggctcacgctctgctgctgcggggccggccgcccccacccgacgacacgctgcgcgccctggcggcgctgcgcctgcagagcctgcatcgggacttctctccgcgggtgcccctgccccgcctggaccgctgtcccgcgcgcggctcccgcccccggccccgccgcgcgaagacccgccccgcccgacccccaggccgcccccttccgctgccctgctggccggggcgctctggagcccgggcctggccaagaggcgggcggagcgggcccggcgcggcggggccggccgcactgcgggaagcattgcccgcgagggaggaggcggcgccggcacggcagctgccgtgctgggcggctggaagcggctacggggcatgggccgagctgaggccatggccgcctacctggccctggcggcgcagtgtccggggttcggcgctgctcggtatgacgttctggagctgagcacggagcctggtcggggtgctccacagaagctgtgcctgggcttgggagccaaggccatgtccctctcccggccaggggagacggagcccatccacagtgtcagctatggccatgtggccgcctgccagctaatgggcccccacaccctggccttgagggtgggagagagccagctcctcctgcagagcccccaggtggaagagatcatgcagctggtgaatgcctacttggccaacccctcccccgagaggccctgcagcagctcttctcctccatgccaagacctgccagacacctcccctcccagccagcgcccgggcctggacgagccccagggacagtctggctgcttggggcagctgcaggactgagcctgccaagaggtcacgacttccctcctgcctgcagcctgggccaggactgctctgagatttgaggggaaaagaccctggtgtgatccttcgtaaagctcgaactgcagtgcatgcaatgcttgtgcac

SEQ ID NO: 446426 - DNA, 2256 bp, Homo sapiens
ctgggctccaacaatcccctttcctgggcctcccaaagtgctgggattagaggcatgagccaccgtgcccagcctcaaagcatattttaaaggatagaaataaacagccatatgaagagatacagacagggcggtctggaagggtccagagcaggagcttctatctccatagagttggggttacgtcaccctctgggcacattctgtcagcctccacacgttcagctctcagaagctcccgaaccctgtcctttgggccttttatggagaactccattggctgtccatgactgaagcatggacaactgtgataatgtgattgggcaaaaagggtctgatctaagcccagcaaggccagtccagattctttgggcctttgtgcagcattcctttctccagggtatggggcaaggacccactctggaatgaggatcctacaacccacaatcagattagagtcctgccttgggcagctgaaaagaggacaggagaaggtcagagagacgaaaggctgttttttgaggcctgaggcaccccaacatgacaacgtaagactgtaaccatggtcatgtgagttatgagctaggaaccctggacgaaaccaacacatatacaatcatctcccacctcccaacgcctttactttcacagcctctgcagcaaactgcggtcactataatcgctcctgtggcacagaggcatacccaggggaatctgcccagggggccactctgtgcccacgtgggaacccacacctgcttgtaaagcctcccctccctctgaccagcaaccaggacagtttgttgttccaagcagtgggctcatgtctgttttggctcagaacagggtggggagagcgggccagggacccgcaggaaggcttatccttgagattgcgtgggagacacaacaaggggtgggggcccgcaggcggggcggggcgaagcaggtgatatcaagcccagagccccagcctctccccacagtctcaccatggcccgcaccgtggtgctcatcaccggctgttcctcgggcatcggcctgcacttggccgtacgtctggcttcagatccatcccagagcttcaaagtgtatgccacgttgagggacctgaaaacacagggccggctgtgggaggcggcccgggccctggcatgccctccgggatccctggagacgttgcagctggacgtaagggactcaaaatccgtggccgctgcccgggaacgcgtgactgagggccgcgtggacgtgctggtgtgtaacgcaggcctgggcctgctggggccgctggaggcgctgggggaggacgccgtggcctctgtgctggacgtgaatgtagtagggactgtgcggatgctgcaggccttcctgccagacatgaagaggcgcggttcgggacgcgtgttggtgaccgggagcgtgggaggattgatggggctgcctttcaatgacgtttattgcgccagcaagttcgcgctcgaaggcttatgcgagagtctggcggttctgctgctgccctttggggtccacttgagcctgatcgagtgcggcccagtgcacaccgccttcatggagaaggtgttgggcagcccagaggaggtgctggaccgcacggacatccacaccttccaccgcttctaccaatacctcgcccacagcaagcaagtctttcgcgaggcggcgcagaaccctgaggaggtggcggaggtcttcctcaccgctttgcgcgccccgaagccgaccctgcgctacttcaccaccgagcgcttcctgcccctgctgcggatgcgcctggacgaccccagcggctccaactacgtcaccgccatgcaccgggaagtgttcggcgacgttccggcaaaggccgaggctggggccgaggctgggggcggggccgggcctggggcagaggacgaggccgggcgcggtgcggtgggggaccctgagctcggcgatcctccggccgccccgcagtaaaggcttcctcagccgctgtctcccgcgcccttctttgtcccctgggtctgtgtggtccctggggatggggcggcggtagcagctgtgggtggctaattaagatagatcgcgttagccagttttaccagcgcagctaggcgcgatgctgtcgcctgtaatgccagcgctttgggaggcggaggcaggaggatcgctcaagccccggagttggagaccagccagagcaacacagtgagacccccatctctacaaaaataaagaaaatttaaaaatcaa

SEQ ID NO: 446427 - DNA, 430 bp, Homo sapiens
gaccgccagtggttggagggatgtctctagtagttgaatttgagtggcctggtaagcgcgcggcccgaggctgagcagcatgaccggcggcgggacgtgtgtgcgtggccgtcctcccgcttcccgggagaggggacgccacgtccacagagcaggcttggccagggcagtggtaggacagggctgtggaggcccacgtgtggacggcgccagccagaagcaggcctgccaagaggtcacgacttccctcctgcctgcagcctgggccaggactgctctgagatttgagggaaacatggacccttttggccctgcagggacagggcacatcccacacccaagggctacaatgggtgtgggtaattttctagtttgtttcttaatttatttgtagaagagaagcaaaaaaaaaaaagtttcttatttacac

SEQ ID NO: 446428 - DNA, 3281 bp, Homo sapiens
ctgggctccaacaatcccctttcctgggcctcccaaagtgctgggattagaggcatgagccaccgtgcccagcctcaaagcatattttaaaggatagaaataaacagccatatgaagagatacagacagggcggtctggaagggtccagagcaggagcttctatctccatagagttggggttacgtcaccctctgggcacattctgtcagcctccacacgttcagctctcagaagctcccgaaccctgtcctttgggccttttatggagaactccattggctgtccatgactgaagcatggacaactgtgataatgtgattgggcaaaaagggtctgatctaagcccagcaaggccagtccagattctttgggcctttgtgcagcattcctttctccagggtatggggcaaggacccactctggaatgaggatcctacaacccacaatcagattagagtcctgccttgggcagctgaaaagaggacaggagaaggtcagagagacgaaaggctgttttttgaggcctgaggcaccccaacatgacaacgtaagactgtaaccatggtcatgtgagttatgagctaggaaccctggacgaaaccaacacatatacaatcatctcccacctcccaacgcctttactttcacagcctctgcagcaaactgcggtcactataatcgctcctgtggcacagaggcatacccaggggaatctgcccagggggccactctgtgcccacgtgggaacccacacctgcttgtaaagcctcccctccctctgaccagcaaccaggacagtttgttgttccaagcagtgggctcatgtctgttttggctcagaacagggtggggagagcgggccagggacccgcaggaaggcttatccttgagattgcgtgggagacacaacaaggggtgggggcccgcaggcggggcggggcgaagcaggtgatatcaagcccagagccccagcctctccccacagtctcaccatggcccgcaccgtggtgctcatcaccggctgttcctcgggcatcggcctgcacttggccgtacgtctggcttcagatccatcccagagcttcaaaggtatagataggcagggacagggagggagagaagggaggagcccttggaggccagaagggaagtcagatcttcctcctctcccaaaacctccagtgtatgccacgttgagggacctgaaaacacagggccggctgtgggaggcggcccgggccctggcatgccctccgggatccctggagacgttgcagctggacgtaagggactcaaaatccgtggccgctgcccgggaacgcgtgactgagggccgcgtggacgtgctgggtgagcctcctggaagcatatgggctcctaggagccttctccgccctgcgttgaaaccaacatgttcccaggcccagggagcacgaggggacaggccgtgctgagggtgatgctgaggcgggctggtcgggcctcttgtctccgcagtgttgtgtaacgcaggcctgggcctgctggggccgctggaggcgctgggggaggacgccgtggcctctgtgctggacgtgaatgtagtagggactgtgcggatgctgcaggccttcctgccagacatgaagaggcgcggttcgggacgcgtgttggtgaccgggagcgtgggaggattgatggtgggtgagtggtagggagtggcctcggcagctccagattctttgtgtgcggagctgagccttgaaggcaggttccgcggggggggtggagtggggtgccgtcagcttggaggggcaccgtctgcccggggatgaccccctggccgctgcgcctcaggaacctcgtctccccacctaagggctgcctttcaatgacgtttattgcgccagcaagttcgcgctcgaaggcttatgcgagagtctggcggttctgctgctgccctttggggtccagtgagtcaacacccccgttccccgaaccctcttaactctgacctagagacgccgagcaccctgtcctgcgggagccgctctggggcgatctccctggccctctctgcccggctcacattagctgtgtgccaggcacttgggctgggcgcatggcacgcattgtgccacctgctgacctagctgctgaagtgttggtattgttatggggaagctccagcccagagaggttaggtgactggcccaaggtcacacagcggccagggaccccgctagattcgaatcctgacaccagggctcccttgtagcctcagatggatttgggagggctgctccggcaggaacccgcgtttcaaatgttctggttatccccagcgccctttccgcctcacttccccagcgcagcggtgctgctcgcggtcgggggccgggacgtggttggggctgggactggggttggggctgggactggggcctggctggcgtccgccccctcccactcgttgctctccggccagcagcttgagcctgatcgagtgcggcccagtgcacaccgccttcatggagaaggtgttgggcagcccagaggaggtgctggaccgcacggacatccacaccttccaccgcttctaccaatacctcgcccacagcaagcaagtctttcgcgaggcggcgcagaaccctgaggaggtggcggaggtgagcgccgggctggactccaggagtgggggcggtgcgtcctccggcgcgcagcggtggccacagctctcctcccgccgccgcaggtcttcctcaccgctttgcgcgccccgaagccgaccctgcgctacttcaccaccgagcgcttcctgcccctgctgcggatgcgcctggacgaccccagcggctccaactacgtcaccgccatgcaccgggaagtgttcggcgacgttccggcaaaggccgaggctggggccgaggctgggggcggggccgggcctggggcagaggacgaggccgggcgcggtgcggtgggggaccctgagctcggcgatcctccggccgccccgcagtaaaggcttcctcagccgctgtctcccgcgcccttctttgtcccctgggtctgtgtggtccctggggatggggcggcggtagcagctgtgggtggctaattaagatagatcgcgttagccagttttaccagcgcagctaggcgcgatgctgtcgcctgtaatgccagcgctttgggaggcggaggcaggaggatcgctcaagccccggagttggagaccagccagagcaacacagtgagacccccatctctacaaaaataaagaaaatttaaaaatcaa

SEQ ID NO: 446429 - DNA, 3131 bp, Homo sapiens
ctgggctccaacaatcccctttcctgggcctcccaaagtgctgggattagaggcatgagccaccgtgcccagcctcaaagcatattttaaaggatagaaataaacagccatatgaagagatacagacagggcggtctggaagggtccagagcaggagcttctatctccatagagttggggttacgtcaccctctgggcacattctgtcagcctccacacgttcagctctcagaagctcccgaaccctgtcctttgggccttttatggagaactccattggctgtccatgactgaagcatggacaactgtgataatgtgattgggcaaaaagggtctgatctaagcccagcaaggccagtccagattctttgggcctttgtgcagcattcctttctccagggtatggggcaaggacccactctggaatgaggatcctacaacccacaatcagattagagtcctgccttgggcagctgaaaagaggacaggagaaggtcagagagacgaaaggctgttttttgaggcctgaggcaccccaacatgacaacgtaagactgtaaccatggtcatgtgagttatgagctaggaaccctggacgaaaccaacacatatacaatcatctcccacctcccaacgcctttactttcacagcctctgcagcaaactgcggtcactataatcgctcctgtggcacagaggcatacccaggggaatctgcccagggggccactctgtgcccacgtgggaacccacacctgcttgtaaagcctcccctccctctgaccagcaaccaggacagtttgttgttccaagcagtgggctcatgtctgttttggctcagaacagggtggggagagcgggccagggacccgcaggaaggcttatccttgagattgcgtgggagacacaacaaggggtgggggcccgcaggcggggcggggcgaagcaggtgatatcaagcccagagccccagcctctccccacagtctcaccatggcccgcaccgtggtgctcatcaccggctgttcctcgggcatcggcctgcacttggccgtacgtctggcttcagatccatcccagagcttcaaaggtatagataggcagggacagggagggagagaagggaggagcccttggaggccagaagggaagtcagatcttcctcctctcccaaaacctccagtgtatgccacgttgagggacctgaaaacacagggccggctgtgggaggcggcccgggccctggcatgccctccgggatccctggagacgttgcagctggacgtaagggactcaaaatccgtggccgctgcccgggaacgcgtgactgagggccgcgtggacgtgctggtgtgtaacgcaggcctgggcctgctggggccgctggaggcgctgggggaggacgccgtggcctctgtgctggacgtgaatgtagtagggactgtgcggatgctgcaggccttcctgccagacatgaagaggcgcggttcgggacgcgtgttggtgaccgggagcgtgggaggattgatggtgggtgagtggtagggagtggcctcggcagctccagattctttgtgtgcggagctgagccttgaaggcaggttccgcggggggggtggagtggggtgccgtcagcttggaggggcaccgtctgcccggggatgaccccctggccgctgcgcctcaggaacctcgtctccccacctaagggctgcctttcaatgacgtttattgcgccagcaagttcgcgctcgaaggcttatgcgagagtctggcggttctgctgctgccctttggggtccagtgagtcaacacccccgttccccgaaccctcttaactctgacctagagacgccgagcaccctgtcctgcgggagccgctctggggcgatctccctggccctctctgcccggctcacattagctgtgtgccaggcacttgggctgggcgcatggcacgcattgtgccacctgctgacctagctgctgaagtgttggtattgttatggggaagctccagcccagagaggttaggtgactggcccaaggtcacacagcggccagggaccccgctagattcgaatcctgacaccagggctcccttgtagcctcagatggatttgggagggctgctccggcaggaacccgcgtttcaaatgttctggttatccccagcgccctttccgcctcacttccccagcgcagcggtgctgctcgcggtcgggggccgggacgtggttggggctgggactggggttggggctgggactggggcctggctggcgtccgccccctcccactcgttgctctccggccagcagcttgagcctgatcgagtgcggcccagtgcacaccgccttcatggagaaggtgttgggcagcccagaggaggtgctggaccgcacggacatccacaccttccaccgcttctaccaatacctcgcccacagcaagcaagtctttcgcgaggcggcgcagaaccctgaggaggtggcggaggtgagcgccgggctggactccaggagtgggggcggtgcgtcctccggcgcgcagcggtggccacagctctcctcccgccgccgcaggtcttcctcaccgctttgcgcgccccgaagccgaccctgcgctacttcaccaccgagcgcttcctgcccctgctgcggatgcgcctggacgaccccagcggctccaactacgtcaccgccatgcaccgggaagtgttcggcgacgttccggcaaaggccgaggctggggccgaggctgggggcggggccgggcctggggcagaggacgaggccgggcgcggtgcggtgggggaccctgagctcggcgatcctccggccgccccgcagtaaaggcttcctcagccgctgtctcccgcgcccttctttgtcccctgggtctgtgtggtccctggggatggggcggcggtagcagctgtgggtggctaattaagatagatcgcgttagccagttttaccagcgcagctaggcgcgatgctgtcgcctgtaatgccagcgctttgggaggcggaggcaggaggatcgctcaagccccggagttggagaccagccagagcaacacagtgagacccccatctctacaaaaataaagaaaatttaaaaatcaa

SEQ ID NO: 446430 - DNA, 2263 bp, Homo sapiens
gtgacgaaacctggaccctgcctagtaaagaagggaggagagaaagaagagagagggggggcggggtcccagctctgtgctcgcgcccccagcgcgccagtcccggggctgcagggagcgcagcgcgcgcggcccgggccccggccaccggacgccctaccggacacgaccctccctggagcttggacaactgcccacctcggacgctgcaccggacactgccccccacagggctggacactccaacggacactacttcccagctccggacattgctccctcctctcccggggccctggacgcttttccccctcccccctccgggggcccagacactgagcccccctcagcgtctggctagcgtccccttgcaccccagcccaggacactgcctcctccctgtcctcttctcccttctgctcctcccacctcatctttcccctgctcgggtcggagccccgccagttcctccgaccccctactgctcggccgcggctgcccgcgcccccatccgcagctcctcgcccggatgcctctccccgggggactatggtggcttctctgctgccgtcgaggcttcactcttctgcaccgggactacggggacggcgagcttagcggggacggggacgaggacgaggacgaggaaacctttgagctgcggaccccgagtccagcgggcggcgggaggggtcccctggaagtgacgctgactcagccagtgaggagcgggcctgtctccaacaggctgcagagctgggaggagacttggagcctcatcccggagaaagggctgccggaggacgacccggacatcgttgtgaaaggttggctgtaccgggagccccgcggaggaggggcgcggccctggctgcccccgcgccgagcctggtttgtgctcacgcgggactccctggatcagttcagcagcagcgggaaaggggcgcggcgtctcgggagcctcgtgctcaccagcctgtgctcggtgaccggcccagagcgcaggcgtaaggagacaggtctgtggtcagtgactgtgtctggtcggaaacacagtgtccgcctctgctccccacgccaggcagaggctgagcgctggggggtggcattgcgggaagtgatcgcctccaaggcacccctggagacccccacccagctactgctcagggacatacaggaaagttgcggggacccagaggccgttgccctcatttacctgaggaacccgattctgagacacactagtggagccttgtatgccccactcctgcccctgccctatggagtcagcgccccaggtccgggctatgcacccctgcgcgaggaggcggtgcggctgttcttggcgctgcaggcgctggagggggcgcggcgccccgggcccttgatgcagggtgtgctccaaacctgccgggacttgcccgcgctccgggatgaactcttcctgcagctggctaagcagacctcgggccctgcaggtccccccgggctcccggctacccaagaccctgcggccctgcggtactggcaactcctcacctgcatgagctgcaccttccgacctgggggagctgtgcgggggcacctcctggggcacttggagaggaccgagcaggcactcccggactcggaactggcggaatatgcgcgcttcatccggaaagcgctgggccggacgcgcggcagagagctggtgccctcgctggcggagatttccgcgttgagccaacggcaggagctgctgtgtaccgtgcactgtccgggggctggtgcctgtgctgtggccatcgactcccacaccacggcgggggagggtggctcgagagctggtggggcggctgggcttggcccggagccgcaacgcattcgcgctgtacgagcagcgaggggcccaggagcgagccctggctggggggaccctcgtggccgacgtgctcaccaggtttgacttggccgcggaggaagctgggttggaggactcgcccgactccgggtggagactatgtctgcgtcttcacggacctctgcaccctgaggggctgtccccagacggtcagcctgccaagaggtcacgacttccctcctgcctgcagcctgggccaggactgctctgagatttgagggaaacatggacccttttggccctgcagggacagggcacatcccacacccaagggctacaatgggtgtgggtaattttctagtttgtttcttaatttatttgtagaagagaagcaaaaaaaaaaaagtttcttatttacac

SEQ ID NO: 446431 - DNA, 3116 bp, Homo sapiens
  misc_feature (1815)..(1815): n is a, c, g, or t
  misc_feature (1826)..(1827): n is a, c, g, or t
  misc_feature (1829)..(1829): n is a, c, g, or t
  misc_feature (1835)..(1835): n is a, c, g, or t
  misc_feature (1838)..(1839): n is a, c, g, or t
  misc_feature (1849)..(1849): n is a, c, g, or t
  misc_feature (1854)..(1854): n is a, c, g, or t
  misc_feature (1884)..(1886): n is a, c, g, or t
  misc_feature (1909)..(1911): n is a, c, g, or t
  misc_feature (1921)..(1921): n is a, c, g, or t
  misc_feature (1926)..(1926): n is a, c, g, or t
gtgacgaaacctggaccctgcctagtaaagaagggaggagagaaagaagagagagggggggcggggtcccagctctgtgctcgcgcccccagcgcgccagtcccggggctgcagggagcgcagcgcgcgcggcccgggccccggccaccggacgccctaccggacacgaccctccctggagcttggacaactgcccacctcggacgctgcaccggacactgccccccacagggctggacactccaacggacactacttcccagctccggacattgctccctcctctcccggggccctggacgcttttccccctcccccctccgggggcccagacactgagcccccctcagcgtctggctagcgtccccttgcaccccagcccaggacactgcctcctccctgtcctcttctcccttctgctcctcccacctcatctttcccctgctcgggtcggagccccgccagttcctccgaccccctactgctcggccgcggctgcccgcgcccccatccgcagctcctcgcccggatgcctctccccgggggactatggtggcttctctgctgccgtcgaggcttcactcttctgcaccgggactacggggacggcgagcttagcggggacggggacgaggacgaggacgaggaaacctttgagctgcggaccccgagtccagcgggcggcgggaggggtcccctggaagtgacgctgactcagccagtgaggagcgggcctgtctccaacaggctgcagagctgggaggagacttggagcctcatcccggagaaagggctgccggaggacgacccggacatcgttgtgaaaggttggctgtaccgggagccccgcggaggaggggcgcggccctggctgcccccgcgccgagcctggtttgtgctcacgcgggactccctggatcagttcagcagcagcgggaaaggggcgcggcgtctcgggagcctcgtgctcaccagcctgtgctcggtgaccggcccagagcgcaggcgtaaggagacaggtctgtggtcagtgactgtgtctggtcggaaacacagtgtccgcctctgctccccacgccaggcagaggctgagcgctggggggtggcattgcgggaagtgatcgcctccaaggcacccctggagacccccacccagctactgctcagggacatacaggaaagttgcggggacccagaggccgttgccctcatttacctgaggaacccgattctgagacacactagtggagccttgtatgccccactcctgcccctgccctatggagtcagcgccccaggtccgggctatgcacccctgcgcgaggaggcggtgcggctgttcttggcgctgcaggcgctggagggggcgcggcgccccgggcccttgatgcagggtgtgctccaaacctgccgggacttgcccgcgctccgggatgaactcttcctgcagctggctaagcagacctcgggccctgcaggtccccccgggctcccggctacccaagaccctgcggccctgcggtactggcaactcctcacctgcatgagctgcaccttccgacctgggggagctgtgcgggggcacctcctggggcacttggagaggaccgagcaggcactcccggactcggaactggcggaatatgcgcgcttcatccggaaagcgctgggccggacgcgcggcagagagctggtgccctcgctggcggagatttccgcgttgagccaacggcaggagctgctgtgtaccgtgcactgtccgggggctggtgcctgtgctgtggccatcgactcccacaccacggcgggggaggnctctatatctnntntttctnctnntcttttcctnagccncaactcattctctctttactatcatctatnnncccaggatctagccctttcttgnnngacctctttnccgangtgctcaccagcttggccgcggaggaagctgggttggaggactcgcccgactccgggtggagactatgtctgcgtcttcacggacctctgcaccctgaggggctgtccccagacggtcacgaactgcctttcctctttgagcaggctcacgctctgctgctgcggggccggccgcccccacccgacgacacgctgcgcgccctggcggcgctgcgcctgcagagcctgcatcgggacttctctccgcgggtgcccctgccccgcctggaccgctgtcccgcgcgcggctcccgcccccggccccgccgcgcgaagacccgccccgcccgacccccaggccgcccccttccgctgccctgctggccggggcgctctggagcccgggcctggccaagaggcgggcggagcgggcccggcgcggcggggccggccgcactgcgggaagcattgcccgcgagggaggaggcggcgccggcacggcagctgccgtgctgggcggctggaagcggctacggggcatgggccgagctgaggccatggccgcctacctggccctggcggcgcagtgtccggggttcggcgctgctcggtatgacgttctggagctgagcacggagcctggtcggggtgctccacagaagctgtgcctgggcttgggagccaaggccatgtccctctcccggccaggggagacggagcccatccacagtgtcagctatggccatgtggccgcctgccagctaatgggcccccacaccctggccttgagggtgggagagagccagctcctcctgcagagcccccaggtggaagagatcatgcagctggtgaatgcctacttggccaacccctcccccgagaggccctgcagcagctcttctcctccatgccaagacctgccagacacctcccctcccagccagcgcccgggcctggacgagccccagggacagtctggctgcttggggcagctgcaggactgagcctgccaagaggtcacgacttccctcctgcctgcagcctgggccaggactgctctgagatttgagggaaacatggacccttttggccctgcagggacagggcacatcccacacccaagggctacaatgggtgtgggtaattttctagtttgtttcttaatttatttgtagaagagaagcaaaaaaaaaaaagtttcttatttacac

SEQ ID NO: 446432 - DNA, 2163 bp, Homo sapiens
ctgggctccaacaatcccctttcctgggcctcccaaagtgctgggattagaggcatgagccaccgtgcccagcctcaaagcatattttaaaggatagaaataaacagccatatgaagagatacagacagggcggtctggaagggtccagagcaggagcttctatctccatagagttggggttacgtcaccctctgggcacattctgtcagcctccacacgttcagctctcagaagctcccgaaccctgtcctttgggccttttatggagaactccattggctgtccatgactgaagcatggacaactgtgataatgtgattgggcaaaaagggtctgatctaagcccagcaaggccagtccagattctttgggcctttgtgcagcattcctttctccagggtatggggcaaggacccactctggaatgaggatcctacaacccacaatcagattagagtcctgccttgggcagctgaaaagaggacaggagaaggtcagagagacgaaaggctgttttttgaggcctgaggcaccccaacatgacaacgtaagactgtaaccatggtcatgtgagttatgagctaggaaccctggacgaaaccaacacatatacaatcatctcccacctcccaacgcctttactttcacagcctctgcagcaaactgcggtcactataatcgctcctgtggcacagaggcatacccaggggaatctgcccagggggccactctgtgcccacgtgggaacccacacctgcttgtaaagcctcccctccctctgaccagcaaccaggacagtttgttgttccaagcagtgggctcatgtctgttttggctcagaacagggtggggagagcgggccagggacccgcaggaaggcttatccttgagattgcgtgggagacacaacaaggggtgggggcccgcaggcggggcggggcgaagcaggtgatatcaagcccagagccccagcctctccccacagtctcaccatggcccgcaccgtggtgctcatcaccggctgttcctcgggcatcggcctgcacttggccgtacgtctggcttcagatccatcccagagcttcaaaggtatagataggcagggacagggagggagagaagggaggagcccttggaggccagaagggaagtcagatcttcctcctctcccaaaacctccagtgtatgccacgttgagggacctgaaaacacagggccggctgtgggaggcggcccgggccctggcatgccctccgggatccctggagacgttgcagctggacgtaagggactcaaaatccgtggccgctgcccgggaacgcgtgactgagggccgcgtggacgtgctgggtgagcctcctggaagcatatgggctcctaggagccttctccgccctgcgttgaaaccaacatgttcccaggcccagggagcacgaggggacaggccgtgctgagggtgatgctgaggcgggctggtcgggcctcttgtctccgcagtgtgcggcgcagaaccctgaggaggtggcggaggtgagcgccgggctggactccaggagtgggggcggtgcgtcctccggcgcgcagcggtggccacagctctcctcccgccgccgcaggtcttcctcaccgctttgcgcgccccgaagccgaccctgcgctacttcaccaccgagcgcttcctgcccctgctgcggatgcgcctggacgaccccagcggctccaactacgtcaccgccatgcaccgggaagtgttcggcgacgttccggcaaaggccgaggctggggccgaggctgggggcggggccgggcctggggcagaggacgaggccgggcgcggtgcggtgggggaccctgagctcggcgatcctccggccgccccgcagtaaaggcttcctcagccgctgtctcccgcgcccttctttgtcccctgggtctgtgtggtccctggggatggggcggcggtagcagctgtgggtggctaattaagatagatcgcgttagccagttttaccagcgcagctaggcgcgatgctgtcgcctgtaatgccagcgctttgggaggcggaggcaggaggatcgctcaagccccggagttggagaccagccagagcaacacagtgagacccccatctctacaaaaataaagaaaatttaaaaatcaa

SEQ ID NO: 446433 - DNA, 729 bp, Homo sapiens
ggccctcacatccctggagcctcagccccctccacacacgtgctgtgaatcatagggggatcaggatactcctgctcacagacacccatctccccctaccaaaaataacgctgggctcctccttccaccctgactctgcctctctgtctgcaggagcctggtcggggtgctccacagaagctgtgcctgggcttgggagccaaggccatgtccctctcccggccaggggagacggagcccatccacagtgtcagctatggccatgtggccgcctgccagctaatgggcccccacaccctggccttgagggtgggagagagccagctcctcctgcagagcccccaggtggaagagatcatgcagctggtgaatgcctacttggccaacccctcccccgagaggccctgcagcagctcttctcctccatgccaagacctgccagacacctcccctcccagccagcgcccgggcctggacgagccccagggacagtctggctgcttggggcagctgcaggactgagcctgccaagaggtcacgacttccctcctgcctgcagcctgggccaggactgctctgagatttgagggaaacatggacccttttggccctgcagggacagggcacatcccacacccaagggctacaatgggtgtgggtaattttctagtttgtttcttaatttatttgtagaagagaagcaaaaaaaaaaaagtttcttatttacac

SEQ ID NO: 446434 - DNA, 2760 bp, Homo sapiens
  misc_feature (1815)..(1815): n is a, c, g, or t
  misc_feature (1826)..(1827): n is a, c, g, or t
  misc_feature (1829)..(1829): n is a, c, g, or t
  misc_feature (1835)..(1835): n is a, c, g, or t
  misc_feature (1838)..(1839): n is a, c, g, or t
  misc_feature (1849)..(1849): n is a, c, g, or t
  misc_feature (1854)..(1854): n is a, c, g, or t
  misc_feature (1884)..(1886): n is a, c, g, or t
  misc_feature (1909)..(1911): n is a, c, g, or t
  misc_feature (1921)..(1921): n is a, c, g, or t
  misc_feature (1926)..(1926): n is a, c, g, or t
gtgacgaaacctggaccctgcctagtaaagaagggaggagagaaagaagagagagggggggcggggtcccagctctgtgctcgcgcccccagcgcgccagtcccggggctgcagggagcgcagcgcgcgcggcccgggccccggccaccggacgccctaccggacacgaccctccctggagcttggacaactgcccacctcggacgctgcaccggacactgccccccacagggctggacactccaacggacactacttcccagctccggacattgctccctcctctcccggggccctggacgcttttccccctcccccctccgggggcccagacactgagcccccctcagcgtctggctagcgtccccttgcaccccagcccaggacactgcctcctccctgtcctcttctcccttctgctcctcccacctcatctttcccctgctcgggtcggagccccgccagttcctccgaccccctactgctcggccgcggctgcccgcgcccccatccgcagctcctcgcccggatgcctctccccgggggactatggtggcttctctgctgccgtcgaggcttcactcttctgcaccgggactacggggacggcgagcttagcggggacggggacgaggacgaggacgaggaaacctttgagctgcggaccccgagtccagcgggcggcgggaggggtcccctggaagtgacgctgactcagccagtgaggagcgggcctgtctccaacaggctgcagagctgggaggagacttggagcctcatcccggagaaagggctgccggaggacgacccggacatcgttgtgaaaggttggctgtaccgggagccccgcggaggaggggcgcggccctggctgcccccgcgccgagcctggtttgtgctcacgcgggactccctggatcagttcagcagcagcgggaaaggggcgcggcgtctcgggagcctcgtgctcaccagcctgtgctcggtgaccggcccagagcgcaggcgtaaggagacaggtctgtggtcagtgactgtgtctggtcggaaacacagtgtccgcctctgctccccacgccaggcagaggctgagcgctggggggtggcattgcgggaagtgatcgcctccaaggcacccctggagacccccacccagctactgctcagggacatacaggaaagttgcggggacccagaggccgttgccctcatttacctgaggaacccgattctgagacacactagtggagccttgtatgccccactcctgcccctgccctatggagtcagcgccccaggtccgggctatgcacccctgcgcgaggaggcggtgcggctgttcttggcgctgcaggcgctggagggggcgcggcgccccgggcccttgatgcagggtgtgctccaaacctgccgggacttgcccgcgctccgggatgaactcttcctgcagctggctaagcagacctcgggccctgcaggtccccccgggctcccggctacccaagaccctgcggccctgcggtactggcaactcctcacctgcatgagctgcaccttccgacctgggggagctgtgcgggggcacctcctggggcacttggagaggaccgagcaggcactcccggactcggaactggcggaatatgcgcgcttcatccggaaagcgctgggccggacgcgcggcagagagctggtgccctcgctggcggagatttccgcgttgagccaacggcaggagctgctgtgtaccgtgcactgtccgggggctggtgcctgtgctgtggccatcgactcccacaccacggcgggggaggnctctatatctnntntttctnctnntcttttcctnagccncaactcattctctctttactatcatctatnnncccaggatctagccctttcttgnnngacctctttnccgangtgctcaccagcttggccgcggaggaagctgggttggaggactcgcccgactccgggtggagactatgtctgcgtcttcacggacctctgcaccctgaggggctgtccccagacggtcacgaactgcctttcctctttgagcaggctcacgctctgctgctgcggggccggccgcccccacccgacgacacgctgcgcgccctggcggcgctgcgcctgcagagcctgcatcgggacttctctccgcgggtgcccctgccccgcctggaccgctgtcccgcgcgcggctcccgcccccggccccgccgcgcgaagacccgccccgcccgacccccaggccgcccccttccgctgccctgctggccggggcgctctggagcccgggcctggccaagaggcgggcggagcgggcccggcgcggcggggccggccgcactgcgggaagcattgcccgcgagggaggaggcggcgccggcacggcagctgccgtgctgggcggctggaagcggctacggggcatgggccgagctgaggccatggccgcctacctggccctggcggcgcagtgtccggggttcggcgctgctcggtatgacgttctggagctgagcacggagcctggtcggggtgctccacagaagctgtgcctgggcttgggagccaaggccatgtccctctcccggccaggggagacggagcccatccacagtgtcagctatggccatgtggccgcctgccagctaatgggcccccacaccctggccttgagggtgggagagagccagctcctcctgcagagcccccaggcggaggtgaaacgagccgagtggcagg

SEQ ID NO: 446435 - DNA, 1517 bp, Homo sapiens
gtgacgaaacctggaccctgcctagtaaagaagggaggagagaaagaagagagagggggggcggggtcccagctctgtgctcgcgcccccagcgcgccagtcccggggctgcagggagcgcagcgcgcgcggcccgggccccggccaccggacgccctaccggacacgaccctccctggagcttggacaactgcccacctcggacgctgcaccggacactgccccccacagggctggacactccaacggacactacttcccagctccggacattgctccctcctctcccggggccctggacgcttttccccctcccccctccgggggcccagacactgagcccccctcagcgtctggctagcgtccccttgcaccccagcccaggacactgcctcctccctgtcctcttctcccttctgctcctcccacctcatctttcccctgctcgggtcggagccccgccagttcctccgaccccctactgctcggccgcggctgcccgcgcccccatccgcagctcctcgcccggatgcctctccccgggggactatggtggcttctctgctgccgtcgaggcttcactcttctgcaccgggactacggggacggcgagcttagcggggacggggacgaggacgaggacgaggaaacctttgagctgcggaccccgagtccagcgggcggcgggaggggtcccctggaagtgacgctgactcagccagtgaggagcgggcctgtctccaacaggctgcagagctgggaggagacttggagcctcatcccggagaaagggctgccggaggacgacccggacatcgttgtgaaaggttggctgtaccgggagccccgcggaggaggggcgcggccctggctgcccccgcgccgagcctggtttgtgctcacgcgggactccctggatcagttcagcagcagcgggaaaggggcgcggcgtctcgggagcctcgtgctcaccagcctgtgctcggtgaccggcccagagcgcaggcgtaaggagacaggtctgtggtcagtgactgtgtctggtcggaaacacagtgtccgcctctgctccccacgccaggcagaggctgagcgctggggggtggcattgcgggaagtgatcgcctccaaggcacccctggagacccccacccagctactgctcagggacatacaggaaagttgcggggacccagaggccgttgccctcatttacctgaggaacccgattctgagacacactagtggagccttgtatgccccactcctgcccctgccctatggagtcagcgccccaggtccgggctatgcacccctgcgcgaggaggcggtgcggctgttcttggcgctgcaggcgctggagggggcgcggtggccccccggggggggccccccttttttttgggggacaaaattttggggggcccccaaaaaagggggggggggggactttttggggggggttattgtggggccccctttatttacccccgaagaaaaccttgggcccgggggac

SEQ ID NO: 446436 - DNA, 3239 bp, Homo sapiens
cagacagcgaatgaccgcagccagacagtcgctcttgctcttcctcggccctgcggcaggatccgccggtgcaggggcctctccccggactccacgcgtgtctggagggctctcgggttagggaagggggctttggagacgccccgggcggccgggcggtggcgggacgcgggccctttaagaaggagcgaggggcgcggccaggtaggggcgggtccagggcggatcagcgctgcgccggcgccggcccgggagccggatttggagcgcgaggcgccggtgggggcggagggggctgcgcggcggaggctcccgtggcctcggacgctcctcctagctagcggccgccgcccgccgccgcctgcgcctccagctccttcgccccggcgggcccggccgccgcttccggcagctcacctgggaagcgctcacctgggacgcgctcacctgggacgcgctacctgcctccgggcgcctgggcttcaggatgaaggaccgtctggagcagctgaaggccaagcagctgacacaggatgatgatactgatgcggttgagattgctatcgacaacacggcttttatggacgagttcttttctgagattgaggaaactcggcttaacattgacaagatctcagaacatgtagaggaggctaagaaactctacagtatcattctctctgcaccgattccagagccaaaaaccaaggatgacctagagcagctcacgactgagattaagaaaagggccaacaacgtccggaacaaactgaagagcatggagaagcatattgaagaagatgaggtcaggtcatcggcagaccttcggattcggaaatcccagcactctgtcctttctcggaagtttgtggaggtgatgaccaaatacaatgaagctcaagtggacttccgagaacgcagcaaagggcgaatccagcggcagctcgaaattactggcaaaaagacaaccgatgaggagctggaggagatgttggagagtggcaacccggccatcttcacttctgggatcattgactcacagatttccaagcaagccctcagtgagattgagggacgacacaaggacattgtgaggctggagagcagcatcaaggagcttcacgacatgtttatggacatcgccatgctggtggagaatcagggtgagatgttagataacatagagttgaatgtcatgcacacagtggaccacgtggagaaggcacgagatgaaacgaaaaaagctgtgaaataccagagtcaggcccggaagaaattgataattatcattgtgctagtagttgtgttgctgggcattttagcattgattattggactttccgttgggctgaattaagagtggcctaagaggctgctgcactgaaataaactgatttcactccagactggtgtggccacccttgtcttcagatgagaatggagtctgaatggccttcctgagagcgagtgcgacccgttcctttgtttccttgcaaccacccttggacctgactcagctaacaatctagccctgggggaatgtgatctacctgatgcgaccctgagttctccccagagcctcctcctgccccaccagctctcaagtaccttttctcctggactgtgtggacccacccagctttcttcctccctgttgtgtgtcagattatgccttgcacttgggaaagctcttgtgagactctcccaaggtgctgtatttttctacctcatggagtattctcccagaaactgcaatgtatttttttaggggagtatctttaacaaagcagaatgattcttctaagtttggcaacaagaaggcttggatctgagtcttctacctggcaggatgccaatcctgtttgttgtccgtatgtcctgaaaacatgagggactggcagatgtcattttggtctaaagagctgacttgtttgaaattcagccttaaattaagctcttagttgttcagcttggggggcaactttgatttttctctgtgttgtagtctctcatatttactcaaggagggaccaggatgatacagtcatctgaggttatgctttgcaaaaggctgacggtatggaatatgtttccatgtctgagtcttagaaactggctgctcattgttagaaagtgatgctttgtgagactattgtcttggggccaaaaataatcagggattttaaattgggcaagggacaaggtgctagaatcctaagctctggaaatatttcatgacactggtgtattcactcatgtgttccagatgtattctaattgtgtatgaaatgtatgtacacataagtgtgtgtgtctcaggaagtaggaaataaaaatggaagctattatgacctcaaaaaaaaaaagccaactttgagctaggataaaaattgggtaaaggacatttgcttacctgcaaatgaatcactgtggaaatgtgatcttcccatatcatcaagaaacttgttttctggatgaatactgggagaataaaatgagaactctggagtgagctaaattgatcccaattaagtttttctgcttagcagacagaaggtataattttttgacaccctttcccacctggtgcctatgctaggcttgtcctgagaacatccctcagtaacttgatattcacatgacctacaggatgtcccatctgcagggctgagtcagttggggaacaccagaggctacacagtagctcttcctgctactcggttaatgagcttggcaggttctttgtctcactgaattcttatcatggaaacagcagcagcagccgctaggaaatcttcaagtgtagtgtctgtgctaacccagtggtaaatcccttagatcccctgctggtctctggcagtctccttgattttgggtaccatgtatattttccgctttgactttaacgctttctaggatagggtaagcacccttaattcaggcactgtccattagcttcctttgcaaaggctacttatggccggtcacaatccagcactcagacagagccaaggcaatatcctcttgcccatggctatgatgtcagacagtggatgggctccagcaacaagagacaaaataactaaaggcctttgctctcctctgacattgaggcctggggcttacagtttggaatacaacatgtgaaggtttttgttgttgtttgtattttttagatgtaaacttgattattttattgctaatttaaaaataaaaatgactttgtattgattgtgaaa

SEQ ID NO: 446437 - DNA, 1123 bp, Homo sapiens
ctgaggcaggaggatcacttgagcccaggaggtcgaggctgcagtgagccatgatcatgccactgcactctagcctgagtgatagagaaaaaccctgtcttaaaaataaatgaagtatcctagaaggatgtctgtatgtagagatgtaggcctcttactcagactggtaagatattttctatgtagaggtgacaggggttaggttttggatgagttgttatttttttggttgtttgtaataatgatttgtttttgtcttattcctctctccagaaattgataattatcattgtgctagtagttgtgttgctgggcattttagcattgattattggactttccgttgggctgaattaagagtggcctaagaggctgctgcactgaaatgtaagtaaacgagtggttcttggggactctggatttggctcctcaagaggaaattagcttgggatttcaaattcctcttctttccccctatgattgtccttggacacactgagctttctaaaactttcagtagcctgtggattctttatctccttatagttctattggtttctggctgcagtacgtggattagctctccgtttgttctatcctgtagattctgtccccaatctctgtcttgtcgtattaccacttctcccagcatacctgagcaccccaggtgactccccttactcaggaagcatgcttctaagttgggtacatctctgtcttggatctggagtctgtcttctgaattcttactgattttcatggatgttgggctttactttctgtatccttttcaatgtaaatgaaactctgaattgggatttggatctgcagagttttctctgttgctgagtggttgggtcttaaatgatgatagttaacacacttttgagtgttgtgttgtaccagacaatgtactaaacaccttatacacatatcattgaatccttacaacatcctttgagacagatacagtgttatgcacattttacagacaaagaaactcagtcaaagagaatgttgaataacagggccaagttcacacagctaatagtggacctagcttctctttgtaaaagaaggtagccacttatcattaactataaagcctggagaaccttagagg

SEQ ID NO: 446438 - DNA, 496 bp, Homo sapiens
catactctcaaatatttaacattttcacaatgttggaggtttatgttattttgctgtagctaacagtgtgactaaccttatttaatatttttctcatttaaattttctctttattaccaactcatataagttggagtactgaaataacaggtataaacatttttaagacttggcacataataccatgccagtacccagagctgtgccttccttttatatttgtttcagtgtgtctcttcttattcctcctccttccatgtgaccaggggatctaaaagtcagcttattacagcattgagcattcaacttcatcttgaaagataagcaacagtgagatgaacaacctctcatagacaggtggttggttgattttttttttcccctcttttttctggcacttggagtctagcccttgacttttttgtatgtgaactttaaattttggtttggctctgaacaatctgattgaaatagatgttgaaattttaaaaagaaa

SEQ ID NO: 446439 - DNA, 3816 bp, Homo sapiens
cagacagcgaatgaccgcagccagacagtcgctcttgctcttcctcggccctgcggcaggatccgccggtgcaggggcctctccccggactccacgcgtgtctggagggctctcgggttagggaagggggctttggagacgccccgggcggccgggcggtggcgggacgcgggccctttaagaaggagcgaggggcgcggccaggtaggggcgggtccagggcggatcagcgctgcgccggcgccggcccgggagccggatttggagcgcgaggcgccggtgggggcggagggggctgcgcggcggaggctcccgtggcctcggacgctcctcctagctagcggccgccgcccgccgccgcctgcgcctccagctccttcgccccggcgggcccggccgccgcttccggcagctcacctgggaagcgctcacctgggacgcgctcacctgggacgcgctacctgcctccgggcgcctgggcttcaggatgaaggaccgtctggagcagctgaaggccaagcagctgacacaggatgatgatactgatgcggttgagattgctatcgacaacacggcttttatggacgagttcttttctgagattgaggaaactcggcttaacattgacaagatctcagaacatgtagaggaggctaagaaactctacagtatcattctctctgcaccgattccagagccaaaaaccaaggatgacctagagcagctcacgactgagattaagaaaagggccaacaacgtccggaacaaactgaagagcatggagaagcatattgaagaagatgaggtcaggtcatcggcagaccttcggattcggaaatcccagcactctgtcctttctcggaagtttgtggaggtgatgaccaaatacaatgaagctcaagtggacttccgagaacgcagcaaagggcgaatccagcggcagctcgaaattactggcaaaaagacaaccgatgaggagctggaggagatgttggagagtggcaacccggccatcttcacttctgggatcattgactcacagatttccaagcaagccctcagtgagattgagggacgacacaaggacattgtgaggctggagagcagcatcaaggagcttcacgacatgtttatggacatcgccatgctggtggagaatcagggtgagatgttagataacatagagttgaatgtcatgcacacagtggaccacgtggagaaggcacgagatgaaacgaaaaaagctgtgaaataccagagtcaggcccggaagaaattgataattatcattgtgctagtagttgtgttgctgggcattttagcattgattattggactttccgttgggctgaattaagagtggcctaagaggctgctgcactgaaataaactgatttcactccagactggtgtggccacccttgtcttcagatgagaatggagtctgaatggccttcctgagagcgagtgcgacccgttcctttgtttccttgcaaccacccttggacctgactcagctaacaatctagccctgggggaatgtgatctacctgatgcgaccctgagttctccccagagcctcctcctgccccaccagctctcaagtaccttttctcctggactgtgtggacccacccagctttcttcctccctgttgtgtgtcagattatgccttgcacttgggaaagctcttgtgagactctcccaaggtgctgtatttttctacctcatggagtattctcccagaaactgcaatgtatttttttaggggagtatctttaacaaagcagaatgattcttctaagtttggcaacaagaaggcttggatctgagtcttctacctggcaggatgccaatcctgtttgttgtccgtatgtcctgaaaacatgagggactggcagatgtcattttggtctaaagagctgacttgtttgaaattcagccttaaattaagctcttagttgttcagcttggggggcaactttgatttttctctgtgttgtagtctctcatatttactcaaggagggaccaggatgatacagtcatctgaggttatgctttgcaaaaggctgacggtatggaatatgtttccatgtctgagtcttagaaactggctgctcattgttagaaagtgatgctttgtgagactattgtcttggggccaaaaataatcagggattttaaattgggcaagggacaaggtgctagaatcctaagctctggaaatatttcatgacactggtgtattcactcatgtgttccagatgtattctaattgtgtatgaaatgtatgtacacataagtgtgtgtgtctcaggaagtaggaaataaaaatggaagctattatgacctcaaaaaaaaaaagccaactttgagctaggataaaaattgggtaaaggacatttgcttacctgcaaatgaatcactgtggaaatgtgatcttcccatatcatcaagaaacttgttttctggatgaatactgggagaataaaatgagaactctggagtgagctaaattgatcccaattaagtttttctgcttagcagacagaaggtataattttttgacaccctttcccacctggtgcctatgctaggcttgtcctgagaacatccctcagtaacttgatattcacatgacctacaggatgtcccatctgcagggctgagtcagttggggaacaccagaggctacacagtagctcttcctgctactcggttaatgagcttggcaggttctttgtctcactgaattcttatcatggaaacagcagcagcagccgctaggaaatcttcaagtgtagtgtctgtgctaacccagtggtaaatcccttagatcccctgctggtctctggcagtctccttgattttgggtaccatgtatattttccgctttgactttaacgctttctaggatagggtaagcacccttaattcaggcactgtccattagcttcctttgcaaaggctacttatggccggtcacaatccagcactcagacagagccaaggcaatatcctcttgcccatggctatgatgtcagacagtggatgggctccagcaacaagagacaaaataactaaaggcctttgctctcctctgacattgaggcctggggcttacagtttggaatacaacatgtgaaggtttttgttgttgtttgtattttttagatgtaaacttgattattttattgctaatttaaaaataaaaatgactttgtattgattgtgaaaaaaaaaaaaaaaaaaaaaaaaaaaaacaaaaaaaaaaagagaagagagagacaaaaaaaacaaagaaaaaatacaacaaaagagagagcgaacacaaaaagaaataaaaagcaaacacaccagacgacgcggagaaccagaggcgaggcccaccccaggacgacgcacaaaaaccccagccagacgaccgtataaagcacacccacccaggccgacacatgcgaaaacaacggagcaccactgccgggacacccctatcgcggcaacacggaaagacaatcacaagctacaaagcacaggtgaaatccaccccgagactgaggaaaccgagcatcacgccgatgacaaaccgcacacggcggccgcaccaccgcggcgaccaaacgagacacaagagacgacaacaacacgcaaagaagaggggagaaaaacaaacccagcgaggagaaaaaagacgaagagatgaaagaaagaaagagacatagacaacagacgaaggaacaacaaagccgagacaacaagaaagaaccaagaaccaaggcggacactacaccgacacagaaaaggaaacacaaaa

SEQ ID NO: 446440 - DNA, 3125 bp, Homo sapiens
cagacagcgaatgaccgcagccagacagtcgctcttgctcttcctcggccctgcggcaggatccgccggtgcaggggcctctccccggactccacgcgtgtctggagggctctcgggttagggaagggggctttggagacgccccgggcggccgggcggtggcgggacgcgggccctttaagaaggagcgaggggcgcggccaggtaggggcgggtccagggcggatcagcgctgcgccggcgccggcccgggagccggatttggagcgcgaggcgccggtgggggcggagggggctgcgcggcggaggctcccgtggcctcggacgctcctcctagctagcggccgccgcccgccgccgcctgcgcctccagctccttcgccccggcgggcccggccgccgcttccggcagctcacctgggaagcgctcacctgggacgcgctcacctgggacgcgctacctgcctccgggcgcctgggcttcaggatgaaggaccgtctggagcagctgaaggccaagcagctgacacaggatgatgatactgatgcggttgagattgctatcgacaacacggcttttatggacgagttcttttctgagattgaggaaactcggcttaacattgacaagatctcagaacatgtagaggaggctaagaaactctacagtatcattctctctgcaccgattccagagccaaaaaccaaggatgacctagagcagctcacgactgagattaagaaaagggccaacaacgtccggaacaaactgaagagcatggagaagcatattgaagaagatgaggtcaggtcatcggcagaccttcggattcggaaatcccagcactctgtcctttctcggaagtttgtggaggtgatgaccaaatacaatgaagctcaagtggacttccgagaacgcagcaaagggcgaatccagcggcagctcgaaattactggcaaaaagacaaccgatgaggagctggaggagatgttggagagtggcaacccggccatcttcacttctgggatcattgactcacagatttccaagcaagccctcagtgagattgagggacgacacaaggacattgtgaggctggagagcagcatcaaggagcttcacgacatgtttatggacatcgccatgctggtggagaatcagggtgagatgttagataacatagagttgaatgtcatgcacacagtggaccacgtggagaaggcacgagatgaaacgaaaaaagctgtgaaataccagagtcaggcccggaagaaactgatttcactccagactggtgtggccacccttgtcttcagatgagaatggagtctgaatggccttcctgagagcgagtgcgacccgttcctttgtttccttgcaaccacccttggacctgactcagctaacaatctagccctgggggaatgtgatctacctgatgcgaccctgagttctccccagagcctcctcctgccccaccagctctcaagtaccttttctcctggactgtgtggacccacccagctttcttcctccctgttgtgtgtcagattatgccttgcacttgggaaagctcttgtgagactctcccaaggtgctgtatttttctacctcatggagtattctcccagaaactgcaatgtatttttttaggggagtatctttaacaaagcagaatgattcttctaagtttggcaacaagaaggcttggatctgagtcttctacctggcaggatgccaatcctgtttgttgtccgtatgtcctgaaaacatgagggactggcagatgtcattttggtctaaagagctgacttgtttgaaattcagccttaaattaagctcttagttgttcagcttggggggcaactttgatttttctctgtgttgtagtctctcatatttactcaaggagggaccaggatgatacagtcatctgaggttatgctttgcaaaaggctgacggtatggaatatgtttccatgtctgagtcttagaaactggctgctcattgttagaaagtgatgctttgtgagactattgtcttggggccaaaaataatcagggattttaaattgggcaagggacaaggtgctagaatcctaagctctggaaatatttcatgacactggtgtattcactcatgtgttccagatgtattctaattgtgtatgaaatgtatgtacacataagtgtgtgtgtctcaggaagtaggaaataaaaatggaagctattatgacctcaaaaaaaaaaagccaactttgagctaggataaaaattgggtaaaggacatttgcttacctgcaaatgaatcactgtggaaatgtgatcttcccatatcatcaagaaacttgttttctggatgaatactgggagaataaaatgagaactctggagtgagctaaattgatcccaattaagtttttctgcttagcagacagaaggtataattttttgacaccctttcccacctggtgcctatgctaggcttgtcctgagaacatccctcagtaacttgatattcacatgacctacaggatgtcccatctgcagggctgagtcagttggggaacaccagaggctacacagtagctcttcctgctactcggttaatgagcttggcaggttctttgtctcactgaattcttatcatggaaacagcagcagcagccgctaggaaatcttcaagtgtagtgtctgtgctaacccagtggtaaatcccttagatcccctgctggtctctggcagtctccttgattttgggtaccatgtatattttccgctttgactttaacgctttctaggatagggtaagcacccttaattcaggcactgtccattagcttcctttgcaaaggctacttatggccggtcacaatccagcactcagacagagccaaggcaatatcctcttgcccatggctatgatgtcagacagtggatgggctccagcaacaagagacaaaataactaaaggcctttgctctcctctgacattgaggcctggggcttacagtttggaatacaacatgtgaaggtttttgttgttgtttgtattttttagatgtaaacttgattattttattgctaatttaaaaataaaaatgactttgtattgattgtgaaa

SEQ ID NO: 446441 - DNA, 3851 bp, Homo sapiens
aaggaaagaggcttctggtggcattcattgcccatggaattctaagtgttcgagagtgctatatcttggacttagagggtcagaggctgatgaagcttgtgaagaagcaggtgtggggggtttatcccctgcctcacctccacctttcacaacagtcagttctctgtgcttagaaatcagcaatgtgctgtgcagcagctgtctgggaagaacattgaacaggaatgtagaaacagctcaggcccttatgctgggtgggaatggaatcacttcctttagatggccattttgtgaatttttacagaggaagttgaatgagattgagaaagcttgggtccccagaggtggctgggggccgggggagagcttcctctttcttataaacaggagcttctgacagggagtgacatagcattgtttcctttgtgataggtggtttctgaaaacaggaaaatctttactcctaatgtgaaaattgaaagcttgtcctttgtaggaattgtgtctggaacctgtttgaacagcatggagaagggtttagcgaccctggggttcagatccaaaagataagtttgattctacctgttgccatgttttagctgtgtggtttttgccaagttacctaacctccctaagttttaggttcctcaactgtagtgagttacagtaactaccaccacaaccaacagcaacaaaacctagcatgtgttgaacttacagtgtaccaggcaccatacaaaagcatcctatattcattatctcttttataccttacacaatcctatgaagcaggtagtgtttttatcagcatttaacagataaggaaacctaggcacagcaagataggtaacttgccagttcctccctttctcacccctcaccccctgaaagaaacacacacacacacacacacacacacacacacacacacaacccagcaattggtagagctaggatttaatttcagatgttgagacaccggaatttgatatatcagagagctgttatgagttttaaaggaaattatgtgtaaaatgctgaatatagttcctagtacttcgtgagcattcaataatttagccatttattgtgtttttagcctcactctgctcttttttgccttttgcagaagcagctgacacaggatgatgatactgatgcggttgagattgctatcgacaacacggcttttatggacgagttcttttctgagattgaggaaactcggcttaacattgacaagatctcagaacatgtagaggaggctaagaaactctacagtatcattctctctgcaccgattccagagccaaaaaccaaggatgacctagagcagctcacgactgagattaagaaaagggccaacaacgtccggaacaaactgaagagcatggagaagcatattgaagaagatgaggtcaggtcatcggcagaccttcggattcggaaatcccagcactctgtcctttctcggaagtttgtggaggtgatgaccaaatacaatgaagctcaagtggacttccgagaacgcagcaaagggcgaatccagcggcagctcgaaattactggcaaaaagacaaccgatgaggagctggaggagatgttggagagtggcaacccggccatcttcacttctgggatcattgactcacagatttccaagcaagccctcagtgagattgagggacgacacaaggacattgtgaggctggagagcagcatcaaggagcttcacgacatgtttatggacatcgccatgctggtggagaatcagggtgagatgttagataacatagagttgaatgtcatgcacacagtggaccacgtggagaaggcacgagatgaaacgaaaaaagctgtgaaataccagagtcaggcccggaagaaattgataattatcattgtgctagtagttgtgttgctgggcattttagcattgattattggactttccgttgggctgaattaagagtggcctaagaggctgctgcactgaaataaactgatttcactccagactggtgtggccacccttgtcttcagatgagaatggagtctgaatggccttcctgagagcgagtgcgacccgttcctttgtttccttgcaaccacccttggacctgactcagctaacaatctagccctgggggaatgtgatctacctgatgcgaccctgagttctccccagagcctcctcctgccccaccagctctcaagtaccttttctcctggactgtgtggacccacccagctttcttcctccctgttgtgtgtcagattatgccttgcacttgggaaagctcttgtgagactctcccaaggtgctgtatttttctacctcatggagtattctcccagaaactgcaatgtatttttttaggggagtatctttaacaaagcagaatgattcttctaagtttggcaacaagaaggcttggatctgagtcttctacctggcaggatgccaatcctgtttgttgtccgtatgtcctgaaaacatgagggactggcagatgtcattttggtctaaagagctgacttgtttgaaattcagccttaaattaagctcttagttgttcagcttggggggcaactttgatttttctctgtgttgtagtctctcatatttactcaaggagggaccaggatgatacagtcatctgaggttatgctttgcaaaaggctgacggtatggaatatgtttccatgtctgagtcttagaaactggctgctcattgttagaaagtgatgctttgtgagactattgtcttggggccaaaaataatcagggattttaaattgggcaagggacaaggtgctagaatcctaagctctggaaatatttcatgacactggtgtattcactcatgtgttccagatgtattctaattgtgtatgaaatgtatgtacacataagtgtgtgtgtctcaggaagtaggaaataaaaatggaagctattatgacctcaaaaaaaaaaagccaactttgagctaggataaaaattgggtaaaggacatttgcttacctgcaaatgaatcactgtggaaatgtgatcttcccatatcatcaagaaacttgttttctggatgaatactgggagaataaaatgagaactctggagtgagctaaattgatcccaattaagtttttctgcttagcagacagaaggtataattttttgacaccctttcccacctggtgcctatgctaggcttgtcctgagaacatccctcagtaacttgatattcacatgacctacaggatgtcccatctgcagggctgagtcagttggggaacaccagaggctacacagtagctcttcctgctactcggttaatgagcttggcaggttctttgtctcactgaattcttatcatggaaacagcagcagcagccgctaggaaatcttcaagtgtagtgtctgtgctaacccagtggtaaatcccttagatcccctgctggtctctggcagtctccttgattttgggtaccatgtatattttccgctttgactttaacgctttctaggatagggtaagcacccttaattcaggcactgtccattagcttcctttgcaaaggctacttatggccggtcacaatccagcactcagacagagccaaggcaatatcctcttgcccatggctatgatgtcagacagtggatgggctccagcaacaagagacaaaataactaaaggcctttgctctcctctgacattgaggcctggggcttacagtttggaatacaacatgtgaaggtttttgttgttgtttgtattttttagatgtaaacttgattattttattgctaatttaaaaataaaaatgactttgtattgattgtgaaa

SEQ ID NO: 446442 - DNA, 3211 bp, Homo sapiens
cagacagcgaatgaccgcagccagacagtcgctcttgctcttcctcggccctgcggcaggatccgccggtgcaggggcctctccccggactccacgcgtgtctggagggctctcgggttagggaagggggctttggagacgccccgggcggccgggcggtggcgggacgcgggccctttaagaaggagcgaggggcgcggccaggtaggggcgggtccagggcggatcagcgctgcgccggcgccggcccgggagccggatttggagcgcgaggcgccggtgggggcggagggggctgcgcggcggaggctcccgtggcctcggacgctcctcctagctagcggccgccgcccgccgccgcctgcgcctccagctccttcgccccggcgggcccggccgccgcttccggcagctcacctgggaagcgctcacctgggacgcgctcacctgggacgcgctacctgcctccgggcgcctgggcttcaggatgaaggaccgtctggagcagctgaaggccaagcagctgacacaggatgatgatactgatgcggttgagattgctatcgacaacacggcttttatggacgagttcttttctgagattgaggaaactcggcttaacattgacaagatctcagaacatgtagaggaggctaagaaactctacagtatcattctctctgcaccgattccagagccaaaaaccaaggatgacctagagcagctcacgactgagattaagaaaagggccaacaacgtccggaacaaactgaagagcatggagaagcatattgaagaagatgaggtcaggtcatcggcagaccttcggattcggaaatcccagcactctgtcctttctcggaagtttgtggaggtgatgaccaaatacaatgaagctcaagtggacttccgagaacgcagcaaagggcgaatccagcggcagctcgaaattactggcaaaaagacaaccgatgaggagctggaggagatgttggagagtggcaacccggccatcttcacttctgggatcattgactcacagatttccaagcaagccctcagtgagattgagggacgacacaaggacattgtgaggctggagagcagcatcaaggagcttcacgacatgtttatggacatcgccatgctggtggagaatcagggtgagatgttagataacatagagttgaatgtcatgcacacagtggaccacgtggagaaggcacgagatgaaacgaaaaaagctgtgaaataccagagtcaggcccggaagaaattgataattatcattgtgctagtagttgtgttgctgggcattttagcattgattattggactttccgttgggctgaattaagagtggcctaagaggctgctgcactgaaataaactgatttcactccagactggtgtggccacccttgtcttcagatgagaatggagtctgaatggccttcctgagagcgagtgcgacccgttcctttgtttccttgcaaccacccttggacctgactcagctaacaatctagccctgggggaatgtgatctacctgatgcgaccctgagttctccccagagcctcctcctgccccaccagctctcaagtaccttttctcctggactgtgtggacccacccagctttcttcctccctgttgtgtgtcagattatgccttgcacttgggaaagctcttgtgagactctcccaaggtgctgtatttttctacctcatggagtattctcccagaaactgcaatgtatttttttaggggagtatctttaacaaagcagaatgattcttctaagtttggcaacaagaaggcttggatctgagtcttctacctggcaggatgccaatcctgtttgttgtccgtatgtcctgaaaacatgagggactggcagatgtcattttggtctaaagagctgacttgtttgaaattcagccttaaattaagctcttagttgttcagcttggggggcaactttgatttttctctgtgttgtagtctctcatatttactcaaggagggaccaggatgatacagtcatctgaggttatgctttgcaaaaggctgacggtatggaatatgtttccatgtctgagtcttagaaactggctgctcattgttagaaagtgatgctttgtgagactattgtcttggggccaaaaataatcagggattttaaattgggcaagggacaaggtgctagaatcctaagctctggaaatatttcatgacactggtgtattcactcatgtgttccagatgtattctaattgtgtatgaaatgtatgtacacataagtgtgtgtgtctcaggaagtaggaaataaaaatggaagctattatgacctcaaaaaaaaaaagccaactttgagctaggataaaaattgggtaaaggacatttgcttacctgcaaatgaatcactgtggaaatgtgatcttcccatatcatcaagaaacttgttttctggatgaatactgggagaataaaatgagaactctggagtgagctaaattgatcccaattaagtttttctgcttagcagacagaaggtataattttttgacaccctttcccacctggtgcctatgctaggcttgtcctgagaacatccctcagtaacttgatattcacatgacctacaggatgtcccatctgcagggctgagtcagttggggaacaccagaggctacacagtagctcttcctgctactcggttaatgagcttggcaggttctttgtctcactgaattcttatcatggaaacagcagcagcagccgctaggaaatcttcaagtgtagtgtctgtgctaacccagtggtaaatcccttagatcccctgctggtctctggcagtctccttgattttgggtaccatgtatattttccgctttgactttaacgctttctaggatagggtaagcaccctttgcaaaggctacttatggccggtcacaatccagcactcagacagagccaaggcaatatcctcttgcccatggctatgatgtcagacagtggatgggctccagcaacaagagacaaaataactaaaggcctttgctctcctctgacattgaggcctggggcttacagtttggaatacaacatgtgaaggtttttgttgttgtttgtattttttagatgtaaacttgattattttattgctaatttaaaaataaaaatgactttgtattgattgtgaaa

SEQ ID NO: 446443 - DNA, 3751 bp, Homo sapiens
aaggaaagaggcttctggtggcattcattgcccatggaattctaagtgttcgagagtgctatatcttggacttagagggtcagaggctgatgaagcttgtgaagaagcaggtgtggggggtttatcccctgcctcacctccacctttcacaacagtcagttctctgtgcttagaaatcagcaatgtgctgtgcagcagctgtctgggaagaacattgaacaggaatgtagaaacagctcaggcccttatgctgggtgggaatggaatcacttcctttagatggccattttgtgaatttttacagaggaagttgaatgagattgagaaagcttgggtccccagaggtggctgggggccgggggagagcttcctctttcttataaacaggagcttctgacagggagtgacatagcattgtttcctttgtgataggtggtttctgaaaacaggaaaatctttactcctaatgtgaaaattgaaagcttgtcctttgtaggaattgtgtctggaacctgtttgaacagcatggagaagggtttagcgaccctggggttcagatccaaaagataagtttgattctacctgttgccatgttttagctgtgtggtttttgccaagttacctaacctccctaagttttaggttcctcaactgtagtgagttacagtaactaccaccacaaccaacagcaacaaaacctagcatgtgttgaacttacagtgtaccaggcaccatacaaaagcatcctatattcattatctcttttataccttacacaatcctatgaagcaggtagtgtttttatcagcatttaacagataaggaaacctaggcacagcaagataggtaacttgccagttcctccctttctcacccctcaccccctgaaagaaacacacacacacacacacacacacacacacacacacacaacccagcaattggtagagctaggatttaatttcagatgttgagacaccggaatttgatatatcagagagctgttatgagttttaaaggaaattatgtgtaaaatgctgaatatagttcctagtacttcgtgagcattcaataatttagccatttattgtgtttttagcctcactctgctcttttttgccttttgcagaagcagctgacacaggatgatgatactgatgcggttgagattgctatcgacaacacggcttttatggacgagttcttttctgagaaaccaaggatgacctagagcagctcacgactgagattaagaaaagggccaacaacgtccggaacaaactgaagagcatggagaagcatattgaagaagatgaggtcaggtcatcggcagaccttcggattcggaaatcccagcactctgtcctttctcggaagtttgtggaggtgatgaccaaatacaatgaagctcaagtggacttccgagaacgcagcaaagggcgaatccagcggcagctcgaaattactggcaaaaagacaaccgatgaggagctggaggagatgttggagagtggcaacccggccatcttcacttctgggatcattgactcacagatttccaagcaagccctcagtgagattgagggacgacacaaggacattgtgaggctggagagcagcatcaaggagcttcacgacatgtttatggacatcgccatgctggtggagaatcagggtgagatgttagataacatagagttgaatgtcatgcacacagtggaccacgtggagaaggcacgagatgaaacgaaaaaagctgtgaaataccagagtcaggcccggaagaaattgataattatcattgtgctagtagttgtgttgctgggcattttagcattgattattggactttccgttgggctgaattaagagtggcctaagaggctgctgcactgaaataaactgatttcactccagactggtgtggccacccttgtcttcagatgagaatggagtctgaatggccttcctgagagcgagtgcgacccgttcctttgtttccttgcaaccacccttggacctgactcagctaacaatctagccctgggggaatgtgatctacctgatgcgaccctgagttctccccagagcctcctcctgccccaccagctctcaagtaccttttctcctggactgtgtggacccacccagctttcttcctccctgttgtgtgtcagattatgccttgcacttgggaaagctcttgtgagactctcccaaggtgctgtatttttctacctcatggagtattctcccagaaactgcaatgtatttttttaggggagtatctttaacaaagcagaatgattcttctaagtttggcaacaagaaggcttggatctgagtcttctacctggcaggatgccaatcctgtttgttgtccgtatgtcctgaaaacatgagggactggcagatgtcattttggtctaaagagctgacttgtttgaaattcagccttaaattaagctcttagttgttcagcttggggggcaactttgatttttctctgtgttgtagtctctcatatttactcaaggagggaccaggatgatacagtcatctgaggttatgctttgcaaaaggctgacggtatggaatatgtttccatgtctgagtcttagaaactggctgctcattgttagaaagtgatgctttgtgagactattgtcttggggccaaaaataatcagggattttaaattgggcaagggacaaggtgctagaatcctaagctctggaaatatttcatgacactggtgtattcactcatgtgttccagatgtattctaattgtgtatgaaatgtatgtacacataagtgtgtgtgtctcaggaagtaggaaataaaaatggaagctattatgacctcaaaaaaaaaaagccaactttgagctaggataaaaattgggtaaaggacatttgcttacctgcaaatgaatcactgtggaaatgtgatcttcccatatcatcaagaaacttgttttctggatgaatactgggagaataaaatgagaactctggagtgagctaaattgatcccaattaagtttttctgcttagcagacagaaggtataattttttgacaccctttcccacctggtgcctatgctaggcttgtcctgagaacatccctcagtaacttgatattcacatgacctacaggatgtcccatctgcagggctgagtcagttggggaacaccagaggctacacagtagctcttcctgctactcggttaatgagcttggcaggttctttgtctcactgaattcttatcatggaaacagcagcagcagccgctaggaaatcttcaagtgtagtgtctgtgctaacccagtggtaaatcccttagatcccctgctggtctctggcagtctccttgattttgggtaccatgtatattttccgctttgactttaacgctttctaggatagggtaagcacccttaattcaggcactgtccattagcttcctttgcaaaggctacttatggccggtcacaatccagcactcagacagagccaaggcaatatcctcttgcccatggctatgatgtcagacagtggatgggctccagcaacaagagacaaaataactaaaggcctttgctctcctctgacattgaggcctggggcttacagtttggaatacaacatgtgaaggtttttgttgttgtttgtattttttagatgtaaacttgattattttattgctaatttaaaaataaaaatgactttgtattgattgtgaaa

SEQ ID NO: 446444 - DNA, 2441 bp, Homo sapiens
gagggtagacagtgtgtttatatttcctagtaatgtgccagctgcttgctctaagatcatagtatcctcattttacagacggggaaagagcaatgaagttaaggaacttgcccaagactacatagctcataaggtggagcagccataatatgacccctgaactttttccataggcttttcattgtgtccttctgttttctaaaagaaaggcagcagggagttcatgaagatcgagaaccagaaagcagctcctgcagcctgtcttcaggagcggtgttgctgtgggacctgcagagcaggtgttttcactagggattgtcccttcccaccacgtccttccatgggtgtggacagcctgtgagaaggcttataaaaggcctagaggcttttctatttttttcccctctcacagtagggctttttgttctttgtacagtgggatatttaactccaagttctgtcctgggtttgtctatttcatagtgatttctggtctttcctccccaccttccaggtttgtggctgactccttctgttgccctttgccttcttcctgtgtactgatcagctcctcctttccctgcctcctaaactgatttcactccagactggtgtggccacccttgtcttcagatgagaatggagtctgaatggccttcctgagagcgagtgcgacccgttcctttgtttccttgcaaccacccttggacctgactcagctaacaatctagccctgggggaatgtgatctacctgatgcgaccctgagttctccccagagcctcctcctgccccaccagctctcaagtaccttttctcctggactgtgtggacccacccagctttcttcctccctgttgtgtgtcagattatgccttgcacttgggaaagctcttgtgagactctcccaaggtgctgtatttttctacctcatggagtattctcccagaaactgcaatgtatttttttaggggagtatctttaacaaagcagaatgattcttctaagtttggcaacaagaaggcttggatctgagtcttctacctggcaggatgccaatcctgtttgttgtccgtatgtcctgaaaacatgagggactggcagatgtcattttggtctaaagagctgacttgtttgaaattcagccttaaattaagctcttagttgttcagcttggggggcaactttgatttttctctgtgttgtagtctctcatatttactcaaggagggaccaggatgatacagtcatctgaggttatgctttgcaaaaggctgacggtatggaatatgtttccatgtctgagtcttagaaactggctgctcattgttagaaagtgatgctttgtgagactattgtcttggggccaaaaataatcagggattttaaattgggcaagggacaaggtgctagaatcctaagctctggaaatatttcatgacactggtgtattcactcatgtgttccagatgtattctaattgtgtatgaaatgtatgtacacataagtgtgtgtgtctcaggaagtaggaaataaaaatggaagctattatgacctcaaaaaaaaaaagccaactttgagctaggataaaaattgggtaaaggacatttgcttacctgcaaatgaatcactgtggaaatgtgatcttcccatatcatcaagaaacttgttttctggatgaatactgggagaataaaatgagaactctggagtgagctaaattgatcccaattaagtttttctgcttagcagacagaaggtataattttttgacaccctttcccacctggtgcctatgctaggcttgtcctgagaacatccctcagtaacttgatattcacatgacctacaggatgtcccatctgcagggctgagtcagttggggaacaccagaggctacacagtagctcttcctgctactcggttaatgagcttggcaggttctttgtctcactgaattcttatcatggaaacagcagcagcagccgctaggaaatcttcaagtgtagtgtctgtgctaacccagtggtaaatcccttagatcccctgctggtctctggcagtctccttgattttgggtaccatgtatattttccgctttgactttaacgctttctaggatagggtaagcacccttaattcaggcactgtccattagcttcctttgcaaaggctacttatggccggtcacaatccagcactcagacagagccaaggcaatatcctcttgcccatggctatgatgtcagacagtggatgggctccagcaacaagagacaaaataactaaaggcctttgctctcctctgacattgaggcctggggcttacagtttggaatacaacatgtgaaggtttttgttgttgtttgtattttttagatgtaaacttgattattttattgctaatttaaaaataaaaatgactttgtattgattgtgaaa

SEQ ID NO: 446445 - DNA, 2123 bp, Homo sapiens
cagacagcgaatgaccgcagccagacagtcgctcttgctcttcctcggccctgcggcaggatccgccggtgcaggggcctctccccggactccacgcgtgtctggagggctctcgggttagggaagggggctttggagacgccccgggcggccgggcggtggcgggacgcgggccctttaagaaggagcgaggggcgcggccaggtaggggcgggtccagggcggatcagcgctgcgccggcgccggcccgggagccggatttggagcgcgaggcgccggtgggggcggagggggctgcgcggcggaggctcccgtggcctcggacgctcctcctagctagcggccgccgcccgccgccgcctgcgcctccagctccttcgccccggcgggcccggccgccgcttccggcagctcacctgggaagcgctcacctgggacgcgctcacctgggacgcgctacctgcctccgggcgcctgggcttcaggatgaaggaccgtctggagcagctgaaggccaagcagctgacacaggatgatgatactgatgcggttgagattgctatcgacaacacggcttttatggacgagttcttttctgagattgaggaaactcggcttaacattgacaagatctcagaacatgtagaggaggctaagaaactctacagtatcattctctctgcaccgattccagagccaaaaaccaaggatgacctagagcagctcacgactgagattaagaaaagggccaacaacgtccggaacaaactgaagagcatggagaagcatattgaagaagatgaggtcaggtcatcggcagaccttcggattcggaaatcccagcactctgtcctttctcggaagtttgtggaggtgatgaccaaatacaatgaagctcaagtggacttccgagaacgcagcaaagggcgaatccagcggcagctcgaaattactggcaaaaagacaaccgatgaggagctggaggagatgttggagagtggcaacccggccatcttcacttctgggatcattgactcacagatttccaagcaagccctcagtgagattgagggacgacacaaggacattgtgaggctggagagcagcatcaaggagcttcacgacatgtttatggacatcgccatgctggtggagaatcagggtgagatgttagataacatagagttgaatgtcatgcacacagtggaccacgtggagaaggcacgagatgaaacgaaaaaagctgtgaaataccagagtcaggcccggaagaaattgataattatcattgtgctagtagttgtgttgctgggcattttagcattgattattggactttccgttgggctgaattaagagtggcctaagaggctgctgcactgaaatgtaagtaaacgagtggttcttggggactctggatttggctcctcaagaggaaattagcttgggatttcaaattcctcttctttccccctatgattgtccttggacacactgagctttctaaaactttcagtagcctgtggattctttatctccttatagttctattggtttctggctgcagtacgtggattagctctccgtttgttctatcctgtagattctgtccccaatctctgtcttgtcgtattaccacttctcccagcatacctgagcaccccaggtgactccccttactcaggaagcatgcttctaagttgggtacatctctgtcttggatctggagtctgtcttctgaattcttactgattttcatggatgttgggctttactttctgtatccttttcaatgtaaatgaaactctgaattgggatttggatctgcagagttttctctgttgctgagtggttgggtcttaaatgatgatagttaacacacttttgagtgttgtgttgtaccagacaatgtactaaacaccttatacacatatcattgaatccttacaacatcctttgagacagatacagtgttatgcacattttacagacaaagaaactcagtcaaagagaatgttgaataacagggccaagttcacacagctaatagtggacctagcttctctttgtaaaagaaggtagccacttatcattaactataaagcctggagaaccttagagg

SEQ ID NO: 446446 - DNA, 1655 bp, Homo sapiens
cagacagcgaatgaccgcagccagacagtcgctcttgctcttcctcggccctgcggcaggatccgccggtgcaggggcctctccccggactccacgcgtgtctggagggctctcgggttagggaagggggctttggagacgccccgggcggccgggcggtggcgggacgcgggccctttaagaaggagcgaggggcgcggccaggtaggggcgggtccagggcggatcagcgctgcgccggcgccggcccgggagccggatttggagcgcgaggcgccggtgggggcggagggggctgcgcggcggaggctcccgtggcctcggacgctcctcctagctagcggccgccgcccgccgccgcctgcgcctccagctccttcgccccggcgggcccggccgccgcttccggcagctcacctgggaagcgctcacctgggacgcgctcacctgggacgcgctacctgcctccgggcgcctgggcttcaggatgaaggaccgtctggagcagctgaaggccaagcagctgacacaggatgatgatactgatgcggttgagattgctatcgacaacacggcttttatggacgagttcttttctgagattgaggaaactcggcttaacattgacaagatctcagaacatgtagaggaggctaagaaactctacagtatcattctctctgcaccgattccagagccaaaaaccaaggatgacctagagcagctcacgactgagattaagaaaagggccaacaacgtccggaacaaactgaagagcatggagaagcatattgaagaagatgaggtcaggtcatcggcagaccttcggattcggaaatcccagcactctgtcctttctcggaagtttgtggaggtgatgaccaaatacaatgaagctcaagtggacttccgagaacgcagcaaagggcgaatccagcggcagctcgaaattactggcaaaaagacaaccgatgaggagctggaggagatgttggagagtggcaacccggccatcttcacttctgggatcattgactcacagatttccaagcaagccctcagtgagattgagggacgacacaaggacattgtgaggctggagagcagcatcaaggagcttcacgacatgtttatggacatcgccatgctggtggagaatcagggtgagatgttagataacatagagttgaatgtcatgcacacagtggaccacgtggagaaggcacgagatgaaacgaaaaaagctgtgaaataccagagtcaggcccggaagaaattgataattatcattgtgctagtagttgtgttgctgggcattttagcattgattattggactttccgttgggctgaattaagagtggcctaagaggctgctgcactgaaattgtgtctcttcttattcctcctccttccatgtgaccaggggatctaaaagtcagcttattacagcattgagcattcaacttcatcttgaaagataagcaacagtgagatgaacaacctctcatagacaggtggttggttgattttttttttcccctcttttttctggcacttggagtctagcccttgacttttttgtatgtgaactttaaattttggtttggctctgaacaatctgattgaaatagatgttgaaattttaaaaagaaa

SEQ ID NO: 446447 - DNA, 1603 bp, Homo sapiens
cagacagcgaatgaccgcagccagacagtcgctcttgctcttcctcggccctgcggcaggatccgccggtgcaggggcctctccccggactccacgcgtgtctggagggctctcgggttagggaagggggctttggagacgccccgggcggccgggcggtggcgggacgcgggccctttaagaaggagcgaggggcgcggccaggtaggggcgggtccagggcggatcagcgctgcgccggcgccggcccgggagccggatttggagcgcgaggcgccggtgggggcggagggggctgcgcggcggaggctcccgtggcctcggacgctcctcctagctagcggccgccgcccgccgccgcctgcgcctccagctccttcgccccggcgggcccggccgccgcttccggcagctcacctgggaagcgctcacctgggacgcgctcacctgggacgcgctacctgcctccgggcgcctgggcttcaggatgaaggaccgtctggagcagctgaaggccaagcagctgacacaggatgatgatactgatgcggttgagattgctatcgacaacacggcttttatggacgagttcttttctgagattgaggaaactcggcttaacattgacaagatctcagaacatgtagaggaggctaagaaactctacagtatcattctctctgcaccgattccagagccaaaaaccaaggatgacctagagcagctcacgactgagattaagaaaagggccaacaacgtccggaacaaactgaagagcatggagaagcatattgaagaagatgaggtcaggtcatcggcagaccttcggattcggaaatcccagcactctgtcctttctcggaagtttgtggaggtgatgaccaaatacaatgaagctcaagtggacttccgagaacgcagcaaagggcgaatccagcggcagctcgaaattactggcaaaaagacaaccgatgaggagctggaggagatgttggagagtggcaacccggccatcttcacttctgggatcattgactcacagatttccaagcaagccctcagtgagattgagggacgacacaaggacattgtgaggctggagagcagcatcaaggagcttcacgacatgtttatggacatcgccatgctggtggagaatcaggtaagtggcagtgagtcccagcgtggggagggaggagaggaaagctcagggtctactgagaacagggagaaagggaatactggaagccagtgaggtagggtgggagaaccattgggaatttgcataaaggagaaacagaatcccatgggaaagtgtgcattcaaattgaatgttgacactttgggtgatcttaaccttgtcattcttgcctgtcccttggccttgcagtcgttgctagttgatacagggtttgatgtgttctgtcaagtacccagttttcctggatttttgattttttttttttttttaagatggagtattgctctgttgcacaggctggagtgcagtggcgtgatcacagctcactgcagcttgacctcccaggatcaagcaatcctcccaggatttgtctttttttctttcttaaaaatcagagatccg

SEQ ID NO: 446448 - DNA, 1032 bp, Homo sapiens
cagacagcgaatgaccgcagccagacagtcgctcttgctcttcctcggccctgcggcaggatccgccggtgcaggggcctctccccggactccacgcgtgtctggagggctctcgggttagggaagggggctttggagacgccccgggcggccgggcggtggcgggacgcgggccctttaagaaggagcgaggggcgcggccaggtaggggcgggtccagggcggatcagcgctgcgccggcgccggcccgggagccggatttggagcgcgaggcgccggtgggggcggagggggctgcgcggcggaggctcccgtggcctcggacgctcctcctagctagcggccgccgcccgccgccgcctgcgcctccagctccttcgccccggcgggcccggccgccgcttccggcagctcacctgggaagcgctcacctgggacgcgctcacctgggacgcgctacctgcctccgggcgcctgggcttcaggatgaaggaccgtctggagcagctgaaggccaagcagctgacacaggatgatgatactgatgcggttgagattgctatcgacaacacggcttttatggacgagttcttttctgagattgaggaaactcggcttaacattgacaagatctcagaacatgtagaggaggctaagaaactctacagtatcattctctctgcaccgattccagagccaaaaaccaaggatgacctagagcagctcacgactgagattaagaaaagggccaacaacgtccggaacaaactgaagagtaagaagggaacaaagaaaacaaggccgtccccaccaccatctatctcagctcccctagggtccagctttccgaactgaaactcctcttgatggaagtgacaccacttggtccatctttgcttgtggtttgggctctgtccccgcaatgatccattgtagccccagaaatttaccttttcttaaatcctgactgtactggaaagagtccagaattgaagctaggagatgagaattaaaatgtgctttcagctgct

SEQ ID NO: 446449 - DNA, 3128 bp, Homo sapiens
cagacagcgaatgaccgcagccagacagtcgctcttgctcttcctcggccctgcggcaggatccgccggtgcaggggcctctccccggactccacgcgtgtctggagggctctcgggttagggaagggggctttggagacgccccgggcggccgggcggtggcgggacgcgggccctttaagaaggagcgaggggcgcggccaggtaggggcgggtccagggcggatcagcgctgcgccggcgccggcccgggagccggatttggagcgcgaggcgccggtgggggcggagggggctgcgcggcggaggctcccgtggcctcggacgctcctcctagctagcggccgccgcccgccgccgcctgcgcctccagctccttcgccccggcgggcccggccgccgcttccggcagctcacctgggaagcgctcacctgggacgcgctcacctgggacgcgctacctgcctccgggcgcctgggcttcaggatgaaggaccgtctggagcagctgaaggccaagcagctgacacaggatgatgatactgatgcggttgagattgctatcgacaacacggcttttatggacgagttcttttctgagattgaggaaactcggcttaacattgacaagatctcagaacatgtagaggaggctaagaaactctacagtatcattctctctgcaccgattccagagccaaaaaccaaggatgacctagagcagctcacgactgagattaagaaaagggccaacaacgtccggaacaaactgaagagcatggagaagcatattgaagaagatgaggtcaggtcatcggcagaccttcggattcggaaatcccagcactctgtcctttctcggaagtttgtggaggtgatgaccaaatacaatgaagctcaagtggacttccgagaacgcagcaaagggcgaatccagcggcagctcgaaattactggcaaaaagacaaccgatgaggagctggaggagatgttggagagtggcaacccggccatcttcacttctgggatcattgactcacagatttccaagcaagccctcagtgagattgagggacgacacaaggacattgtgaggctggagagcagcatcaaggagcttcacgacatgtttatggacatcgccatgctggtggagaatcagaaattgataattatcattgtgctagtagttgtgttgctgggcattttagcattgattattggactttccgttgggctgaattaagagtggcctaagaggctgctgcactgaaataaactgatttcactccagactggtgtggccacccttgtcttcagatgagaatggagtctgaatggccttcctgagagcgagtgcgacccgttcctttgtttccttgcaaccacccttggacctgactcagctaacaatctagccctgggggaatgtgatctacctgatgcgaccctgagttctccccagagcctcctcctgccccaccagctctcaagtaccttttctcctggactgtgtggacccacccagctttcttcctccctgttgtgtgtcagattatgccttgcacttgggaaagctcttgtgagactctcccaaggtgctgtatttttctacctcatggagtattctcccagaaactgcaatgtatttttttaggggagtatctttaacaaagcagaatgattcttctaagtttggcaacaagaaggcttggatctgagtcttctacctggcaggatgccaatcctgtttgttgtccgtatgtcctgaaaacatgagggactggcagatgtcattttggtctaaagagctgacttgtttgaaattcagccttaaattaagctcttagttgttcagcttggggggcaactttgatttttctctgtgttgtagtctctcatatttactcaaggagggaccaggatgatacagtcatctgaggttatgctttgcaaaaggctgacggtatggaatatgtttccatgtctgagtcttagaaactggctgctcattgttagaaagtgatgctttgtgagactattgtcttggggccaaaaataatcagggattttaaattgggcaagggacaaggtgctagaatcctaagctctggaaatatttcatgacactggtgtattcactcatgtgttccagatgtattctaattgtgtatgaaatgtatgtacacataagtgtgtgtgtctcaggaagtaggaaataaaaatggaagctattatgacctcaaaaaaaaaaagccaactttgagctaggataaaaattgggtaaaggacatttgcttacctgcaaatgaatcactgtggaaatgtgatcttcccatatcatcaagaaacttgttttctggatgaatactgggagaataaaatgagaactctggagtgagctaaattgatcccaattaagtttttctgcttagcagacagaaggtataattttttgacaccctttcccacctggtgcctatgctaggcttgtcctgagaacatccctcagtaacttgatattcacatgacctacaggatgtcccatctgcagggctgagtcagttggggaacaccagaggctacacagtagctcttcctgctactcggttaatgagcttggcaggttctttgtctcactgaattcttatcatggaaacagcagcagcagccgctaggaaatcttcaagtgtagtgtctgtgctaacccagtggtaaatcccttagatcccctgctggtctctggcagtctccttgattttgggtaccatgtatattttccgctttgactttaacgctttctaggatagggtaagcacccttaattcaggcactgtccattagcttcctttgcaaaggctacttatggccggtcacaatccagcactcagacagagccaaggcaatatcctcttgcccatggctatgatgtcagacagtggatgggctccagcaacaagagacaaaataactaaaggcctttgctctcctctgacattgaggcctggggcttacagtttggaatacaacatgtgaaggtttttgttgttgtttgtattttttagatgtaaacttgattattttattgctaatttaaaaataaaaatgactttgtattgattgtgaaa

SEQ ID NO: 446450 - DNA, 3095 bp, Homo sapiens
  misc_feature (3066)..(3066): n is a, c, g, or t
cagacagcgaatgaccgcagccagacagtcgctcttgctcttcctcggccctgcggcaggatccgccggtgcaggggcctctccccggactccacgcgtgtctggagggctctcgggttagggaagggggctttggagacgccccgggcggccgggcggtggcgggacgcgggccctttaagaaggagcgaggggcgcggccaggtaggggcgggtccagggcggatcagcgctgcgccggcgccggcccgggagccggatttggagcgcgaggcgccggtgggggcggagggggctgcgcggcggaggctcccgtggcctcggacgctcctcctagctagcggccgccgcccgccgccgcctgcgcctccagctccttcgccccggcgggcccggccgccgcttccggcagctcacctgggaagcgctcacctgggacgcgctcacctgggacgcgctacctgcctccgggcgcctgggcttcaggatgaaggaccgtctggagcagctgaaggccaagcagctgacacaggatgatgatactgatgcggttgagattgctatcgacaacacggcttttatggacgagttcttttctgagattgaggaaactcggcttaacattgacaagatctcagaacatgtagaggaggctaagaaactctacagtatcattctctctgcaccgattccagagccaaaaaccaaggatgacctagagcagctcacgactgagattaagaaaagggccaacaacgtccggaacaaactgaagagcatggagaagcatattgaagaagatgaggtcaggtcatcggcagaccttcggattcggaaatcccagcactctgtcctttctcggaagtttgtggaggtgatgaccaaatacaatgaagctcaagtggacttccgagaacgcagcaaagggcgaatccagcggcagctcgaaattactggcaaaaagacaaccgatgaggagctggaggagatgttggagagtggcaacccggccatcttcacttctgggatcattgactcacagatttccaagcaagccctcagtgagattgagggacgacacaaggacattgtgaggctggagagcagcatcaaggagcttcacgacatgtttatggacatcgccatgctggtggagaatcagggtgagatgttagataacatagagttgaatgtcatgcacacagtggaccacgtggagaaggcacgagatgaaacgaaaaaagctgtgaaataccagagtcaggcccggaagaaattgataattatcattgtgctagtagttgtgttgctgggcattttagcattgattattggactttccgttgggctgaattaagagtggcctaagaggctgctgcactgaaataaactgatttcactccagactggtgtggccacccttgtcttcagatgagaatggagtctgaatggccttcctgagagcgagtgcgacccgttcctttgtttccttgcaaccacccttggacctgactcagctaacaatctagccctgggggaatgtgatctacctgatgcgaccctgagttctccccagagcctcctcctgccccaccagctctcaagtaccttttctcctggactgtgtggacccacccagctttcttcctccctgttgtgtgtcagattatgccttgcacttgggaaagctcttgtgagactctcccaaggtgctgtatttttctacctcatggagtattctcccagaaactgcaatgtatttttttaggggagtatctttaacaaagcagaatgattcttctaagtttggcaacaagaaggcttggatctgagtcttctacctggcaggatgccaatcctgtttgttgtccgtatgtcctgaaaacatgagggactggcagatgtcattttggtctaaagagctgacttgtttgaaattcagccttaaattaagctcttagttgttcagcttggggggcaactttgatttttctctgtgttgtagtctctcatatttactcaaggagggaccaggatgatacagtcatctgaggttatgctttgcaaaaggctgacggtatggaatatgtttccatgtctgagtcttagaaactggctgctcattgttagaaagtgatgctttgtgagactattgtcttggggccaaaaataatcagggattttaaattgggcaagggacaaggtgctagaatcctaagctctggaaatatttcatgacactggtgtattcactcatgtgttccagatgtattctaattgtgtatgaaatgtatgtacacataagtgtgtgtgtctcaggaagtaggaaataaaaatggaagctattatgacctcaaaaaaaaaaagccaactttgagctaggataaaaattgggtaaaggacatttgcttacctgcaaatgaatcactgtggaaatgtgatcttcccatatcatcaagaaacttgttttctggatgaatactgggagaataaaatgagaactctggagtgagctaaattgatcccaattaagtttttctgcttagcagacagaaggtataattttttgacaccctttcccacctggtgcctatgctaggcttgtcctgagaacatccctcagtaacttgatattcacatgacctacaggatgtcccatctgcagggctgagtcagttggggaacaccagaggctacacagtagctcttcctgctactcggttaatgagcttggcaggttctttgtctcactgaattcttatcatggaaacagcagcagcagccgctaggaaatcttcaagtgtagtgtctgtgctaacccagtggtaaatcccttagatcccctgctggtctctggcagtctccttgattttgggtaccatgtatattttccgctttgactttaacgctttctaggatagggtaagcacccttaattcaggcactgtccattagcttcctttgcaaaggctacttatggccggtcacaatccagcactcagacagagccaaggcaatatcctcttgcccatggctatgatgtcagacagtggatgggctcctatnagtcctcttgcgtttgggggatccgcagt

SEQ ID NO: 446451 - DNA, 3004 bp, Homo sapiens
cagacagcgaatgaccgcagccagacagtcgctcttgctcttcctcggccctgcggcaggatccgccggtgcaggggcctctccccggactccacgcgtgtctggagggctctcgggttagggaagggggctttggagacgccccgggcggccgggcggtggcgggacgcgggccctttaagaaggagcgaggggcgcggccaggtaggggcgggtccagggcggatcagcgctgcgccggcgccggcccgggagccggatttggagcgcgaggcgccggtgggggcggagggggctgcgcggcggaggctcccgtggcctcggacgctcctcctagctagcggccgccgcccgccgccgcctgcgcctccagctccttcgccccggcgggcccggccgccgcttccggcagctcacctgggaagcgctcacctgggacgcgctcacctgggacgcgctacctgcctccgggcgcctgggcttcaggatgaaggaccgtctggagcagctgaaggccaagcagctgacacaggatgatgatactgatgcggttgagattgctatcgacaacacggcttttatggacgagttcttttctgagattgaggaaactcggcttaacattgacaagatctcagaacatgtagaggaggctaagaaactctacagtatcattctctctgcaccgattccagagccaaaaaccaaggatgacctagagcagctcacgactgagattaagaaaagggccaacaacgtccggaacaaactgaagagcatggagaagcatattgaagaagatgaggtcaggtcatcggcagaccttcggattcggaaatcccagcactctgtcctttctcggaagtttgtggaggtgatgaccaaatacaatgaagctcaagtggacttccgagaacgcagcaaagggcgaatccagcggcagctcgaaattactggcaaaaagacaaccgatgaggagctggaggagatgttggagagtggcaacccggccatcttcacttctgggatcattgactcacagatttccaagcaagccctcagtgagattgagggacgacacaaggacattgtgaggctggagagcagcatcaaggagcttcacgacatgtttatggacatcgccatgctggtggagaatcagggtgagatgttagataacatagagttgaatgtcatgcacacagtggaccacgtggagaaggcacgagatgaaacgaaaaaagctgtgaaataccagagtcaggcccggaagaaattgataattatcattgtgctagtagttgtgttgctgggcattttagcattgattattggactttccgttgggctgaattaagagtggcctaagaggctgctgcactgaaataaactgatttcactccagactggtgtggccacccttgtcttcagatgagaatggagtctgaatggccttcctgagagcgagtgcgacccgttcctttgtttccttgcaaccacccttggacctgactcagctaacaatctagccctgggggaatgtgatctacctgatgcgaccctgagttctccccagagcctcctcctgccccaccagctctcaagtaccttttctcctggactgtgtggacccacccagctttcttcctccctgttgtgtgtcagattatgccttgcacttgggaaagctcttgtgagactctcccaaggtgctgtatttttctacctcatggagtattctcccagaaactgcaatgtatttttttaggggagtatctttaacaaagcagaatgattcttctaagtttggcaacaagaaggcttggatctgagtcttctacctggcaggatgccaatcctgtttgttgtccgtatgtcctgaaaacatgagggactggcagatgtcattttggtctaaagagctgacttgtttgaaattcagccttaaattaagctcttagttgttcagcttggggggcaactttgatttttctctgtgttgtagtctctcatatttactcaaggagggaccaggatgatacagtcatctgaggttatgctttgcaaaaggctgacggtatggaatatgtttccatgtctgagtcttagaaactggctgctcattgttagaaagtgatgctttgtgagactattgtcttggggccaaaaataatcagggattttaaattgggcaagggacaaggtgctagaatcctaagctctggaaatatttcatgacactggtgtattcactcatgtgttccagatgtattctaattgtgtatgaaatgtatgtacacataagtgtgtgtgtctcaggaagtaggaaataaaaatggaagctattatgacctcaaaaaaaaaaagccaactttgagctaggataaaaattgggtaaaggacatttgcttacctgcaaatgaatcactgtggaaatgtgatcttcccatatcatcaagaaacttgttttctggatgaatactgggagaataaaatgagaactctggagtgagctaaattgatcccaattaagtttttctgcttagcagacagaaggtataattttttgacaccctttcccacctggtgcctatgctaggcttgtcctgagaacatccctcagtaacttgatattcacatgacctacaggatgtcccatctgcagggctgagtcagttggggaacaccagaggctacacagtagctcttcctgctactcggttaatgagcttggcaggttctttgtctcactgaattcttatcatggaaacagcagcagcagccgctaggaaatcttcaagtgtagtgtctgtgctaacccagtggtaaatcccttagatcccctgctggtctctggcagtctccttgaggtcggtgtaaaagcataggccactcttagaccatgacgctttctaggacaggggatgctccagtcaatcaggtcacattccattagtgtactgagcgatggtcggaatggccggttacgcgccaacattctgcc

SEQ ID NO: 446452 - DNA, 1689 bp, Homo sapiens
cagacagcgaatgaccgcagccagacagtcgctcttgctcttcctcggccctgcggcaggatccgccggtgcaggggcctctccccggactccacgcgtgtctggagggctctcgggttagggaagggggctttggagacgccccgggcggccgggcggtggcgggacgcgggccctttaagaaggagcgaggggcgcggccaggtaggggcgggtccagggcggatcagcgctgcgccggcgccggcccgggagccggatttggagcgcgaggcgccggtgggggcggagggggctgcgcggcggaggctcccgtggcctcggacgctcctcctagctagcggccgccgcccgccgccgcctgcgcctccagctccttcgccccggcgggcccggccgccgcttccggcagctcacctgggaagcgctcacctgggacgcgctcacctgggacgcgctacctgcctccgggcgcctgggcttcaggatgaaggaccgtctggagcagctgaaggccaagcagctgacacaggatgatgatactgatgcggttgagattgctatcgacaacacggcttttatggacgagttcttttctgagattgaggaaactcggcttaacattgacaagatctcagaacatgtagaggaggctaagaaactctacagtatcattctctctgcaccgattccagagccaaaaaccaaggatgacctagagcagctcacgactgagattaagaaaagggccaacaacgtccggaacaaactgaagagcatggagaagcatattgaagaagatgaggtcaggtcatcggcagaccttcggattcggaaatcccagcactctgtcctttctcggaagtttgtggaggtgatgaccaaatacaatgaagctcaagtggacttccgagaacgcagcaaagggcgaatccagcggcagctcgaaattactggcaaaaagacaaccgatgaggagctggaggagatgttggagagtggcaacccggccatcttcacttctgggatcattgactcacagatttccaagcaagccctcagtgagattgagggacgacacaaggacattgtgaggctggagagcagcatcaaggagcttcacgacatgtttatggacatcgccatgctggtggagaatcagggtgagatgttagataacatagagttgaatgtcatgcacacagtggaccacgtggagaaggcacgagatgaaacgaaaaaagctgtgaaataccagagtcaggcccggaagaaattgataattatcattgtgctagtagttgtgttgctgggcattttagcattgattattggactttccgttgggctgaattaagagtggcctaagaggctgctgcactgaaataaactgatttcactccagactggtgtggccacccttgtcttcagatgagaatggagtctgaatggccttcctgagagcgagtgcgacccgttcctttgtttccttgcaaccacccttggacctgactcagctaacaatctagccctgggggaatgtgatctacctgaccagttcctgcttcttgaaaactgacttctcaatctctggaagttgggggttttgttgtggcaatttgcttgtgttgttttttaatgtggactgcgagaaacaggggcagttgaggtcatgttgaaatctgctgt

SEQ ID NO: 446453 - DNA, 1544 bp, Homo sapiens
cagacagcgaatgaccgcagccagacagtcgctcttgctcttcctcggccctgcggcaggatccgccggtgcaggggcctctccccggactccacgcgtgtctggagggctctcgggttagggaagggggctttggagacgccccgggcggccgggcggtggcgggacgcgggccctttaagaaggagcgaggggcgcggccaggtaggggcgggtccagggcggatcagcgctgcgccggcgccggcccgggagccggatttggagcgcgaggcgccggtgggggcggagggggctgcgcggcggaggctcccgtggcctcggacgctcctcctagctagcggccgccgcccgccgccgcctgcgcctccagctccttcgccccggcgggcccggccgccgcttccggcagctcacctgggaagcgctcacctgggacgcgctcacctgggacgcgctacctgcctccgggcgcctgggcttcaggatgaaggaccgtctggagcagctgaaggccaagcagctgacacaggatgatgatactgatgcggttgagattgctatcgacaacacggcttttatggacgagttcttttctgagattgaggaaactcggcttaacattgacaagatctcagaacatgtagaggaggctaagaaactctacagtatcattctctctgcaccgattccagagccaaaaaccaaggatgacctagagcagctcacgactgagattaagaaaagggccaacaacgtccggaacaaactgaagagcatggagaagcatattgaagaagatgaggtcaggtcatcggcagaccttcggattcggaaatcccagcactctgtcctttctcggaagtttgtggaggtgatgaccaaatacaatgaagctcaagtggacttccgagaacgcagcaaagggcgaatccagcggcagctcgaaattactggcaaaaagacaaccgatgaggagctggaggagatgttggagagtggcaacccggccatcttcacttctgggatcattgactcacagatttccaagcaagccctcagtgagattgagggacgacacaaggacattgtgaggctggagagcagcatcaaggagcttcacgacatgtttatggacatcgccatgctggtggagaatcagaaattgataattatcattgtgctagtagttgtgttgctgggcattttagcattgattattggactttccgttgggctgaattaagagtggcctaagaggctgctgcactgaaattgtgtctcttcttattcctcctccttccatgtgaccaggggatctaaaagtcagcttattacagcattgagcattcaacttcatcttgaaagataagcaacagtgagatgaacaacctctcatagacaggtggttggttgattttttttttcccctcttttttctggcacttggagtctagcccttgacttttttgtatgtgaactttaaattttggtttggctctgaacaatctgattgaaatagatgttgaaattttaaaaagaaa

SEQ ID NO: 446454 - DNA, 660 bp, Homo sapiens
cagctctacggcggccgcgcgctccaggccggtcgctccaccccccggctcccgggactgtggactccacgaccctgtcctcggccctgtccgcgccgaagcagcccgggactgcgcagcgccccgcgtgccggtgagcgaccccggacgtgcagtccccaggtccccttccggagcgaggctgagcggctgcgccgcggcttgagccgggcctgacaaggaggggaggccgctggggtgctgggccagccgcaggtacggcggcggtcagggctggtgatcgagttgctgtgtcgcctctaatgaggcccagccagggaacactcggcttcggcccaagccctacctctgggttgcctctaggccctcacaccttgagcgccaggtggccctcttccttttgctgttgatgaatgttcttgccgtggtgccgggatcttattttgcagctttacagagtaggctttgtgctaggtgttgtttatggagcttttcaaaggcgcttgtttccttagttctcaagcccttttagaactaaaaccagtgtctacacagaagatcaggagccatttaaattggagtgctgtgatatattttttctctccaaactgagtctgatatccatgttgactttcagtaaactaaggaaccgctataata

SEQ ID NO: 446455 - DNA, 533 bp, Homo sapiens
aaaaataaaattctgagccccccaactaagtggaacccgcttctctgtcaagggcattccaaagtaaacctaaaaaggtagttcaggccatgatgaaaaggtgggtggaggggattgaacatgccccgttgtaccttcctctctttggaattcaggcacaactgaccagcatcaattaaaacagagatttgaagactaacaagagtctctttgtagcaataagatatcaaatcccaacctgactctaatatagaatcactcgacagatagcaggccctgagagaaattgaaatatcttaccccaaattctgtacagaatcccctttcctttccagatcttttcctaattcagcagcgatttaaccaagagcctggaatattttaaggagtaataagagacatttacaaactattctctctgaagcctgctacctggaggcatcatctagataatcagaaccttggcttccacatcctcctcccttgtcttaactacaaacatttctttctgctgacttcaactcctcaggtag

SEQ ID NO: 446456 - DNA, 325 bp, Homo sapiens
  misc_feature (7)..(7): n is a, c, g, or t
  misc_feature (62)..(62): n is a, c, g, or t
gaaattnttggagagaatagtcatacctactttaaaagagaataaattgcctttcctaaatncctctgcttcgctcctttcctggcgttgctctggaaccttgtgagttatatgtatgatttctgtactctgatatccatcaaagtgcataacatagtactcatgatgcagtaagtacaaatcttttttgaaagagattttgcttgttaacattttggatttataacattggcttataatatacacaacatctttataaatgccacctcagttgggttttaagccttacaagagtgctatgagtaaatatcacccactttaaaaa

SEQ ID NO: 446457 - DNA, 331 bp, Homo sapiens
cagctctacggcggccgcgcgctccaggccggtcgctccaccccccggctcccgggactgtggactccacgaccctgtcctcggccctgtccgcgccgaagcagcccgggactgcgcagcgccccgcgtgccgatcttttcctaattcagcagcgatttaaccaagagcctggaatattttaaggagtaataagagacatttacaaactattctctctgaagcctgctacctggaggcatcatctagataatcagaaccttggcttccacatcctcctcccttgtcttaactacaaacatttctttctgctgacttcaactcctcaggtag

SEQ ID NO: 446458 - DNA, 6299 bp, Homo sapiens
cagctctacggcggccgcgcgctccaggccggtcgctccaccccccggctcccgggactgtggactccacgaccctgtcctcggccctgtccgcgccgaagcagcccgggactgcgcagcgccccgcgtgccgacatgggaaagtctctttctcatttgcctttgcattcaagcaaagaagatgcttatgatggagtcacatctgaaaacatgaggaatggactggttaatagtgaagtccataatgaagatggaagaaatggagatgtctctcagtttccatatgtggaatttacaggaagagatagtgtcacctgccctacttgtcagggaacaggaagaattcctagggggcaagaaaaccaactggtggcattgattccatatagtgatcagagattaaggccaagaagaacaaagctgtatgtgatggcttctgtgtttgtctgtctactcctttctggattggctgtgtttttccttttccctcgctctatcgacgtgaaatacattggtgtaaaatcagcctatgtcagttatgatgttcagaagcgtacaatttatttaaatatcacaaacacactaaatataacaaacaataactattactctgtcgaagttgaaaacatcactgcccaagttcaattttcaaaaacagttattggaaaggcacgcttaaacaacataaccattattggtccacttgatatgaaacaaattgattacacagtacctaccgttatagcagaggaaatgagttatatgtatgatttctgtactctgatatccatcaaagtgcataacatagtactcatgatgcaagttactgtgacaacaacatactttggccactctgaacagatatcccaggagaggtatcagtatgtcgactgtggaagaaacacaacttatcagttggggcagtctgaatatttaaatgtacttcagccacaacagtaaaaactggaagagatggatttaaagaagaaatatctattgatatttcctatactctcaatgaagaggtatttcctaataggagaccttaaattgaacaaacctaaagtttacacttctaagagtacagttaaaagtatgtggacctgcagttcttgtaactctccactctgtgttaatgatatatttgtactaggatcttttacttgaatctaaatttactggttgatttccttctccagcctatcccctacagggaaaagctgatacttcccctatagtacaataaataattatttaaaagtcatagctccagtcactactgaaaacataattttggtgataaacataatttgagaaacttaatttctgaatgtttttatagaaaattactgaaaatctattactcatggaagacttttaaagaataaccttttttcctgttttataaattcccattgttatatggtagtatttcagctacacaatattttagcttttagctagacatttataggttttcatttgttgaaatggtaatcatctgcatgtttttgtcacttatttcaggttagtgattgcctaacacttataagccaaaataatctttgcaaaattccatacctaaaattttgaaagcccctaatgttttcacacatctttctgtattagttatagttttgtgaaatctttgtgtgatcttcaaacattatcatttaatgtacaatactgtaaataaactgtgcatggcttttatacagctttagtaaatgtcaaataaagtggtacagactcattacaacaagtttctcataaaaatacaataaataggaaaatgaaattcagaaacccatagactgggaataggttccagttacagcttggatctggcataaaataaatttgaaataaaatattttgatgctccatttttttatgttgcttttcatactaaagaatggtgtagacttgttttgcaactgttaggtacccagttatcaattttatcaatgttttagaggaggaaattatttttttggtagaaattgttcaagaaatccttaattgaatgtcattaaatgatggtggccaaaataaaacctatttagaaatttaatcactttgcacatcacttggaatatgatgcctctagtagttacttttttatagttttctacttttggttttatttaaaattgttttcaaatatagattattgacttattcaactttgctgttttatattttcagtatcatttttcatttgttttttttttttttgtcttttcacttaccaagttctagggacatttaaaatatgtactaagtgtaggagtggttatgataccaaaaaatgtagctgggttgagattaatttcgttctgttttctcatgacagaaatcaggtttccctttccccacccctaagtgcctaacttaggtctgaaacagcctgtttattagtctgactctctcaaccataaaacataagctttatttaattctgcctttaaacacactcaggtttccccttaattttcatattattttctgcaagttttcttgagtatcttcaattcgttgaatgtggtttttggtttttttttgttttaacactagtcttcccttaattcattgctaactcaagccatccttactattaaacccaaatcagtcctttaagttcattatggcctttctagtatttaaaaaaaaaaaaatcattttcatttttcttctgctacgtttcctgactactactgcatacttctctgatacaggttctgtttgtattttttatatcattctcattttctcatttgacatgatctatgtctatatatgatataggtccccttttgtctcaaaatttttaattatgtgacttcaaaaatcacctgtatctgtagtagggcttccaaatctgcttctccatatgtgaccagtcacctgtctgctttcacatttagctagtgaactacacatttactaaaatgtgtaaattttacacatttagtgactgtgtaaaataaaaaaaaagttattttatcatatcctttctattatgttcccatcctgtcctcatgtcccatttactttattatcaccattcatttcttcaaaattatcttttagatacgctcatacaaaaatcaatccttgttttcttgcttgtgtcttttaaccttggaaaattacatcgtgtaaattaaacagatttttctgatgatctgtgcttcttatatactattagagtgcatgatagtatctcctgaaaaggatggaaagtagaagcatttgcttttagtcacttaattttgaatcttttttcttcatcttttgaattaattttttttattatatctacttttagtggagtttgagtcagaaaaaaacaagaatttgaaacaagtaaaaagatagaagagaaataaagatggtatgtgactactttcagagagagttaagtaactgtcagaataagcctggaacaaaacaggctgtaaattaataaaactacaaacacacattcaggtgaagcagaagtatagccataaaacatctagaaagagtgaatgaggcttttagcttttcttaggtcaatgtccagtgtgcttttttccatgggaataggataggtattaatacgcttttctaaactgctctcagaccttatccagaggacatggtaaagatatgttacagaaatttttctgatacttcctggaataactttaagttacaccctagtagactggtcattctaataaaatccagtactataacaaacctctgtatgttgatagcacattggccctttttagagttctttcctatgtttttcttacgtgatttcccacagttccatgagtccaacaaaggagagtgataggctccttatcttttagaagaggaaggaaaggcatgaagaagttgagggactggctgaagatcacgtacttactaagtagtacaactggagcaagatcaagtatctctgtctcccatatctgtgttctatcatttaaaatatatattggaaatccctgctgactcagattggtatgattaaaaatgagaggaaagttcaaatagttagtagtgacaaactaatactgctggactaagattttggtagcattgttttctaaaatattttaaatggagaatgaacacttataaaatgctttggaacataatctttagcttaattttctgttaaaatttagtaccccttcatcattccaataaagataagactgatccattgtctaaggaaattatttataaataatagagattaatttatttgagatttgaaataagaatagtatgaaaatattagataccacataaattgtttgaaattactgaataaccatcttaagtatggaacatttaaatggctatattttatttgtgtacagtttttctgtgccttgttaggccagtgaagcaattattttctctaagaaaatgacaataaaatataacacacttcagattgtctgatttacagtttggaaaggacaccgcaatgttcaaataggtaggagaccatcaaaaacacaattaaagtaacatattaggagacttgaaacttcagcctaataaatccttcatggttcttagccttattattgtgatataattctagatattttcttggagggcatgtgcccaactctcccgcaccccattttgtttgtcttttaaagttcttagaataaacagttctttatataataattatattttatttaagaaaatagtttgttaggtactttttaaaagatgtaaatttttaaatttacaaatacatatgggtctttgataagcaataggaattgaattacaagttactagggttataagcaaaaggttgcttaccataatgtcattaggtcacgatttttagctcacatctggaagcagcaactacttggctcaagtacatataagagtaattagttttattctctcttttttataaaatcgggtttcagatgagatgtttatcttagactattttagggaaaaattttacatgtttgagatggtggagtaaaaagactgttaaacatttcttttaaaaaattatttttacattacaacaatatatttatgatgtgttcagatcaaaaatttaacttctgtgtcccagatctactttcaaagtgagattttcacttgtcagcttaaatttctgactagaactaacgtttgtgtatttttgtgcttagtcggaatacaaatttcacagtggatttttgaagtttgtccttaaattggataaaatcaagtgattaaagttactaaagagataaaaatggtaatttccatttttaaaagtaatttggttgtgtttatagttatttgtacaagtatttatcacagactctaaattgaaaaatatagtatgatctatatttgaccctaaaaatgttggattaatttaacaaatatggcagatttttcataactaagtcttaagtcttctaaaaggaagctgttacccttctgtttttaattacattaattgaaatgtgttttaagagatacaatttcagcatattttatatattaaaaaacaaaaaaggattagtattgagccagtggccaaaaggtaatattactaccatgtagactgttatagttcaaattgtcccacttcacccagaattttagaaactagaagtctgggaggtactatatcagctgtagttgggtaattccaagtgctgatagtactattcatcttttttattattgtgtcagatgaaacaaatgccaagttgcaaaatatgcagatttttattatataatggttttaggcataaattattaacaagccatgccttatgtgtttcatcttatatttttctttagaactaaactataacagattttggaaaatgatttgacgtgcttgctcacttgattgacttggtcagatatttgaatgatggtattacctagattctaatccttgattctagttatataataaataatatagaatatgaaaatatgtttgggcatttactgtttatattatgtagtagcctccatcatgacacacttactacatttatgaattgagcagttctgtaattgtaattattattgctgttcatgtaacaaaacatgcttatgataatagcaaacaaatagaaatgcccccaaaatgctatttttttaattcagttataactgttactcttgtagttgtgtatgacgcaataaaatttgtaaaaaaatttcagcatgaaaaataaaatttgtatccctcaatcgacgccggtcgacgatatgccaaactgcggggccgtacagccttg

SEQ ID NO: 446459 - DNA, 5708 bp, Homo sapiens
cagctctacggcggccgcgcgctccaggccggtcgctccaccccccggctcccgggactgtggactccacgaccctgtcctcggccctgtccgcgccgaagcagcccgggactgcgcagcgccccgcgtgccgacatgggaaagtctctttctcatttgcctttgcattcaagcaaagaagatgcttatgatggagtcacatctgaaaacatgaggaatggactggttaatagtgaagtccataatgaagatggaagaaatggagatgtctctcagtttccatatgtggaatttacaggaagagatagtgtcacctgccctacttgtcagggaacaggaagaattcctagggggcaagaaaaccaactggtggcattgattccatatagtgatcagagattaaggccaagaagaacaaagctgtatgtgatggcttctgtgtttgtctgtctactcctttctggattggctgtgtttttccttttccctcgctctatcgacgtgaaatacattggtgtaaaatcagcctatgtcagttatgatgttcagaagcgtacaatttatttaaatatcacaaacacactaaatataacaaacaataactattactctgtcgaagttgaaaacatcactgcccaagttcaattttcaaaaacagttattggaaaggcacgcttaaacaacataaccattattggtccacttgatatgaaacaaattgattacacagtacctaccgttatagcagaggaaatgagttatatgtatgatttctgtactctgatatccatcaaagtgcataacatagtactcatgatgcaagttactgtgacaacaacatactttggccactctgaacagatatcccaggagaggtatcagtatgtcgactgtggaagaaacacaacttatcagttggggcagtctgaatatttaaatgtacttcagccacaacagtaaaaactggaagagatggatttaaagaagaaatatctattgatatttcctatactctcaatgaagaggtatttcctaataggagaccttaaattgaacaaacctaaagtttacacttctaagagtacagttaaaagtatgtggacctgcagttcttgtaactctccactctgtgttaatgatatatttgtactaggatcttttacttgaatctaaatttactggttgatttccttctccagcctatcccctacagggaaaagctgatacttcccctatagtacaataaataattatttaaaagtcatagctccagtcactactgaaaacataattttggtgataaacataatttgagaaacttaatttctgaatgtttttatagaaaattactgaaaatctattactcatggaagacttttaaagaataaccttttttcctgttttataaattcccattgttatatggtagtatttcagctacacaatattttagcttttagctagacatttataggttttcatttgttgaaatggtaatcatctgcatgtttttgtcacttatttcaggttagtgattgcctaacacttataagccaaaataatctttgcaaaattccatacctaaaattttgaaagcccctaatgttttcacacatctttctgtattagttatagttttgtgaaatctttgtgtgatcttcaaacattatcatttaatgtacaatactgtaaataaactgtgcatggcttttatacagctttagtaaatgtcaaataaagtggtacagactcattacaacaagtttctcataaaaatacaataaataggaaaatgaaattcagaaacccatagactgggaataggttccagttacagcttggatctggcataaaataaatttgaaataaaatattttgatgctccatttttttatgttgcttttcatactaaagaatggtgtagacttgttttgcaactgttaggtacccagttatcaattttatcaatgttttagaggaggaaattatttttttggtagaaattgttcaagaaatccttaattgaatgtcattaaatgatggtggccaaaataaaacctatttagaaatttaatcactttgcacatcacttggaatatgatgcctctagtagttacttttttatagttttctacttttggttttatttaaaattgttttcaaatatagattattgacttattcaactttgctgttttatattttcagtatcatttttcatttgttttttttttttttgtcttttcacttaccaagttctagggacatttaaaatatgtactaagtgtaggagtggttatgataccaaaaaatgtagctgggttgagattaatttcgttctgttttctcatgacagaaatcaggtttccctttccccacccctaagtgcctaacttaggtctgaaacagcctgtttattagtctgactctctcaaccataaaacataagctttatttaattctgcctttaaacacactcaggtttccccttaattttcatattattttctgcaagttttcttgagtatcttcaattcgttgaatgtggtttttggtttttttttgttttaacactagtcttcccttaattcattgctaactcaagccatccttactattaaacccaaatcagtcctttaagttcattatggcctttctagtatttaaaaaaaaaaaaatcattttcatttttcttctgctacgtttcctgactactactgcatacttctctgatacaggttctgtttgtattttttatatcattctcattttctcatttgacatgatctatgtctatatatgatataggtccccttttgtctcaaaatttttaattatgtgacttcaaaaatcacctgtatctgtagtagggcttccaaatctgcttctccatatgtgaccagtcacctgtctgctttcacatttagctagtgaactacacatttactaaaatgtgtaaattttacacatttagtgactgtgtaaaataaaaaaaaagttattttatcatatcctttctattatgttcccatcctgtcctcatgtcccatttactttattatcaccattcatttcttcaaaattatcttttagatacgctcatacaaaaatcaatccttgttttcttgcttgtgtcttttaaccttggaaaattacatcgtgtaaattaaacagatttttctgatgatctgtgcttcttatatactattagagtgcatgatagtatctcctgaaaaggatggaaagtagaagcatttgcttttagtcacttaattttgaatcttttttcttcatcttttgaattaattttttttattatatctacttttagtggagtttgagtcagaaaaaaacaagaatttgaaacaagtaaaaagatagaagagaaataaagatggtatgtgactactttcagagagagttaagtaactgtcagaataagcctggaacaaaacaggctgtaaattaataaaactacaaacacacattcaggtgaagcagaagtatagccataaaacatctagaaagagtgaatgaggcttttagcttttcttaggtcaatgtccagtgtgcttttttccatgggaataggataggtattaatacgcttttctaaactgctctcagaccttatccagaggacatggtaaagatatgttacagaaatttttctgatacttcctggaataactttaagttacaccctagtagactggtcattctaataaaatccagtactataacaaacctctgtatgttgatagcacattggccctttttagagttctttcctatgtttttcttacgtgatttcccacagttccatgagtccaacaaaggagagtgataggctccttatcttttagaagaggaaggaaaggcatgaagaagttgagggactggctgaagatcacgtacttactaagtagtacaactggagcaagatcaagtatctctgtctcccatatctgtgttctatcatttaaaatatatattggaaatccctgctgactcagattggtatgattaaaaatgagaggaaagttcaaatagttagtagtgacaaactaatactgctggactaagattttggtagcattgttttctaaaatattttaaatggagaatgaacacttataaaatgctttggaacataatctttagcttaattttctgttaaaatttagtaccccttcatcattccaataaagataagactgatccattgtctaaggaaattatttataaataatagagattaatttatttgagatttgaaataagaatagtatgaaaatattagataccacataaattgtttgaaattactgaataaccatcttaagtatggaacatttaaatggctatattttatttgtgtacagtttttctgtgccttgttaggccagtgaagcaattattttctctaagaaaatgacaataaaatataacacacttcagattgtctgatttacagtttggaaaggacaccgcaatgttcaaataggtaggagaccatcaaaaacacaattaaagtaacatattaggagacttgaaacttcagcctaataaatccttcatggttcttagccttattattgtgatataattctagatattttcttggagggcatgtgcccaactctcccgcaccccattttgtttgtcttttaaagttcttagaataaacagttctttatataataattatattttatttaagaaaatagtttgttaggtactttttaaaagatgtaaatttttaaatttacaaatacatatgggtctttgataagcaataggaattgaattacaagttactagggttataagcaaaaggttgcttaccataatgtcattaggtcacgatttttagctcacatctggaagcagcaactacttggctcaagtacatataagagtaattagttttattctctcttttttataaaatcgggtttcagatgagatgtttatcttagactattttagggaaaaattttacatgtttgagatggtggagtaaaaagactgttaaacatttcttttaaaaaattatttttacattacaacaatatatttatgatgtgttcagatcaaaaatttaacttctgtgtcccagatctactttcaaagtgagattttcacttgtcagcttaaatttctgactagaactaacgtttgtgtatttttgtgcttagtcggaatacaaatttcacagtggatttttgaagtttgtccttaaattggataaaatcaagtgattaaagttactaaagagataaaaatggtaatttccatttttaaaagtaatttggttgtgtttatagttatttgtacaagtatttatcacagactctaaattgaaaaatatagtatgatctatatttgaccctaaaaatgttggattaatttaacaaatatggcagatttttcataactaagtcttaagtcttctaaaaggaagctgttacccttctgtttttaaattccttatgaatgtgtttagagatacatcgatattttttttttaaccaacaggtggtttgtgccgggaggggtttatacagggcgggtggtaagggcctcccgattgaaaagggggacaaagggggacagggggaaaatttttggggaaagagggaacaaatgttgtggaaaccgggtttaagaaggggggggggtgctggtgaataattgtgtatcag

SEQ ID NO: 446460 - DNA, 6295 bp, Homo sapiens
ccgggctgcaggaattcggcacaaatggagatgtctctcagtttccatatgtggaatttacaggaagagatagtgtcacctgccctacttgtcagggaacaggaagaattcctagggggcaagaaaaccaactggtggcattgattccatatagtgatcagagattaaggccaagaagaacaaagctgtatgtgatggcttctgtgtttgtctgtctactcctttctggattggctgtgtttttccttttccctcgctctatcgacgtgaaatacattggtgtaaaatcagcctatgtcagttatgatgttcagaagcgtacaatttatttaaatatcacaaacacactaaatataacaaacaataactattactctgtcgaagttgaaaacatcactgcccaagttcaattttcaaaaacagttattggaaaggcacgcttaaacaacataaccattattggtccacttgatatgaaacaaattgattacacagtacctaccgttatagcagaggaaatgagttatatgtatgatttctgtactctgatatccatcaaagtgcataacatagtactcatgatgcaagttactgtgacaacaacatactttggccactctgaacagatatcccaggagaggtatcagtatgtcgactgtggaagaaacacaacttatcagttggggcagtctgaatatttaaatgtacttcagccacaacagtaaaaactggaagagatggatttaaagaagaaatatctattgatatttcctatactctcaatgaagaggtatttcctaataggagaccttaaattgaacaaacctaaagtttacacttctaagagtacagttaaaagtatgtggacctgcagttcttgtaactctccactctgtgttaatgatatatttgtactaggatcttttacttgaatctaaatttactggttgatttccttctccagcctatcccctacagggaaaagctgatacttcccctatagtacaataaataattatttaaaagtcatagctccagtcactactgaaaacataattttggtgataaacataatttgagaaacttaatttctgaatgtttttatagaaaattactgaaaatctattactcatggaagacttttaaagaataaccttttttcctgttttataaattcccattgttatatggtagtatttcagctacacaatattttagcttttagctagacatttataggttttcatttgttgaaatggtaatcatctgcatgtttttgtcacttatttcaggttagtgattgcctaacacttataagccaaaataatctttgcaaaattccatacctaaaattttgaaagcccctaatgttttcacacatctttctgtattagttatagttttgtgaaatctttgtgtgatcttcaaacattatcatttaatgtacaatactgtaaataaactgtgcatggcttttatacagctttagtaaatgtcaaataaagtggtacagactcattacaacaagtttctcataaaaatacaataaataggaaaatgaaattcagaaacccatagactgggaataggttccagttacagcttggatctggcataaaataaatttgaaataaaatattttgatgctccatttttttatgttgcttttcatactaaagaatggtgtagacttgttttgcaactgttaggtacccagttatcaattttatcaatgttttagaggaggaaattatttttttggtagaaattgttcaagaaatccttaattgaatgtcattaaatgatggtggccaaaataaaacctatttagaaatttaatcactttgcacatcacttggaatatgatgcctctagtagttacttttttatagttttctacttttggttttatttaaaattgttttcaaatatagattattgacttattcaactttgctgttttatattttcagtatcatttttcatttgttttttttttttttgtcttttcacttaccaagttctagggacatttaaaatatgtactaagtgtaggagtggttatgataccaaaaaatgtagctgggttgagattaatttcgttctgttttctcatgacagaaatcaggtttccctttccccacccctaagtgcctaacttaggtctgaaacagcctgtttattagtctgactctctcaaccataaaacataagctttatttaattctgcctttaaacacactcaggtttccccttaattttcatattattttctgcaagttttcttgagtatcttcaattcgttgaatgtggtttttggtttttttttgttttaacactagtcttcccttaattcattgctaactcaagccatccttactattaaacccaaatcagtcctttaagttcattatggcctttctagtatttaaaaaaaaaaaaatcattttcatttttcttctgctacgtttcctgactactactgcatacttctctgatacaggttctgtttgtattttttatatcattctcattttctcatttgacatgatctatgtctatatatgatataggtccccttttgtctcaaaatttttaattatgtgacttcaaaaatcacctgtatctgtagtagggcttccaaatctgcttctccatatgtgaccagtcacctgtctgctttcacatttagctagtgaactacacatttactaaaatgtgtaaattttacacatttagtgactgtgtaaaataaaaaaaaagttattttatcatatcctttctattatgttcccatcctgtcctcatgtcccatttactttattatcaccattcatttcttcaaaattatcttttagatacgctcatacaaaaatcaatccttgttttcttgcttgtgtcttttaaccttggaaaattacatcgtgtaaattaaacagatttttctgatgatctgtgcttcttatatactattagagtgcatgatagtatctcctgaaaaggatggaaagtagaagcatttgcttttagtcacttaattttgaatcttttttcttcatcttttgaattaattttttttattatatctacttttagtggagtttgagtcagaaaaaaacaagaatttgaaacaagtaaaaagatagaagagaaataaagatggtatgtgactactttcagagagagttaagtaactgtcagaataagcctggaacaaaacaggctgtaaattaataaaactacaaacacacattcaggtgaagcagaagtatagccataaaacatctagaaagagtgaatgaggcttttagcttttcttaggtcaatgtccagtgtgcttttttccatgggaataggataggtattaatacgcttttctaaactgctctcagaccttatccagaggacatggtaaagatatgttacagaaatttttctgatacttcctggaataactttaagttacaccctagtagactggtcattctaataaaatccagtactataacaaacctctgtatgttgatagcacattggccctttttagagttctttcctatgtttttcttacgtgatttcccacagttccatgagtccaacaaaggagagtgataggctccttatcttttagaagaggaaggaaaggcatgaagaagttgagggactggctgaagatcacgtacttactaagtagtacaactggagcaagatcaagtatctctgtctcccatatctgtgttctatcatttaaaatatatattggaaatccctgctgactcagattggtatgattaaaaatgagaggaaagttcaaatagttagtagtgacaaactaatactgctggactaagattttggtagcattgttttctaaaatattttaaatggagaatgaacacttataaaatgctttggaacataatctttagcttaattttctgttaaaatttagtaccccttcatcattccaataaagataagactgatccattgtctaaggaaattatttataaataatagagattaatttatttgagatttgaaataagaatagtatgaaaatattagataccacataaattgtttgaaattactgaataaccatcttaagtatggaacatttaaatggctatattttatttgtgtacagtttttctgtgccttgttaggccagtgaagcaattattttctctaagaaaatgacaataaaatataacacacttcagattgtctgatttacagtttggaaaggacaccgcaatgttcaaataggtaggagaccatcaaaaacacaattaaagtaacatattaggagacttgaaacttcagcctaataaatccttcatggttcttagccttattattgtgatataattctagatattttcttggagggcatgtgcccaactctcccgcaccccattttgtttgtcttttaaagttcttagaataaacagttctttatataataattatattttatttaagaaaatagtttgttaggtactttttaaaagatgtaaatttttaaatttacaaatacatatgggtctttgataagcaataggaattgaattacaagttactagggttataagcaaaaggttgcttaccataatgtcattaggtcacgatttttagctcacatctggaagcagcaactacttggctcaagtacatataagagtaattagttttattctctcttttttataaaatcgggtttcagatgagatgtttatcttagactattttagggaaaaattttacatgtttgagatggtggagtaaaaagactgttaaacatttcttttaaaaaattatttttacattacaacaatatatttatgatgtgttcagatcaaaaatttaacttctgtgtcccagatctactttcaaagtgagattttcacttgtcagcttaaatttctgactagaactaacgtttgtgtatttttgtgcttagtcggaatacaaatttcacagtggatttttgaagtttgtccttaaattggataaaatcaagtgattaaagttactaaagagataaaaatggtaatttccatttttaaaagtaatttggttgtgtttatagttatttgtacaagtatttatcacagactctaaattgaaaaatatagtatgatctatatttgaccctaaaaatgttggattaatttaacaaatatggcagatttttcataactaagtcttaagtcttctaaaaggaagctgttacccttctgtttttaattacattaattgaaatgtgttttaagagatacaatttcagcatattttatatattaaaaaacaaaaaaggattagtattgagccagtggccaaaaggtaatattactaccatgtagactgttatagttcaaattgtcccacttcacccagaattttagaaactagaagtctgggaggtactatatcagctgtagttgggtaattccaagtgctgatagtactattcatcttttttattattgtgtcagatgaaacaaatgccaagttgcaaaatatgcagatttttattatataatggttttaggcataaattattaacaagccatgccttatgtgtttcatcttatatttttctttagaactaaactataacagattttggaaaatgatttgacgtgcttgctcacttgattgacttggtcagatatttgaatgatggtattacctagattctaatccttgattctagttatataataaataatatagaatatgaaaatatgtttgggcatttactgtttatattatgtagtagcctccatcatgacacacttactacatttatgaattgagcagttctgtaattgtaattattattgctgttcatgtaacaaaacatgcttatgataatagcaaacaaatagaaatgcccccaaaatgctatttttttaattcagttataactgttactcttgtagttgtgtatgacgcaataaaatttgtaaaaaaatttcagcatgaaaaataaaatttgtatcactcatgtattttggctatgcttttgaaatttccttaacataaacaaatcagtgtagatattcaaaatcttttacctttaatccttttcatccttatagtccttacctgaactctactttagcattatctttgatttctttttttcattcacttaacttccaatcagtactcaagctttatccattctacctctgtaatgtctctggaatttatctcatacgtgaaatttcccttgatattatagacataccttggatatattgcaggtttggttccacaccat

SEQ ID NO: 446461 - DNA, 2599 bp, Homo sapiens
cagctctacggcggccgcgcgctccaggccggtcgctccaccccccggctcccgggactgtggactccacgaccctgtcctcggccctgtccgcgccgaagcagcccgggactgcgcagcgccccgcgtgccgacatgggaaagtctctttctcatttgcctttgcattcaagcaaagaagatgcttatgatggagtcacatctgaaaacatgaggaatggactggttaatagtgaagtccataatgaagatggaagaaatggagatgtctctcagtttccatatgtggaatttacaggaagagatagtgtcacctgccctacttgtcagggaacaggaagaattcctagggggcaagaaaaccaactggtggcattgattccatatagtgatcagagattaaggccaagaagaacaaagctgtatgtgatggcttctgtgtttgtctgtctactcctttctggattggctgtgtttttccttttccctcgctctatcgacgtgaaatacattggtgtaaaatcagcctatgtcagttatgatgttcagaagcgtacaatttatttaaatatcacaaacacactaaatataacaaacaataactattactctgtcgaagttgaaaacatcactgcccaagttcaattttcaaaaacagttattggaaaggcacgcttaaacaacataaccattattggtccacttgatatgaaacaaattgattacacagtacctaccgttatagcagaggaaatgagttatatgtatgatttctgtactctgatatccatcaaagtgcataacatagtactcatgatgcaagttactgtgacaacaacatactttggccactctgaacagatatcccaggagaggtatcagtatgtcgactgtggaagaaacacaacttatcagttggggcagtctgaatatttaaatgtacttcagccacaacagtaaaaactggaagagatggatttaaagaagaaatatctattgatatttcctatactctcaatgaagaggtatttcctaataggagaccttaaattgaacaaacctaaagtttacacttctaagagtacagttaaaagtatgtggacctgcagttcttgtaactctccactctgtgttaatgatatatttgtactaggatcttttacttgaatctaaatttactggttgatttccttctccagcctatcccctacagggaaaagctgatacttcccctatagtacaataaataattatttaaaagtcatagctccagtcactactgaaaacataattttggtgataaacataatttgagaaacttaatttctgaatgtttttatagaaaattactgaaaatctattactcatggaagacttttaaagaataaccttttttcctgttttataaattcccattgttatatggtagtatttcagctacacaatattttagcttttagctagacatttataggttttcatttgttgaaatggtaatcatctgcatgtttttgtcacttatttcaggttagtgattgcctaacacttataagccaaaataatctttgcaaaattccatacctaaaattttgaaagcccctaatgttttcacacatctttctgtattagttatagttttgtgaaatctttgtgtgatcttcaaacattatcatttaatgtacaatactgtaaataaactgtgcatggcttttatacagctttagtaaatgtcaaataaagtggtacagactcattacaacaagtttctcataaaaatacaataaataggaaaatgaaattcagaaacccatagactgggaataggttccagttacagcttggatctggcataaaataaatttgaaataaaatattttgatgctccatttttttatgttgcttttcatactaaagaatggtgtagacttgttttgcaactgttaggtacccagttatcaattttatcaatgttttagaggaggaaattatttttttggtagaaattgttcaagaaatccttaattgaatgtcattaaatgatggtggccaaaataaaacctatttagaaatttaatcactttgcacatcacttggaatatgatgcctctagtagttacttttttatagttttctacttttggttttatttaaaattgttttcaaatatagattattgacttattcaactttgctgttttatattttcagtatcatttttcatttgttttttttttttttgtcttttcacttaccaagttctagggacatttaaaatatgtactaagtgtaggagtggttatgataccaaaaaatgtagctgggttgagattaatttcgttctgttttctcatgacagaaatcaggtttccctttccccacccctaagtgcctaacttaggtctgaaacagcctgtttattagtctgactctctcaaccatattctcactatattttctgcaggttttcctggagatcctcaattcgcttgatgtggcttctgctcctctcctcgtttaaccctcttgtcccttaatccatcgttcactacgccaccctctctcttaccctctatcctgcctcgttcctatttacctcccc

SEQ ID NO: 446462 - DNA, 440 bp, Homo sapiens
aaacaacataaccattattggtccacttgatatgaaacaagtaagaatcaatcatgaaatactttgtaagagttaaatgaatgtcagctttgtatatcatataacttgaaggaggtgggggatttcctcaaaaacttgatttagaaatgtgtctctgctgggtacagtggctcatgcctgtgatccccgcaccttgggaggctgagctcagtggactgcttgagcccaggaattcgagaccagcctgggcaacatggtgaaacctcatctctacaaaaaaatacaaaaatgtgctgagtgtggtagtgtgcacctctcttcccacctactggggaggctgaggtgggaggatcactggagcccagtaggtcgaggctcgcgagccgtgatcacaccgccgtactccaaactgggtgacacagtgagatcctgtctcaaaa

SEQ ID NO: 446463 - DNA, 712 bp, Homo sapiens
ataagcatgataggacatcatttcacattatttgtttaaaaaaacacttctggactctagtaaatggctcctttgtttcagacattattttgattggatataatcctaatccaaaaggtataatccaaaaggtagtttgaacattctcttaatgtttgttctgtaaaccaaaaataaaattctgagccccccaactaagtggaacccgcttctctgtcaagggcattccaaagtaaacctaaaaaggtagttcaggccatgatgaaaaggtgggtggaggggattgaacatgccccgttgtaccttcctctctttggaattcaggcacaactgaccagcatcaattaaaacagagatttgaagactaacaagagtctctttgtagcaataagatatcaaatcccaacctgactctaatatagaatcactcgacagatagcaggccctgagagaaattgaaatatcttaccccaaaatatatttctttgaaatggccttgcaaagctgtctctcgtggggaagatccacattctgtacagaatcccctttcctttccagatcttttcctaattcagcagcgatttaaccaagagcctggaatattttaaggagtaataagagacatttacaaactattctctctgaagcctgctacctggaggcatcatctagataatcagaaccttggcttccacatcctcctcccttgtct

SEQ ID NO: 446464 - DNA, 6530 bp, Homo sapiens
cagctctacggcggccgcgcgctccaggccggtcgctccaccccccggctcccgggactgtggactccacgaccctgtcctcggccctgtccgcgccgaagcagcccgggactgcgcagcgccccgcgtgccgacatgggaaagtctctttctcatttgcctttgcattcaagcaaagaagatgcttatgatggagtcacatctgaaaacatgaggaatggactggttaatagtgaagtccataatgaagatggaagaaatggagatgtctctcagtttccatatgtggaatttacaggaagagatagtgtcacctgccctacttgtcagggaacaggaagaattcctagggggcaagaaaaccaactggtggcattgattccatatagtgatcagagattaaggccaagaagaacaaagctgtatgtgatggcttctgtgtttgtctgtctactcctttctggattggctgtgtttttccttttccctcgctctatcgacgtgaaatacattggtgtaaaatcagcctatgtcagttatgatgttcagaagcgtacaatttatttaaatatcacaaacacactaaatataacaaacaataactattactctgtcgaagttgaaaacatcactgcccaagttcaattttcaaaaacagttattggaaaggcacgcttaaacaacataaccattattggtccacttgatatgaaacaaattgattacacagtacctaccgttatagcagaggaaatgagttatatgtatgatttctgtactctgatatccatcaaagtgcataacatagtactcatgatgcaagttactgtgacaacaacatactttggccactctgaacagatatcccaggagaggtatcagtatgtcgactgtggaagaaacacaacttatcagttggggcagtctgaatatttaaatgtacttcagccacaacagtaaaaactggaagagatggatttaaagaagaaatatctattgatatttcctatactctcaatgaagaggtatttcctaataggagaccttaaattgaacaaacctaaagtttacacttctaagagtacagttaaaagtatgtggacctgcagttcttgtaactctccactctgtgttaatgatatatttgtactaggatcttttacttgaatctaaatttactggttgatttccttctccagcctatcccctacagggaaaagctgatacttcccctatagtacaataaataattatttaaaagtcatagctccagtcactactgaaaacataattttggtgataaacataatttgagaaacttaatttctgaatgtttttatagaaaattactgaaaatctattactcatggaagacttttaaagaataaccttttttcctgttttataaattcccattgttatatggtagtatttcagctacacaatattttagcttttagctagacatttataggttttcatttgttgaaatggtaatcatctgcatgtttttgtcacttatttcaggttagtgattgcctaacacttataagccaaaataatctttgcaaaattccatacctaaaattttgaaagcccctaatgttttcacacatctttctgtattagttatagttttgtgaaatctttgtgtgatcttcaaacattatcatttaatgtacaatactgtaaataaactgtgcatggcttttatacagctttagtaaatgtcaaataaagtggtacagactcattacaacaagtttctcataaaaatacaataaataggaaaatgaaattcagaaacccatagactgggaataggttccagttacagcttggatctggcataaaataaatttgaaataaaatattttgatgctccatttttttatgttgcttttcatactaaagaatggtgtagacttgttttgcaactgttaggtacccagttatcaattttatcaatgttttagaggaggaaattatttttttggtagaaattgttcaagaaatccttaattgaatgtcattaaatgatggtggccaaaataaaacctatttagaaatttaatcactttgcacatcacttggaatatgatgcctctagtagttacttttttatagttttctacttttggttttatttaaaattgttttcaaatatagattattgacttattcaactttgctgttttatattttcagtatcatttttcatttgttttttttttttttgtcttttcacttaccaagttctagggacatttaaaatatgtactaagtgtaggagtggttatgataccaaaaaatgtagctgggttgagattaatttcgttctgttttctcatgacagaaatcaggtttccctttccccacccctaagtgcctaacttaggtctgaaacagcctgtttattagtctgactctctcaaccataaaacataagctttatttaattctgcctttaaacacactcaggtttccccttaattttcatattattttctgcaagttttcttgagtatcttcaattcgttgaatgtggtttttggtttttttttgttttaacactagtcttcccttaattcattgctaactcaagccatccttactattaaacccaaatcagtcctttaagttcattatggcctttctagtatttaaaaaaaaaaaaatcattttcatttttcttctgctacgtttcctgactactactgcatacttctctgatacaggttctgtttgtattttttatatcattctcattttctcatttgacatgatctatgtctatatatgatataggtccccttttgtctcaaaatttttaattatgtgacttcaaaaatcacctgtatctgtagtagggcttccaaatctgcttctccatatgtgaccagtcacctgtctgctttcacatttagctagtgaactacacatttactaaaatgtgtaaattttacacatttagtgactgtgtaaaataaaaaaaaagttattttatcatatcctttctattatgttcccatcctgtcctcatgtcccatttactttattatcaccattcatttcttcaaaattatcttttagatacgctcatacaaaaatcaatccttgttttcttgcttgtgtcttttaaccttggaaaattacatcgtgtaaattaaacagatttttctgatgatctgtgcttcttatatactattagagtgcatgatagtatctcctgaaaaggatggaaagtagaagcatttgcttttagtcacttaattttgaatcttttttcttcatcttttgaattaattttttttattatatctacttttagtggagtttgagtcagaaaaaaacaagaatttgaaacaagtaaaaagatagaagagaaataaagatggtatgtgactactttcagagagagttaagtaactgtcagaataagcctggaacaaaacaggctgtaaattaataaaactacaaacacacattcaggtgaagcagaagtatagccataaaacatctagaaagagtgaatgaggcttttagcttttcttaggtcaatgtccagtgtgcttttttccatgggaataggataggtattaatacgcttttctaaactgctctcagaccttatccagaggacatggtaaagatatgttacagaaatttttctgatacttcctggaataactttaagttacaccctagtagactggtcattctaataaaatccagtactataacaaacctctgtatgttgatagcacattggccctttttagagttctttcctatgtttttcttacgtgatttcccacagttccatgagtccaacaaaggagagtgataggctccttatcttttagaagaggaaggaaaggcatgaagaagttgagggactggctgaagatcacgtacttactaagtagtacaactggagcaagatcaagtatctctgtctcccatatctgtgttctatcatttaaaatatatattggaaatccctgctgactcagattggtatgattaaaaatgagaggaaagttcaaatagttagtagtgacaaactaatactgctggactaagattttggtagcattgttttctaaaatattttaaatggagaatgaacacttataaaatgctttggaacataatctttagcttaattttctgttaaaatttagtaccccttcatcattccaataaagataagactgatccattgtctaaggaaattatttataaataatagagattaatttatttgagatttgaaataagaatagtatgaaaatattagataccacataaattgtttgaaattactgaataaccatcttaagtatggaacatttaaatggctatattttatttgtgtacagtttttctgtgccttgttaggccagtgaagcaattattttctctaagaaaatgacaataaaatataacacacttcagattgtctgatttacagtttggaaaggacaccgcaatgttcaaataggtaggagaccatcaaaaacacaattaaagtaacatattaggagacttgaaacttcagcctaataaatccttcatggttcttagccttattattgtgatataattctagatattttcttggagggcatgtgcccaactctcccgcaccccattttgtttgtcttttaaagttcttagaataaacagttctttatataataattatattttatttaagaaaatagtttgttaggtactttttaaaagatgtaaatttttaaatttacaaatacatatgggtctttgataagcaataggaattgaattacaagttactagggttataagcaaaaggttgcttaccataatgtcattaggtcacgatttttagctcacatctggaagcagcaactacttggctcaagtacatataagagtaattagttttattctctcttttttataaaatcgggtttcagatgagatgtttatcttagactattttagggaaaaattttacatgtttgagatggtggagtaaaaagactgttaaacatttcttttaaaaaattatttttacattacaacaatatatttatgatgtgttcagatcaaaaatttaacttctgtgtcccagatctactttcaaagtgagattttcacttgtcagcttaaatttctgactagaactaacgtttgtgtatttttgtgcttagtcggaatacaaatttcacagtggatttttgaagtttgtccttaaattggataaaatcaagtgattaaagttactaaagagataaaaatggtaatttccatttttaaaagtaatttggttgtgtttatagttatttgtacaagtatttatcacagactctaaattgaaaaatatagtatgatctatatttgaccctaaaaatgttggattaatttaacaaatatggcagatttttcataactaagtcttaagtcttctaaaaggaagctgttacccttctgtttttaattacattaattgaaatgtgttttaagagatacaatttcagcatattttatatattaaaaaacaaaaaaggattagtattgagccagtggccaaaaggtaatattactaccatgtagactgttatagttcaaattgtcccacttcacccagaattttagaaactagaagtctgggaggtactatatcagctgtagttgggtaattccaagtgctgatagtactattcatcttttttattattgtgtcagatgaaacaaatgccaagttgcaaaatatgcagatttttattatataatggttttaggcataaattattaacaagccatgccttatgtgtttcatcttatatttttctttagaactaaactataacagattttggaaaatgatttgacgtgcttgctcacttgattgacttggtcagatatttgaatgatggtattacctagattctaatccttgattctagttatataataaataatatagaatatgaaaatatgtttgggcatttactgtttatattatgtagtagcctccatcatgacacacttactacatttatgaattgagcagttctgtaattgtaattattattgctgttcatgtaacaaaacatgcttatgataatagcaaacaaatagaaatgcccccaaaatgctatttttttaattcagttataactgttactcttgtagttgtgtatgacgcaataaaatttgtaaaaaaatttcagcatgaaaaataaaatttgtatcactcatgtattttggctatgcttttgaaatttccttaacataaacaaatcagtgtagatattcaaaatcttttacctttaatccttttcatccttatagtccttacctgaactctactttagcattatctttgatttctttttttcattcacttaacttccaatcagtactcaagctttatccattctacctctgtaatgtctctggaatttatctcatacgtgaaatttcccttgatattatagacataccttggatatattgcaggtttggttccacaccat

SEQ ID NO: 446465 - DNA, 6098 bp, Homo sapiens
attgggtgttatctaagccaataaaacattgttgattataggtttggtgttttgaccattagctgacatttgattaacctttttttctatgataagagaaccatggtcacttttaagcatataatgaacttttatatttttaacagaagataattgttttaaaatattacacttattacgtgtaattatgtctacagggctcactcagctatccatttttgttgtctgttggggaaatactccttaagaggattgtgtgcacaatattaagttatcattaatcaaatattctcttctgggagataatttttatgtgttaaagtagtctcactatggaaaaacttctaatataactattaaatgtctctcctcacttacgttatttttagagttactgtgacaacaacatactttggccactctgaacagatatcccaggagaggtatcagtatgtcgactgtggaagaaacacaacttatcagttggggcagtctgaatatttaaatgtacttcagccacaacagtaaaaactggaagagatggatttaaagaagaaatatctattgatatttcctatactctcaatgaagaggtatttcctaataggagaccttaaattgaacaaacctaaagtttacacttctaagagtacagttaaaagtatgtggacctgcagttcttgtaactctccactctgtgttaatgatatatttgtactaggatcttttacttgaatctaaatttactggttgatttccttctccagcctatcccctacagggaaaagctgatacttcccctatagtacaataaataattatttaaaagtcatagctccagtcactactgaaaacataattttggtgataaacataatttgagaaacttaatttctgaatgtttttatagaaaattactgaaaatctattactcatggaagacttttaaagaataaccttttttcctgttttataaattcccattgttatatggtagtatttcagctacacaatattttagcttttagctagacatttataggttttcatttgttgaaatggtaatcatctgcatgtttttgtcacttatttcaggttagtgattgcctaacacttataagccaaaataatctttgcaaaattccatacctaaaattttgaaagcccctaatgttttcacacatctttctgtattagttatagttttgtgaaatctttgtgtgatcttcaaacattatcatttaatgtacaatactgtaaataaactgtgcatggcttttatacagctttagtaaatgtcaaataaagtggtacagactcattacaacaagtttctcataaaaatacaataaataggaaaatgaaattcagaaacccatagactgggaataggttccagttacagcttggatctggcataaaataaatttgaaataaaatattttgatgctccatttttttatgttgcttttcatactaaagaatggtgtagacttgttttgcaactgttaggtacccagttatcaattttatcaatgttttagaggaggaaattatttttttggtagaaattgttcaagaaatccttaattgaatgtcattaaatgatggtggccaaaataaaacctatttagaaatttaatcactttgcacatcacttggaatatgatgcctctagtagttacttttttatagttttctacttttggttttatttaaaattgttttcaaatatagattattgacttattcaactttgctgttttatattttcagtatcatttttcatttgttttttttttttttgtcttttcacttaccaagttctagggacatttaaaatatgtactaagtgtaggagtggttatgataccaaaaaatgtagctgggttgagattaatttcgttctgttttctcatgacagaaatcaggtttccctttccccacccctaagtgcctaacttaggtctgaaacagcctgtttattagtctgactctctcaaccataaaacataagctttatttaattctgcctttaaacacactcaggtttccccttaattttcatattattttctgcaagttttcttgagtatcttcaattcgttgaatgtggtttttggtttttttttgttttaacactagtcttcccttaattcattgctaactcaagccatccttactattaaacccaaatcagtcctttaagttcattatggcctttctagtatttaaaaaaaaaaaaatcattttcatttttcttctgctacgtttcctgactactactgcatacttctctgatacaggttctgtttgtattttttatatcattctcattttctcatttgacatgatctatgtctatatatgatataggtccccttttgtctcaaaatttttaattatgtgacttcaaaaatcacctgtatctgtagtagggcttccaaatctgcttctccatatgtgaccagtcacctgtctgctttcacatttagctagtgaactacacatttactaaaatgtgtaaattttacacatttagtgactgtgtaaaataaaaaaaaagttattttatcatatcctttctattatgttcccatcctgtcctcatgtcccatttactttattatcaccattcatttcttcaaaattatcttttagatacgctcatacaaaaatcaatccttgttttcttgcttgtgtcttttaaccttggaaaattacatcgtgtaaattaaacagatttttctgatgatctgtgcttcttatatactattagagtgcatgatagtatctcctgaaaaggatggaaagtagaagcatttgcttttagtcacttaattttgaatcttttttcttcatcttttgaattaattttttttattatatctacttttagtggagtttgagtcagaaaaaaacaagaatttgaaacaagtaaaaagatagaagagaaataaagatggtatgtgactactttcagagagagttaagtaactgtcagaataagcctggaacaaaacaggctgtaaattaataaaactacaaacacacattcaggtgaagcagaagtatagccataaaacatctagaaagagtgaatgaggcttttagcttttcttaggtcaatgtccagtgtgcttttttccatgggaataggataggtattaatacgcttttctaaactgctctcagaccttatccagaggacatggtaaagatatgttacagaaatttttctgatacttcctggaataactttaagttacaccctagtagactggtcattctaataaaatccagtactataacaaacctctgtatgttgatagcacattggccctttttagagttctttcctatgtttttcttacgtgatttcccacagttccatgagtccaacaaaggagagtgataggctccttatcttttagaagaggaaggaaaggcatgaagaagttgagggactggctgaagatcacgtacttactaagtagtacaactggagcaagatcaagtatctctgtctcccatatctgtgttctatcatttaaaatatatattggaaatccctgctgactcagattggtatgattaaaaatgagaggaaagttcaaatagttagtagtgacaaactaatactgctggactaagattttggtagcattgttttctaaaatattttaaatggagaatgaacacttataaaatgctttggaacataatctttagcttaattttctgttaaaatttagtaccccttcatcattccaataaagataagactgatccattgtctaaggaaattatttataaataatagagattaatttatttgagatttgaaataagaatagtatgaaaatattagataccacataaattgtttgaaattactgaataaccatcttaagtatggaacatttaaatggctatattttatttgtgtacagtttttctgtgccttgttaggccagtgaagcaattattttctctaagaaaatgacaataaaatataacacacttcagattgtctgatttacagtttggaaaggacaccgcaatgttcaaataggtaggagaccatcaaaaacacaattaaagtaacatattaggagacttgaaacttcagcctaataaatccttcatggttcttagccttattattgtgatataattctagatattttcttggagggcatgtgcccaactctcccgcaccccattttgtttgtcttttaaagttcttagaataaacagttctttatataataattatattttatttaagaaaatagtttgttaggtactttttaaaagatgtaaatttttaaatttacaaatacatatgggtctttgataagcaataggaattgaattacaagttactagggttataagcaaaaggttgcttaccataatgtcattaggtcacgatttttagctcacatctggaagcagcaactacttggctcaagtacatataagagtaattagttttattctctcttttttataaaatcgggtttcagatgagatgtttatcttagactattttagggaaaaattttacatgtttgagatggtggagtaaaaagactgttaaacatttcttttaaaaaattatttttacattacaacaatatatttatgatgtgttcagatcaaaaatttaacttctgtgtcccagatctactttcaaagtgagattttcacttgtcagcttaaatttctgactagaactaacgtttgtgtatttttgtgcttagtcggaatacaaatttcacagtggatttttgaagtttgtccttaaattggataaaatcaagtgattaaagttactaaagagataaaaatggtaatttccatttttaaaagtaatttggttgtgtttatagttatttgtacaagtatttatcacagactctaaattgaaaaatatagtatgatctatatttgaccctaaaaatgttggattaatttaacaaatatggcagatttttcataactaagtcttaagtcttctaaaaggaagctgttacccttctgtttttaattacattaattgaaatgtgttttaagagatacaatttcagcatattttatatattaaaaaacaaaaaaggattagtattgagccagtggccaaaaggtaatattactaccatgtagactgttatagttcaaattgtcccacttcacccagaattttagaaactagaagtctgggaggtactatatcagctgtagttgggtaattccaagtgctgatagtactattcatcttttttattattgtgtcagatgaaacaaatgccaagttgcaaaatatgcagatttttattatataatggttttaggcataaattattaacaagccatgccttatgtgtttcatcttatatttttctttagaactaaactataacagattttggaaaatgatttgacgtgcttgctcacttgattgacttggtcagatatttgaatgatggtattacctagattctaatccttgattctagttatataataaataatatagaatatgaaaatatgtttgggcatttactgtttatattatgtagtagcctccatcatgacacacttactacatttatgaattgagcagttctgtaattgtaattattattgctgttcatgtaacaaaacatgcttatgataatagcaaacaaatagaaatgcccccaaaatgctatttttttaattcagttataactgttactcttgtagttgtgtatgacgcaataaaatttgtaaaaaaatttcagcatgaaaaataaaatttgtatcactcatgtattttggctatgcttttgaaatttccttaacataaacaaatcagtgtagatattcaaaatcttttacctttaatccttttcatccttatagtccttacctgaactctactttagcattatctttgatttctttttttcattcacttaacttccaatcagtactcaagctttatccattctacctctgtaatgtctctggaatttatctcatacgtgaaatttcccttgatattatagacataccttggatatattgcaggtttggttccacaccat

SEQ ID NO: 446466 - DNA, 6333 bp, Homo sapiens
cagctctacggcggccgcgcgctccaggccggtcgctccaccccccggctcccgggactgtggactccacgaccctgtcctcggccctgtccgcgccgaagcagcccgggactgcgcagcgccccgcgtgccgacatgggaaagtctctttctcatttgcctttgcattcaagcaaagaagatgcttatgatggagtcacatctgaaaacatgaggaatggactggttaatagtgaagtccataatgaagatggaagaaatggagatgtctctcagtttccatatgtggaatttacaggaagagatagtgtcacctgccctacttgtcagggaacaggaagaattcctagggggcaagaaaaccaactggtggcattgattccatatagtgatcagagattaaggccaagaagaacaaagctgtatgtgatggcttctgtgtttgtctgtctactcctttctggattggctgtgtttttccttttccctcgctctatcgacgtgaaatacattggtgtaaaatcagcctatgtcagttatgatgttcagaagcgtacaatttatttaaatatcacaattgattacacagtacctaccgttatagcagaggaaatgagttatatgtatgatttctgtactctgatatccatcaaagtgcataacatagtactcatgatgcaagttactgtgacaacaacatactttggccactctgaacagatatcccaggagaggtatcagtatgtcgactgtggaagaaacacaacttatcagttggggcagtctgaatatttaaatgtacttcagccacaacatctcaatgaagaggtatttcctaataggagaccttaaattgaacaaacctaaagtttacacttctaagagtacagttaaaagtatgtggacctgcagttcttgtaactctccactctgtgttaatgatatatttgtactaggatcttttacttgaatctaaatttactggttgatttccttctccagcctatcccctacagggaaaagctgatacttcccctatagtacaataaataattatttaaaagtcatagctccagtcactactgaaaacataattttggtgataaacataatttgagaaacttaatttctgaatgtttttatagaaaattactgaaaatctattactcatggaagacttttaaagaataaccttttttcctgttttataaattcccattgttatatggtagtatttcagctacacaatattttagcttttagctagacatttataggttttcatttgttgaaatggtaatcatctgcatgtttttgtcacttatttcaggttagtgattgcctaacacttataagccaaaataatctttgcaaaattccatacctaaaattttgaaagcccctaatgttttcacacatctttctgtattagttatagttttgtgaaatctttgtgtgatcttcaaacattatcatttaatgtacaatactgtaaataaactgtgcatggcttttatacagctttagtaaatgtcaaataaagtggtacagactcattacaacaagtttctcataaaaatacaataaataggaaaatgaaattcagaaacccatagactgggaataggttccagttacagcttggatctggcataaaataaatttgaaataaaatattttgatgctccatttttttatgttgcttttcatactaaagaatggtgtagacttgttttgcaactgttaggtacccagttatcaattttatcaatgttttagaggaggaaattatttttttggtagaaattgttcaagaaatccttaattgaatgtcattaaatgatggtggccaaaataaaacctatttagaaatttaatcactttgcacatcacttggaatatgatgcctctagtagttacttttttatagttttctacttttggttttatttaaaattgttttcaaatatagattattgacttattcaactttgctgttttatattttcagtatcatttttcatttgttttttttttttttgtcttttcacttaccaagttctagggacatttaaaatatgtactaagtgtaggagtggttatgataccaaaaaatgtagctgggttgagattaatttcgttctgttttctcatgacagaaatcaggtttccctttccccacccctaagtgcctaacttaggtctgaaacagcctgtttattagtctgactctctcaaccataaaacataagctttatttaattctgcctttaaacacactcaggtttccccttaattttcatattattttctgcaagttttcttgagtatcttcaattcgttgaatgtggtttttggtttttttttgttttaacactagtcttcccttaattcattgctaactcaagccatccttactattaaacccaaatcagtcctttaagttcattatggcctttctagtatttaaaaaaaaaaaaatcattttcatttttcttctgctacgtttcctgactactactgcatacttctctgatacaggttctgtttgtattttttatatcattctcattttctcatttgacatgatctatgtctatatatgatataggtccccttttgtctcaaaatttttaattatgtgacttcaaaaatcacctgtatctgtagtagggcttccaaatctgcttctccatatgtgaccagtcacctgtctgctttcacatttagctagtgaactacacatttactaaaatgtgtaaattttacacatttagtgactgtgtaaaataaaaaaaaagttattttatcatatcctttctattatgttcccatcctgtcctcatgtcccatttactttattatcaccattcatttcttcaaaattatcttttagatacgctcatacaaaaatcaatccttgttttcttgcttgtgtcttttaaccttggaaaattacatcgtgtaaattaaacagatttttctgatgatctgtgcttcttatatactattagagtgcatgatagtatctcctgaaaaggatggaaagtagaagcatttgcttttagtcacttaattttgaatcttttttcttcatcttttgaattaattttttttattatatctacttttagtggagtttgagtcagaaaaaaacaagaatttgaaacaagtaaaaagatagaagagaaataaagatggtatgtgactactttcagagagagttaagtaactgtcagaataagcctggaacaaaacaggctgtaaattaataaaactacaaacacacattcaggtgaagcagaagtatagccataaaacatctagaaagagtgaatgaggcttttagcttttcttaggtcaatgtccagtgtgcttttttccatgggaataggataggtattaatacgcttttctaaactgctctcagaccttatccagaggacatggtaaagatatgttacagaaatttttctgatacttcctggaataactttaagttacaccctagtagactggtcattctaataaaatccagtactataacaaacctctgtatgttgatagcacattggccctttttagagttctttcctatgtttttcttacgtgatttcccacagttccatgagtccaacaaaggagagtgataggctccttatcttttagaagaggaaggaaaggcatgaagaagttgagggactggctgaagatcacgtacttactaagtagtacaactggagcaagatcaagtatctctgtctcccatatctgtgttctatcatttaaaatatatattggaaatccctgctgactcagattggtatgattaaaaatgagaggaaagttcaaatagttagtagtgacaaactaatactgctggactaagattttggtagcattgttttctaaaatattttaaatggagaatgaacacttataaaatgctttggaacataatctttagcttaattttctgttaaaatttagtaccccttcatcattccaataaagataagactgatccattgtctaaggaaattatttataaataatagagattaatttatttgagatttgaaataagaatagtatgaaaatattagataccacataaattgtttgaaattactgaataaccatcttaagtatggaacatttaaatggctatattttatttgtgtacagtttttctgtgccttgttaggccagtgaagcaattattttctctaagaaaatgacaataaaatataacacacttcagattgtctgatttacagtttggaaaggacaccgcaatgttcaaataggtaggagaccatcaaaaacacaattaaagtaacatattaggagacttgaaacttcagcctaataaatccttcatggttcttagccttattattgtgatataattctagatattttcttggagggcatgtgcccaactctcccgcaccccattttgtttgtcttttaaagttcttagaataaacagttctttatataataattatattttatttaagaaaatagtttgttaggtactttttaaaagatgtaaatttttaaatttacaaatacatatgggtctttgataagcaataggaattgaattacaagttactagggttataagcaaaaggttgcttaccataatgtcattaggtcacgatttttagctcacatctggaagcagcaactacttggctcaagtacatataagagtaattagttttattctctcttttttataaaatcgggtttcagatgagatgtttatcttagactattttagggaaaaattttacatgtttgagatggtggagtaaaaagactgttaaacatttcttttaaaaaattatttttacattacaacaatatatttatgatgtgttcagatcaaaaatttaacttctgtgtcccagatctactttcaaagtgagattttcacttgtcagcttaaatttctgactagaactaacgtttgtgtatttttgtgcttagtcggaatacaaatttcacagtggatttttgaagtttgtccttaaattggataaaatcaagtgattaaagttactaaagagataaaaatggtaatttccatttttaaaagtaatttggttgtgtttatagttatttgtacaagtatttatcacagactctaaattgaaaaatatagtatgatctatatttgaccctaaaaatgttggattaatttaacaaatatggcagatttttcataactaagtcttaagtcttctaaaaggaagctgttacccttctgtttttaattacattaattgaaatgtgttttaagagatacaatttcagcatattttatatattaaaaaacaaaaaaggattagtattgagccagtggccaaaaggtaatattactaccatgtagactgttatagttcaaattgtcccacttcacccagaattttagaaactagaagtctgggaggtactatatcagctgtagttgggtaattccaagtgctgatagtactattcatcttttttattattgtgtcagatgaaacaaatgccaagttgcaaaatatgcagatttttattatataatggttttaggcataaattattaacaagccatgccttatgtgtttcatcttatatttttctttagaactaaactataacagattttggaaaatgatttgacgtgcttgctcacttgattgacttggtcagatatttgaatgatggtattacctagattctaatccttgattctagttatataataaataatatagaatatgaaaatatgtttgggcatttactgtttatattatgtagtagcctccatcatgacacacttactacatttatgaattgagcagttctgtaattgtaattattattgctgttcatgtaacaaaacatgcttatgataatagcaaacaaatagaaatgcccccaaaatgctatttttttaattcagttataactgttactcttgtagttgtgtatgacgcaataaaatttgtaaaaaaatttcagcatgaaaaataaaatttgtatcactcatgtattttggctatgcttttgaaatttccttaacataaacaaatcagtgtagatattcaaaatcttttacctttaatccttttcatccttatagtccttacctgaactctactttagcattatctttgatttctttttttcattcacttaacttccaatcagtactcaagctttatccattctacctctgtaatgtctctggaatttatctcatacgtgaaatttcccttgatattatagacataccttggatatattgcaggtttggttccacaccat

SEQ ID NO: 446467 - DNA, 1713 bp, Homo sapiens
cagctctacggcggccgcgcgctccaggccggtcgctccaccccccggctcccgggactgtggactccacgaccctgtcctcggccctgtccgcgccgaagcagcccgggactgcgcagcgccccgcgtgccgacatgggaaagtctctttctcatttgcctttgcattcaagcaaagaagatgcttatgatggagtcacatctgaaaacatgaggaatggactggttaatagtgaagtccataatgaagatggaagaaatggagatgtctctcagtttccatatgtggaatttacaggaagagatagtgtcacctgccctacttgtcagggaacaggaagaattcctagggggcaagaaaaccaactggtggcattgattccatatagtgatcagagattaaggccaagaagaacaaagctgtatgtgatggcttctgtgtttgtctgtctactcctttctggattggctgtgtttttccttttccctcgctctatcgacgtgaaatacattggtgtaaaatcagcctatgtcagttatgatgttcagaagcgtacaatttatttaaatatcacaaacacactaaatataacaaacaataactattactctgtcgaagttgaaaacatcactgcccaagttcaattttcaaaaacagttattggaaaggcacgcttaaacaacataaccattattggtccacttgatatgaaacaaattgattacacagtacctaccgttatagcagaggaaatgagttatatgtatgatttctgtactctgatatccatcaaagtgcataacatagtactcatgatgcaagttactgtgacaacaacatactttggccactctgaacagatatcccaggagaggtatcagtatgtcgactgtggaagaaacacaacttatcagttggggcagtctgaatatttaaatgtacttcagccacaacagtaaaaactggaagagatggatttaaagaagaaatatctattgatatttcctatactctcaatgaagaggtatttcctaataggagaccttaaattgaacaaacctaaagtttacacttctaagagtacagttaaaagtatgtggacctgcagttcttgtaactctccactctgtgttaatgatatatttgtactaggatcttttacttgaatctaaatttactggttgatttccttctccagcctatcccctacagggaaaagctgatacttcccctatagtacaataaataattatttaaaagtcatagctccagtcactactgaaaacataattttggtgataaacataatttgagaaacttaatttctgaatgtttttatagaaaattactgaaaatctattactcatggaagacttttaaagaataaccttttttcctgttttataaattcccattgttatatggtagtatttcagctacacaatattttagcttttagctagacatttataggttttcatttgttgaaatggtaatcatctgcatgtttttgtcacttatttcaggttagtgattgcctaacacttataagccaaaataatctttgcaaaattccatacctaaaattttgaaagcccctaatgttttcacacatctttctgtattagttatagttttgtgaaatctttgtgtgatcttcaaacattatcatttaatgtacaatactgtaaataaactgtgcatggctttta

SEQ ID NO: 446468 - DNA, 3109 bp, Homo sapiens
gagtataaacattatcttttattatatatgattgttaaactttgctttccacaacacttcataaccttggatgtaaacatgagaaaaaatgctaattaagaatccttacgcacccagtccagtgctcccttaattaatcaaactggtaagtctactgcttcttgattccatcctgaggtattaacttttgaaccaagacatgtttatcttttaccaacaacagggatggtcactgttaaagtttctaaataatttattagggaaataagttcccacaaagtcaggctgaactgggagctgattaacaaagctgtgtaagttagtgtgtttgctttaaggtattacaagaagtacacagagcacacatctgggttataaaagcccttttataaagccatttttaaacaaaacaaaaaaaaagtttacaaaagaaaaaaagatacagaaaaagaataacttgcttcatatgtcccaaaaagagaaaaaaataaaggggacaatgccaacatgctcaacaataaaggcttctttttcttatttttttaatacaaaatacaagcaaaggatacacatacttaaaacagagctcaggagcagacacgcagtcctggaaacccttcaataaaagcaaagcaggagtttgttttttctttgtctatgcagatacatacagagactgggatatgtaaaaattaagtatcacaaaagaccatcacacgattctaccaatgcatgttgcatctgtaattcacgaacatggtcaacaaaatcatgttcacttcaaccccatttcatttaaattaaagaaaaaaaccttttaaataaagtggttacattcaaactttaacttccttagtaccatgctgcagatttcagcactgttaaggtattgcaagaatgcccaaccctctggtgtctgatcatgtatctagcaacattgcagtatgaagaaaagagatgccccggtctcagcccatggactagttaatacagtgaagcaggttcctgtcttttacccttcctgctcagaacataaaagattaaggactaaaatcaaggaagactgggagttttagagctggcaaaatgaagtctaaaagataaatcaaggcaaacaattactgagaacttggctgttgcttaacctggcaagtctaaaagcctttctttaaccttgtaggaattagatgcataaggtttgctgcaacatgttcatggtaaacaaactaagtagagctcttatttacaaatcttgtaacaaatacttctggaggaaaaagagaaaagaattcactaagttccagaagacaaagctttaattgccagacgtatacaaacacacactcacacgtacacacccacacaatacttcaggggtttttatacatgttattttagggcataagctgagtactatacccccacaccccatcaaaaaaggaacaacaaaaaaatcccaattttaccctcccccaataatctagaaaaccctcccttcacccctgatgtacaaagtgtatgcacaacggtggcattctaccagccacacaaagcatgctcaaacagatgtcaccagttcagtcactccattggcatggcaacaggcaggtttacgggatgtttcccaatagtggttattacacagtcagcaccactgtgaattttgtgaatttgaaaaaaaaaagtgtaatttatggattcgcagtctgtaccctccgccccaccccccaaagcccagtcagtttctcccgtgcaggccccgcccccgggtggctcagcccagctgctgcctgggaaggtcctagtgcctctggccgcccctagcatgtcagtgcggggtggaggggccggccagccactgccactggtgagcccgcccttctcagtacctgtgcagaatggtgcccagccccccagcaagatcatccagctgaccccggtgcctgtgagcacacccagcggcctggtgccgcccctgagcccagccacactccctggacccacctctcagcctcagaaggtcctgttgccctcctccaccagaatcacctatgtgcagtcagcgggcgggcacgcgctgcccctgggtaccagccctgcgtccagccaggctggaacagtcacctcgtacgggcccacgagctctgtagctctaggcttcacctcgctggggcccagcggccccgccttcgtgcagcccctgctctcagcaggccaagccccactgctggctcccggtcaggtgggcgtgtcacctgtgcccagtccccagctgccgcctgcctgtgcagcccccggaggtcctgtcataacagcattttactctggcagccctgcacccacctcctcagcacccctggcccagccatcccaggcccccccaagcctggtctacactgtggccaccagcacaaccccacctgcagccaccattctgcccaagggcccgccagcccctgccactgccaccccagccccgactagccctttccccagcgccacagcaggttccatgacctacagcttagtggcccccaaggcccagcggcccagcccgaaggccccccagaaagtgaaggcagccatcgccagcattcccgtggggtcctttgaggcaggtgcctctgggcggcctggccctgcaccccggcagcctctggagcctggcccagtccgagagccaactgccccagagtctgagcttgaggggcagcccacaccaccagcccctccacccctgccagagacctggactcccacggcccggagcagccccccactgcccccacctgctgaggagcggaccagcgccaagggccctgagaccatggccagcaaattccccagctcatcttcagactggcgcgtccctgggcagggcctggagaatcgtggggagcctcccactcctcccagcccggccccagctccagctgtagcccctggtggcagcagcgagagcagcagtgggcgggcagccggggacaccccggagcgcaaggaggcggctggtactggcaagaaggtgaaggtgcggcccccgcccctgaagaagacctttgactctgtggacaaaagtggacttcgaagagccctcggccgattcacc

SEQ ID NO: 446469 - DNA, 419 bp, Homo sapiens
agcaggggcctctctcctctgctggttccacttcccccagggagccaggcagtgtgaggggaagcccactggtatcctaggcccgccccaaaagtccagccaggggtaggtcccagcctagggcttgctcttccaccacccacctcttggggctgaaggttggacccctgggaccagcctcttggtgaggaagcatcttcctgtgcatatcctcaaggaaacacctggcacttgtgccctctctgggtagagacttgttacaattctctcttctgccctcccaacttgggttgtactttctaagaaggtgattccccctgcccttgcccccttccccagaacaaaacatgttgatcatgtgcaatatttcttactgtgccgagaagccgcaatgagcgagattaaagctgtttaacaca

SEQ ID NO: 446470 - DNA, 5468 bp, Homo sapiens
ttccacccctcacctgctgccctgttgcccgttttggtgcccagcagctataccagccaccctgcccccaagaaggaagtcatcatgggccggcctggaacagtgtggacgaatgtggaacctcgctctgtggctgtgttcccttggcactccttagtccccttcctggcacccagccagcctgacccctccgtgcagccgagcgaggcccagcaacctgccagccacccagtggcctccaaccagagcaaagaacctgctgagtcggcagctgttgctcatgaacggccaccaggtgggacagggagtgctgaccctgagcggccccctggagccacatgccctgagagcccaggacccggacccccacaccctttgggggtggtggaatctggtaagggtccgcctcccaccacggaggaggaggcctccggccccccaggagagccccggctggacagtgagacagagagtgaccatgatgatgccttcctctccatcatgtctcctgagatccagttgcctctaccgcccggaaaacgtcggacccagtccctcagtgccctacccaaggaacgggactcatcttctgagaaggatggacgcagccccaacaagcgggagaaggaccacatccggcggcccatgaatgccttcatgatcttcagcaagcggcaccgggccctggtccaccagcgtcatcccaaccaggacaaccggaccgtcagcaagatcctgggcgagtggtggtatgccctggggcccaaggagaagcagaagtaccacgacctggccttccaggtgaaggaggcccacttcaaggcccacccagattggaagtggtgcaacaaggaccgaaagaagtccagctcagaggccaagcccacgagcctggggctggcaggagggcacaaggagacgcgggagcggagcatgtcggagacgggcactgctgctgcccctggggtgtcctctgagctcctgtccgttgcagcccagacactcctgagctcagacaccaaggctccggggagcagctcctgtggggcagaacggctacacacagttgggggacctggctcagcccggccccgagctttctcccacagcggggtacacagcctggacggcggagaagtagacagtcaggcgctacaggaactgacgcagatggtgtctggccctgcatcgtactctggcccaaagccttctacccagtatggagctccaggaccctttgcagcccctggtgagggaggtgccttggcggccactgggcggcccccgctgctgcccacccgagcttctcgttctcagcgtgcggccagtgaggacatgacgagtgatgaggagcgcatggtcatctgtgaggaggaaggggatgatgatgtcattgctgacgatggcttcggcaccactgacattgatctcaagtgcaaggagcgggtgaccgacagcgagagtggggacagctctggggaggacccagagggcaacaagggctttggtcggaaggtgttttcacctgtgatccgttcctcctttacccactgccgccccccactggaccctgagcccccagggcccccggatcctcctgtagcctttggcaaaggctatggttccgccccatcctcctctgcgtcctcgcctgcttcctcctcagcctcggcagccacctccttctcactgggctcaggaaccttcaaggcccaggagtctggtcagggcagcacagcgggccccctacggcccccaccccctggggctgggggtccagcgacaccttccaaggcaacccggttcctcccaatggatcctgccaccttccggcgcaagagacccgaaagtgtgggtggcctggagccaccaggcccctcagtcatcgcggcccctcccagcggaggaggaaacatcctgcagacactggtgctgcccccaaacaaggaggagcaagagggcggcggagccagagtgccctccgcccccgccccatcactggcctatggggccccagcagctcccctgtcccgtcctgccgccaccatggtcaccaatgtggtgcggcctgtcagcagcactcctgtgcccatcgcctctaagcccttccccacctctggccgggctgaggcgtctccaaatgacacagcaggtgccaggactgaaatgggcactgggtctcgggtgcctgggggctccccgctgggtgtcagcttagtgtattcggacaagaagtcggcagcagccacctcaccagccccacacttggtggctggacccctgctgggcactgtggggaaggcgcctgccactgtcactaacctactggtgggcaccccggggtatggggcccctgcgccccctgctgtccagttcattgcccagggggcccctggtggtgggaccactgcgggctcaggagcaggtgctgggagtggccccaatgggccagtacccctgggcatcctgcaaccaggtgccctgggcaaggctgggggaatcacccaggtacagtacatcctgcccacgctgccccagcagcttcaggtggcacctgccccagcaccagcccctgggaccaaggcagcggctcccagcggccctgcacccaccaccagcatccgtttcaccctcccaccgggcacttccaccaacggcaaagtcctggctgccactgcacccactcctggcatccccatcctgcagtctgtaccctccgccccaccccccaaagcccagtcagtttctcccgtgcaggccccgcccccgggtggctcagcccagctgctgcctgggaaggtcctagtgcctctggccgcccctagcatgtcagtgcggggtggaggggccggccagccactgccactggtgagcccgcccttctcagtacctgtgcagaatggtgcccagccccccagcaagatcatccagctgaccccggtgcctgtgagcacacccagcggcctggtgccgcccctgagcccagccacactccctggacccacctctcagcctcagaaggtcctgttgccctcctccaccagaatcacctatgtgcagtcagcgggcgggcacgcgctgcccctgggtaccagccctgcgtccagccaggctggaacagtcacctcgtacgggcccacgagctctgtagctctaggcttcacctcgctggggcccagcggccccgccttcgtgcagcccctgctctcagcaggccaagccccactgctggctcccggtcaggtgggcgtgtcacctgtgcccagtccccagctgccgcctgcctgtgcagcccccggaggtcctgtcataacagcattttactctggcagccctgcacccacctcctcagcacccctggcccagccatcccaggcccccccaagcctggtctacactgtggccaccagcacaaccccacctgcagccaccattctgcccaagggcccgccagcccctgccactgccaccccagccccgactagccctttccccagcgccacagcaggttccatgacctacagcttagtggcccccaaggcccagcggcccagcccgaaggccccccagaaagtgaaggcagccatcgccagcattcccgtggggtcctttgaggcaggtgcctctgggcggcctggccctgcaccccggcagcctctggagcctggcccagtccgagagccaactgccccagagtctgagcttgaggggcagcccacaccaccagcccctccacccctgccagagacctggactcccacggcccggagcagccccccactgcccccacctgctgaggagcggaccagcgccaagggccctgagaccatggccagcaaattccccagctcatcttcagactggcgcgtccctgggcagggcctggagaatcgtggggagcctcccactcctcccagcccggccccagctccagctgtagcccctggtggcagcagcgagagcagcagtgggcgggcagccggggacaccccggagcgcaaggaggcggctggtactggcaagaaggtgaaggtgcggcccccgcccctgaagaagacctttgactctgtggacaacagggtcctgtcagaagtggacttcgaagagcgctttgctgagttgcctgagtttcggcctgaggaggtgctgccctcccccaccctgcagtctctggccacctcaccccgggccatcctgggctcttaccgcaagaagaggaagaactccacggacctggattcagcacccgaggaccccacctcgcccaagcgcaagatgagaagacgctccagctgcagctcggagcccaacacccccaagagtgccaagtgcgagggggacatcttcacctttgaccgtacaggtacagaagccgaggacgtgcttggggagctagagtatgacaaggtgccatactcctccctgcggcgcaccctggaccagcgccgggccctggtcatgcagctctttcaggaccatggcttcttcccgtcagcccaggccacagccgccttccaggcccgctatgcagacatctttccctccaaggtttgtctgcagttgaagatccgtgaggtgcgccagaagatcatgcaggctgccactcccacggagcagccccctggagctgaggctcctctccctgtaccgccccccactggcaccgctgctgcccctgcccccactcccagccccgcagggggccctgaccccacctcacccagctcggactctggcacggcccaggctgccccgccactgcctccacccccagagtcggggcctggacagcctggctgggagggggctccccagccctcccccccacccccaggtccctccacagctgccacaggcaggtgagggacccctgagaagatgccaggacttatagtaccccctcaggacatggacagtatgtgggggcaggaaggttatctcctcccgggtaaagccatttcgtcctctccagtttggggcggaatgaggcctgctcctcttgtaaatacccccttccctcgaagctccctcccggtgctggggggcagctgaggggctgcaggggcagtctccctcctccaagcccctgtacataacctggagcgtgtgaccttcagagcttttcactttatgcaaaatggctcctgtgagggctgcaagctggagggtggtgcaggccttgggccacagggaggcgcctgtggaatagggggagttcatgcaccccttttttccccagaggggctggactcaggttagtttgggggtgggggctcctgcactttgccacaggcacggggagggttttctcctcaccccctctgccctcccaacttgggttgtactttctaagaaggtgattccccctgcccttgcccccttccccagaacaaaacatgttgatcatgtgcaatatttcttactgtgccgagaagccgcaatgagcgagattaaagctgtttaacaca

SEQ ID NO: 446471 - DNA, 2489 bp, Homo sapiens
ctaaccctgccccccaggcagttgtatactgtaggctagaagttaacagagacccccttctcctcaaaaataaatgagtgaaggggcacaacactgtggagagaagccttctagtttttactcatttcaaggagaaactggaactaattaatgaatggaccatatatctagtttattttattaagactcccaataactcactcagtaaccttcgtgcagccactgctctcagcaggccaagccccactgctggctcccggtcaggtgggcgtgtcacctgtgcccagtccccagctgccgcctgcctgtgcagcccccggaggtcctgtcataacagcattttactctggcagccctgcacccacctcctcagcacccctggcccagccatcccaggcccccccaagcctggtctacactgtggccaccagcacaaccccacctgcagccaccattctgcccaagggcccgccagcccctgccactgccaccccagccccgactagccctttccccagcgccacagcaggttccatgacctacagcttagtggcccccaaggcccagcggcccagcccgaaggccccccagaaagtgaaggcagccatcgccagcattcccgtggggtcctttgaggcaggtgcctctgggcggcctggccctgcaccccggcagcctctggagcctggcccagtccgagagccaactgccccagagtctgagcttgaggggcagcccacaccaccagcccctccacccctgccagagacctggactcccacggcccggagcagccccccactgcccccacctgctgaggagcggaccagcgccaagggccctgagaccatggccagcaaattccccagctcatcttcagactggcgcgtccctgggcagggcctggagaatcgtggggagcctcccactcctcccagcccggccccagctccagctgtagcccctggtggcagcagcgagagcagcagtgggcgggcagccggggacaccccggagcgcaaggaggcggctggtactggcaagaaggtgaaggtgcggcccccgcccctgaagaagacctttgactctgtggacaacagggtcctgtcagaagtggacttcgaagagcgctttgctgagttgcctgagtttcggcctgaggaggtgctgccctcccccaccctgcagtctctggccacctcaccccgggccatcctgggctcttaccgcaagaagaggaagaactccacggacctggattcagcacccgaggaccccacctcgcccaagcgcaagatgagaagacgctccagctgcagctcggagcccaacacccccaagagtgccaagtgcgagggggacatcttcacctttgaccgtacaggtacagaagccgaggacgtgcttggggagctagagtatgacaaggtgccatactcctccctgcggcgcaccctggaccagcgccgggccctggtcatgcagctctttcaggaccatggcttcttcccgtcagcccaggccacagccgccttccaggcccgctatgcagacatctttccctccaaggtttgtctgcagttgaagatccgtgaggtgcgccagaagatcatgcaggctgccactcccacggagcagccccctggagctgaggctcctctccctgtaccgccccccactggcaccgctgctgcccctgcccccactcccagccccgcagggggccctgaccccacctcacccagctcggactctggcacggcccaggctgccccgccactgcctccacccccagagtcggggcctggacagcctggctgggagggggctccccagccctcccccccacccccaggtccctccacagctgccacaggcaggtgagggacccctgagaagatgccaggacttatagtaccccctcaggacatggacagtatgtgggggcaggaaggttatctcctcccgggtaaagccatttcgtcctctccagtttggggcggaatgaggcctgctcctcttgtaaatacccccttccctcgaagctccctcccggtgctggggggcagctgaggggctgcaggggcagtctccctcctccaagcccctgtacataacctggagcgtgtgaccttcagagcttttcactttatgcaaaatggctcctgtgagggctgcaagctggagggtggtgcaggccttgggccacagggaggcgcctgtggaatagggggagttcatgcaccccttttttccccagaggggctggactcaggttagtttgggggtgggggctcctgcactttgccacaggcacggggagggttttctcctcaccccctctgccctcccaacttgggttgtactttctaagaaggtgattccccctgcccttgcccccttccccagaacaaaacatgttgatcatgtgcaatatttcttactgtgccgagaagccgcaatgagcgagattaaagctgtttaacaca

SEQ ID NO: 446472 - DNA, 4393 bp, Homo sapiens
ttccacccctcacctgctgccctgttgcccgttttggtgcccagcagctataccagccaccctgcccccaagaaggaagtcatcatgggccggcctggaacagtgtggacgaatgtggaacctcgctctgtggctgtgttcccttggcactccttagtccccttcctggcacccagccagcctgacccctccgtgcagccgagcgaggcccagcaacctgccagccacccagtggcctccaaccagagcaaagaacctgctgagtcggcagctgttgctcatgaacggccaccaggtgggacagggagtgctgaccctgagcggccccctggagccacatgccctgagagcccaggacccggacccccacaccctttgggggtggtggaatctggtaagggtccgcctcccaccacggaggaggaggcctccggccccccaggagagccccggctggacagtgagacagagagtgaccatgatgatgccttcctctccatcatgtctcctgagatccagttgcctctaccgcccggaaaacgtcggacccagtccctcagtgccctacccaaggaacgggactcatcttctgagaaggatggacgcagccccaacaagcgggagaaggaccacatccggcggcccatgaatgccttcatgatcttcagcaagcggcaccgggccctggtccaccagcgtcatcccaaccaggacaaccggaccgtcagcaagatcctgggcgagtggtggtatgccctggggcccaaggagaagcagaagtaccacgacctggccttccaggtgaaggaggcccacttcaaggcccacccagattggaagtggtgcaacaaggaccgaaagaagtccagctcagaggccaagcccacgagcctggggctggcaggagggcacaaggagacgcgggagcggagcatgtcggagacgggcactgctgctgcccctggggtgtcctctgagctcctgtccgttgcagcccagacactcctgagctcagacaccaaggctccggggagcagctcctgtggggcagaacggctacacacagttgggggacctggctcagcccggccccgagctttctcccacagcggggtacacagcctggacggcggagaagtagacagtcaggcgctacaggaactgacgcagatggtgtctggccctgcatcgtactctggcccaaagccttctacccagtatggagctccaggaccctttgcagcccctggtgagggaggtgccttggcggccactgggcggcccccgctgctgcccacccgagcttctcgttctcagcgtgcggccagtgaggacatgacgagtgatgaggagcgcatggtcatctgtgaggaggaaggggatgatgatgtcattgctgacgatggcttcggcaccactgacattgatctcaagtgcaaggagcgggtgaccgacagcgagagtggggacagctctggggaggacccagagggcaacaagggctttggtcggaaggtgttttcacctgtgatccgttcctcctttacccactgccgccccccactggaccctgagcccccagggcccccggatcctcctgtagcctttggcaaaggctatggttccgccccatcctcctctgcgtcctcgcctgcttcctcctcagcctcggcagccacctccttctcactgggctcaggaaccttcaaggcccaggagtctggtcagggcagcacagcgggccccctacggcccccaccccctggggctgggggtccagcgacaccttccaaggcaacccggttcctcccaatggatcctgccaccttccggcgcaagagacccgaaagtgtgggtggcctggagccaccaggcccctcagtcatcgcggcccctcccagcggaggaggaaacatcctgcagacactggtgctgcccccaaacaaggaggagcaagagggcggcggagccagagtgccctccgcccccgccccatcactggcctatggggccccagcagctcccctgtcccgtcctgccgccaccatggtcaccaatgtggtgcggcctgtcagcagcactcctgtgcccatcgcctctaagcccttccccacctctggccgggctgaggcgtctccaaatgacacagcaggtgccaggactgaaatgggcactgggtctcgggtgcctgggggctccccgctgggtgtcagcttagtgtattcggacaagaagtcggcagcagccacctcaccagccccacacttggtggctggacccctgctgggcactgtggggaaggcgcctgccactgtcactaacctactggtgggcaccccggggtatggggcccctgcgccccctgctgtccagttcattgcccagggggcccctggtggtgggaccactgcgggctcaggagcaggtgctgggagtggccccaatgggccagtacccctgggcatcctgcaaccaggtgccctgggcaaggctgggggaatcacccaggtacagtacatcctgcccacgctgccccagcagcttcaggtggcacctgccccagcaccagcccctgggaccaaggcagcggctcccagcggccctgcacccaccaccagcatccgtttcaccctcccaccgggcacttccaccaacggcaaagtcctggctgccactgcacccactcctggcatccccatcctgcagtctgtaccctccgccccaccccccaaagcccagtcagtttctcccgtgcaggccccgcccccgggtggctcagcccagctgctgcctgggaaggtcctagtgcctctggccgcccctagcatgtcagtgcggggtggaggggccggccagccactgccactggtgagcccgcccttctcagtacctgtgcagaatggtgcccagccccccagcaagatcatccagctgaccccggtgcctgtgagcacacccagcggcctggtgccgcccctgagcccagccacactccctggacccacctctcagcctcagaaggtcctgttgccctcctccaccagaatcacctatgtgcagtcagcgggcgggcacgcgctgcccctgggtaccagccctgcgtccagccaggctggaacagtcacctcgtacgggcccacgagctctgtagctctaggcttcacctcgctggggcccagcggccccgccttcgtgcagcccctgctctcagcaggccaagccccactgctggctcccggtcaggtgggcgtgtcacctgtgcccagtccccagctgccgcctgcctgtgcagcccccggaggtcctgtcataacagcattttactctggcagccctgcacccacctcctcagcacccctggcccagccatcccaggcccccccaagcctggtctacactgtggccaccagcacaaccccacctgcagccaccattctgcccaagggcccgccagcccctgccactgccaccccagccccgactagccctttccccagcgccacagcaggttccatgacctacagcttagtggcccccaaggcccagcggcccagcccgaaggccccccagaaagtgaaggcagccatcgccagcattcccgtggggtcctttgaggcaggtgcctctgggcggcctggccctgcaccccggcagcctctggagcctggcccagtccgagagccaactgccccagagtctgagcttgaggggcagcccacaccaccagcccctccacccctgccagagacctggactcccacggcccggagcagccccccactgcccccacctgctgaggagcggaccagcgccaagggccctgagaccatggccagcaaattccccagctcatcttcagactggcgcgtccctgggcagggcctggagaatcgtggggagcctcccactcctcccagcccggccccagctccagctgtagcccctggtggcagcagcgagagcagcagtgggcgggcagccggggacaccccggagcgcaaggaggcggctggtactggcaagaaggtgaaggtgcggcccccgcccctgaagaagacctttgactctgtggacaacagggtcctgtcagaagtggacttcgaagagcgctttgctgagttgcctgagtttcggcctgaggaggtgctgccctcccccaccctgcagtctctggccacctcaccccgggccatcctgggctcttaccgcaagaagaggaagaactccacggacctggattcagcacccgaggaccccacctcgcccaagcgcaagatgagaagacgctccagctgcagctcggagcccaacacccccaagagtgccaagtgcgagggggacatcttcacctttgaccgtacaggtgccgtggtgggcagaactttgggggcct

SEQ ID NO: 446473 - DNA, 212 bp, Homo sapiens
cccagagggcaggaatcagcaggaatgagatgctggactggtggtgggtggtggtttttttttttcaccaagtggcccagaaattccagcctgcttctgcctagtacctagaaatatctatgggttgttgggccagtctaggtgctggtgacaggcttactgactgtcatagcgccactctctactttacagtgtcctctgagctcctgtcc

SEQ ID NO: 446474 - DNA, 5472 bp, Homo sapiens
ggaggtgcgagcccctgccgggtcccccctgcgccggaccatgtattcggcccacaggcccctgatgcccgcgtccagcgcggcctcccgtggcctcggcatgttcgtgtggacgaatgtggaacctcgctctgtggctgtgttcccttggcactccttagtccccttcctggcacccagccagcctgacccctccgtgcagccgagcgaggcccagcaacctgccagccacccagtggcctccaaccagagcaaagaacctgctgagtcggcagctgttgctcatgaacggccaccaggtgggacagggagtgctgaccctgagcggccccctggagccacatgccctgagagcccaggacccggacccccacaccctttgggggtggtggaatctggtaagggtccgcctcccaccacggaggaggaggcctccggccccccaggagagccccggctggacagtgagacagagagtgaccatgatgatgccttcctctccatcatgtctcctgagatccagttgcctctaccgcccggaaaacgtcggacccagtccctcagtgccctacccaaggaacgggactcatcttctgagaaggatggacgcagccccaacaagcgggagaaggaccacatccggcggcccatgaatgccttcatgatcttcagcaagcggcaccgggccctggtccaccagcgtcatcccaaccaggacaaccggaccgtcagcaagatcctgggcgagtggtggtatgccctggggcccaaggagaagcagaagtaccacgacctggccttccaggtgaaggaggcccacttcaaggcccacccagattggaagtggtgcaacaaggaccgaaagaagtccagctcagaggccaagcccacgagcctggggctggcaggagggcacaaggagacgcgggagcggagcatgtcggagacgggcactgctgctgcccctggggtgtcctctgagctcctgtccgttgcagcccagacactcctgagctcagacaccaaggctccggggagcagctcctgtggggcagaacggctacacacagttgggggacctggctcagcccggccccgagctttctcccacagcggggtacacagcctggacggcggagaagtagacagtcaggcgctacaggaactgacgcagatggtgtctggccctgcatcgtactctggcccaaagccttctacccagtatggagctccaggaccctttgcagcccctggtgagggaggtgccttggcggccactgggcggcccccgctgctgcccacccgagcttctcgttctcagcgtgcggccagtgaggacatgacgagtgatgaggagcgcatggtcatctgtgaggaggaaggggatgatgatgtcattgctgacgatggcttcggcaccactgacattgatctcaagtgcaaggagcgggtgaccgacagcgagagtggggacagctctggggaggacccagagggcaacaagggctttggtcggaaggtgttttcacctgtgatccgttcctcctttacccactgccgccccccactggaccctgagcccccagggcccccggatcctcctgtagcctttggcaaaggctatggttccgccccatcctcctctgcgtcctcgcctgcttcctcctcagcctcggcagccacctccttctcactgggctcaggaaccttcaaggcccaggagtctggtcagggcagcacagcgggccccctacggcccccaccccctggggctgggggtccagcgacaccttccaaggcaacccggttcctcccaatggatcctgccaccttccggcgcaagagacccgaaagtgtgggtggcctggagccaccaggcccctcagtcatcgcggcccctcccagcggaggaggaaacatcctgcagacactggtgctgcccccaaacaaggaggagcaagagggcggcggagccagagtgccctccgcccccgccccatcactggcctatggggccccagcagctcccctgtcccgtcctgccgccaccatggtcaccaatgtggtgcggcctgtcagcagcactcctgtgcccatcgcctctaagcccttccccacctctggccgggctgaggcgtctccaaatgacacagcaggtgccaggactgaaatgggcactgggtctcgggtgcctgggggctccccgctgggtgtcagcttagtgtattcggacaagaagtcggcagcagccacctcaccagccccacacttggtggctggacccctgctgggcactgtggggaaggcgcctgccactgtcactaacctactggtgggcaccccggggtatggggcccctgcgccccctgctgtccagttcattgcccagggggcccctggtggtgggaccactgcgggctcaggagcaggtgctgggagtggccccaatgggccagtacccctgggcatcctgcaaccaggtgccctgggcaaggctgggggaatcacccaggtacagtacatcctgcccacgctgccccagcagcttcaggtggcacctgccccagcaccagcccctgggaccaaggcagcggctcccagcggccctgcacccaccaccagcatccgtttcaccctcccaccgggcacttccaccaacggcaaagtcctggctgccactgcacccactcctggcatccccatcctgcagtctgtaccctccgccccaccccccaaagcccagtcagtttctcccgtgcaggccccgcccccgggtggctcagcccagctgctgcctgggaaggtcctagtgcctctggccgcccctagcatgtcagtgcggggtggaggggccggccagccactgccactggtgagcccgcccttctcagtacctgtgcagaatggtgcccagccccccagcaagatcatccagctgaccccggtgcctgtgagcacacccagcggcctggtgccgcccctgagcccagccacactccctggacccacctctcagcctcagaaggtcctgttgccctcctccaccagaatcacctatgtgcagtcagcgggcgggcacgcgctgcccctgggtaccagccctgcgtccagccaggctggaacagtcacctcgtacgggcccacgagctctgtagctctaggcttcacctcgctggggcccagcggccccgccttcgtgcagcccctgctctcagcaggccaagccccactgctggctcccggtcaggtgggcgtgtcacctgtgcccagtccccagctgccgcctgcctgtgcagcccccggaggtcctgtcataacagcattttactctggcagccctgcacccacctcctcagcacccctggcccagccatcccaggcccccccaagcctggtctacactgtggccaccagcacaaccccacctgcagccaccattctgcccaagggcccgccagcccctgccactgccaccccagccccgactagccctttccccagcgccacagcaggttccatgacctacagcttagtggcccccaaggcccagcggcccagcccgaaggccccccagaaagtgaaggcagccatcgccagcattcccgtggggtcctttgaggcaggtgcctctgggcggcctggccctgcaccccggcagcctctggagcctggcccagtccgagagccaactgccccagagtctgagcttgaggggcagcccacaccaccagcccctccacccctgccagagacctggactcccacggcccggagcagccccccactgcccccacctgctgaggagcggaccagcgccaagggccctgagaccatggccagcaaattccccagctcatcttcagactggcgcgtccctgggcagggcctggagaatcgtggggagcctcccactcctcccagcccggccccagctccagctgtagcccctggtggcagcagcgagagcagcagtgggcgggcagccggggacaccccggagcgcaaggaggcggctggtactggcaagaaggtgaaggtgcggcccccgcccctgaagaagacctttgactctgtggacaacagggtcctgtcagaagtggacttcgaagagcgctttgctgagttgcctgagtttcggcctgaggaggtgctgccctcccccaccctgcagtctctggccacctcaccccgggccatcctgggctcttaccgcaagaagaggaagaactccacggacctggattcagcacccgaggaccccacctcgcccaagcgcaagatgagaagacgctccagctgcagctcggagcccaacacccccaagagtgccaagtgcgagggggacatcttcacctttgaccgtacaggtacagaagccgaggacgtgcttggggagctagagtatgacaaggtgccatactcctccctgcggcgcaccctggaccagcgccgggccctggtcatgcagctctttcaggaccatggcttcttcccgtcagcccaggccacagccgccttccaggcccgctatgcagacatctttccctccaaggtttgtctgcagttgaagatccgtgaggtgcgccagaagatcatgcaggctgccactcccacggagcagccccctggagctgaggctcctctccctgtaccgccccccactggcaccgctgctgcccctgcccccactcccagccccgcagggggccctgaccccacctcacccagctcggactctggcacggcccaggctgccccgccactgcctccacccccagagtcggggcctggacagcctggctgggagggggctccccagccctcccccccacccccaggtccctccacagctgccacaggcaggtgagggacccctgagaagatgccaggacttatagtaccccctcaggacatggacagtatgtgggggcaggaaggttatctcctcccgggtaaagccatttcgtcctctccagtttggggcggaatgaggcctgctcctcttgtaaatacccccttccctcgaagctccctcccggtgctggggggcagctgaggggctgcaggggcagtctccctcctccaagcccctgtacataacctggagcgtgtgaccttcagagcttttcactttatgcaaaatggctcctgtgagggctgcaagctggagggtggtgcaggccttgggccacagggaggcgcctgtggaatagggggagttcatgcaccccttttttccccagaggggctggactcaggttagtttgggggtgggggctcctgcactttgccacaggcacggggagggttttctcctcaccccctctgccctcccaacttgggttgtactttctaagaaggtgattccccctgcccttgcccccttccccagaacaaaacatgttgatcatgtgcaatatttcttactgtgccgagaagccgcaatgagcgagattaaagctgtttaacaca

SEQ ID NO: 446475 - DNA, 254 bp, Homo sapiens
ggaggtgcgagcccctgccgggtcccccctgcgccggaccatgtattcggcccacaggcccctgatgcccgcgtccagcgcggcctcccgtggcctcggcatgttcgtgtggacgaatgtggaacctcgctctgtggctgtgttcccttggcactccttagcccccttccccagaacaaaacatgttgatcatgtgcaatatttcttactgtgccgagaagccgcaatgagcgagattaaagctgtttaacaca

SEQ ID NO: 446476 - DNA, 1347 bp, Homo sapiens
cccgggcatcctggggtgaggtggcagagactgcagggtgggggagggcagcacctcctcaccccgggccatcctgggctcttaccgcaagaagaggaagaactccacggacctggattcagcacccgaggaccccacctcgcccaagcgcaagatgagaagacgctccagctgcagctcggagcccaacacccccaagagtgccaagtgcgagggggacatcttcacctttgaccgtacaggtacagaagccgaggacgtgcttggggagctagagtatgacaaggtgccatactcctccctgcggcgcaccctggaccagcgccgggccctggtcatgcagctctttcaggaccatggcttcttcccgtcagcccaggccacagccgccttccaggcccgctatgcagacatctttccctccaaggtttgtctgcagttgaagatccgtgaggtgcgccagaagatcatgcaggctgccactcccacggagcagccccctggagctgaggctcctctccctgtaccgccccccactggcaccgctgctgcccctgcccccactcccagccccgcagggggccctgaccccacctcacccagctcggactctggcacggcccaggctgccccgccactgcctccacccccagagtcggggcctggacagcctggctgggagggggctccccagccctcccccccacccccaggtccctccacagctgccacaggcaggtgagggacccctgagaagatgccaggacttatagtaccccctcaggacatggacagtatgtgggggcaggaaggttatctcctcccgggtaaagccatttcgtcctctccagtttggggcggaatgaggcctgctcctcttgtaaatacccccttccctcgaagctccctcccggtgctggggggcagctgaggggctgcaggggcagtctccctcctccaagcccctgtacataacctggagcgtgtgaccttcagagcttttcactttatgcaaaatggctcctgtgagggctgcaagctggagggtggtgcaggccttgggccacagggaggcgcctgtggaatagggggagttcatgcaccccttttttccccagaggggctggactcaggttagtttgggggtgggggctcctgcactttgccacaggcacggggagggttttctcctcaccccctctgccctcccaacttgggttgtactttctaagaaggtgattccccctgcccttgcccccttccccagaacaaaacatgttgatcatgtgcaatatttcttactgtgccgagaagccgcaatgagcgagattaaagctgtttaacaca

SEQ ID NO: 446477 - DNA, 516 bp, Homo sapiens
gtgggcgtgtcacctgtgcccagtccccagctgccgcctgcctgtgcagcccccggaggtcctgtcataacagcattttactctggcagccctgcacccacctcctcagcacccctggcccagccatcccaggcccccccaagcctggtctacactgtggccaccagcacaaccccacctgcagccaccattctgcccaagggcccgccagcccctgccactgccaccccagccccgactagccctttccccagcgccacaggtaggtgtcagatcaacccagagcagagtgagttgggggacccaggggatgggctccagtcaggcctggctcagcaaacaattttctccccactagcaggttccatgacctacagcttagtggcccccaaggcccagcggcccagcccgaaggccccccagaaagtgaaggcagccatcgccagcattcccgtggggtcctttgaggcaggtgcctctgggcggcctggccctgcaccccggcagcctctggag

SEQ ID NO: 446478 - DNA, 931 bp, Homo sapiens
ccaccgcgcccggcctagaatattctttttgtaaccctcagtatacttgggaaaacagtcatcactgatcgtttaccaaataattttgtagcagaaagaatgaaagggtagtaaggtcgttattggaccttttttttttttgagacagggtctcgctctgtcacccagtttagagtatagtggcatgatcatggctcactgcagccttgacctcccagtctcaagtgatcctccttcctcagcctcccgagtagctgggactagaggcatgcaccaaccacacctggctaattaaaaaaaaattttttttatagagacgaaatcttcctgtgttgtccaggttggtctcaaactcctgggctcaagcagtcctcctgcctcagcctccaaaagtgctgggattacaggcatgagccactgtgccccccattattagacttttttaaaggccattattgactccatgctggagtatagtgaagcaaacacaactcactgcagccttgacttcctgggctcaagagatccttccaccctaccccaggcccccaagtagctgagattacaggcacatgccaccatgcctggctaacttttgtattttgcatagtgatggtgtttcaccatgttgtccaggctggtctcgaactctggagccaaagtgatctgcccacctcagcctcccagagtactcggattacgggcgtgagccccaccacgcatggccttattagacattttagtgagggtttaaacatagcaaatctaactttttcatattttccaggttttgatgatatatgtatctacaatgaatgcagttctctaaatgtaactaactgctcactgttatacatgaacctagaacataccaatcttataaatattgatagcagatttaaaatatatctctaataaattctagcttatt

SEQ ID NO: 446479 - DNA, 2229 bp, Homo sapiens
taacttcctaaaattctccgattctaaaagaaagctcctaaatagaagccaaaaagtagccgcccaacttgaaactccccacaagccgggtaaatagcgcgatacgcagcagctagagttctcgcgtttcccacggcgcaggagcactggagggcccccctccgcccccggccccgccaggaaattagtgcgcatgtgccggtcatccggaagttaccgcagtggccgccggaattaggcgaaaagccggaagtaaacattacgagattggcttggattctgtcggatggacttggggctagctgcggcggggctggaggaggccagataaccatgtcagccacagttgtagatgcagttaatgctgcacccctatcggggtccaaagaaatgagtttggaagaaccaaagaagatgaccagagaggactggagaaagaagaaggagctagaagaacagcgaaaattgggcaatgctcctgcagaagttgatgaagaaggaaaagacatcaacccccatattcctcagtatatttcttcagtgccatggtatattgatccttcaaaaagacctactttaaaacaccagagaccacaaccagaaaaacaaaagcagttcagctcatctggagaatggtacaagaggggtgtaaaagagaattccataattactaagtaccgcaaaggagcatgtgaaaattgtggggccatgacacacaaaaagaaagactgctttgagagacctaggcgagttggagccaaatttacaggtactaatatagctccagatgaacatgtccagcctcaactgatgtttgactatgatgggaagagggatcggtggaatggctacaatccagaagaacacatgaaaattgttgaagagtatgccaaagttgatttggcaaaacgaacattgaaagcccagaaactccaagaggaattagcctcaggaaaattagtggaacaggctaattctccaaaacaccagtggggagaagaggaaccaaattctcagacggaaaaagatcataatagtgaagatgaggatgaagataaatatgcagatgatattgacatgcctggacagaattttgactccaagagacgaattactgtccggaatctcaggattcgagaagatattgcaaaatatttgaggaatttagatccaaattctgcctactatgatccaaaaactagagcaatgagagagaatccttatgccaatgcaggaaagaatccagatgaagtgagttatgctggagataactttgttaggtacacaggagataccatttcaatggctcagacacagttgtttgcatgggaagcctatgacaagggatctgaagtgcatctacaggcagatcctacaaagctagagctgttgtataagtccttcaaagtcaaaaaagaagatttcaaagaacagcagaaagaaagcatcctggaaaagtatggtggccaagaacatttggatgcccctccagctgaattgcttttagcccagactgaagactatgtggagtactcaagacatgggacagtcatcaaaggacaggagcgggctgttgcctgctctaagtatgaggaggatgtgaagatccacaatcacacacatatctggggatcgtactggaaagaaggccgatggggatacaaatgctgtcactcttttttcaagtattcctattgtactggagaagctgggaaggagattgttaactctgaggagtgtattataaatgagataactggggaagaatctgtgaaaaaacctcaaaccctcatggagctgcatcaagaaaaactgaaagaggaaaagaagaagaagaaaaagaaaaagaagaagcatcgaaagagcagttcagatagtgatgatgaagaaaagaagcatgaaaaattgaaaaaggcactgaacgcagaggaggcccgccttcttcatgtcaaggagaccatgcagattgatgagaggaagcggccttacaatagcatgtatgaaactcgagaacctactgaagaggaaatggaggcatatagaatgaaacgtcagaggccagatgaccccatggcctctttccttggacagtagcaactagtcagaagaccatccaagatagatgcagctgatacattcttttcagcttcttattgatgattgtagatagaaaaatccttgtttattcttcttgctgcctggctttaataaatatttcagatgcctcac

SEQ ID NO: 446480 - DNA, 466 bp, Homo sapiens
agtagaagggctgactccaaagctctttcaggcaatctgcgtttttgatagagcagttcatattcagtggggtgtgttggtactctgccacttttgaagaaaagacatctgatgtagagctgtgatacacattttattcctctcactataggcactgaacgcagaggaggcccgccttcttcatgtcaaggagaccatgcagattgatgagaggaagcggccttacaatagcatgtatgaaactcgagaacctactgaagaggaaatggaggcatatagaatgaaacgtcagaggccagatgaccccatggcctctttccttggacagtagcaactagtcagaagaccatccaagatagatgcagctgatacattcttttcagcttcttattgatgattgtagatagaaaaatccttgtttattcttcttgctgcctggctttaataaatatttcagatgcctcac

SEQ ID NO: 446481 - DNA, 239 bp, Homo sapiens
ggctcggtacctattcgtgtcggggttggaggaggccagataaccatgtcagccacagttgtagatgcagttaatgctgcacccctatcggggtccaaagaaatgagtttggaagaaccaaagaagatgaccagagaggactggagaaagaagaaggagctagaagaacagcgaaaattgggcaatgctcctgcagaagttgatgaagaaggaaaagacatcaaccccgaacacggata

SEQ ID NO: 446482 - DNA, 364 bp, Homo sapiens
ggctgtgtcataactttatcctgtgttaacccagactgaagactatgtggagtactcaagacatgggacagtcatcaaaggacaggagcgggctgttgcctgctctaagtatgaggaggatgtgaagatccacaatcacacacatatctggggatcgtactggaaagaaggccgatggggatacaaatgctgtcactcttttttcaagtattcctattgtactggagaagctgggaaggagattgttaactctgaggagtgtattataaatgagataactggggaagaaggaggctggtggaagggagctggtggaagggagaagtactgggctccagccccgcgttgatatggtggaagggag

SEQ ID NO: 446483 - DNA, 3736 bp, Homo sapiens
taacttcctaaaattctccgattctaaaagaaagctcctaaatagaagccaaaaagtagccgcccaacttgaaactccccacaagccgggtaaatagcgcgatacgcagcagctagagttctcgcgtttcccacggcgcaggagcactggagggcccccctccgcccccggccccgccaggaaattagtgcgcatgtgccggtcatccggaagttaccgcagtggccgccggaattaggcgaaaagccggaagtaaacattacgagattggcttggattctgtcggatggacttggggctagctgcggcggggctggaggaggccagataaccatgtcagccacagttgtagatgcagttaatgctgcacccctatcggggtccaaagaaatgagtttggaagaaccaaagaagatgaccagagaggactggagaaagaagaaggagctagaagaacagcgaaaattgggcaatgctcctgcagaagttgatgaagaaggaaaagacatcaacccccatattcctcagtatatttcttcagtgccatggtatattgatccttcaaaaagacctactttaaaacaccagagaccacaaccagaaaaacaaaagcagttcagctcatctggagaatggtacaagaggggtgtaaaagagaattccataattactaagtaccgcaaaggagcatgtgaaaattgtggggccatgacacacaaaaagaaagactgctttgagagacctaggcgagttggagccaaatttacaggtactaatatagctccagatgaacatgtccagcctcaactgatgtttgactatgatgggaagagggatcggtggaatggctacaatccagaagaacacatgaaaattgttgaagagtatgccaaagttgatttggcaaaacgaacattgaaagcccagaaactccaagaggaattagcctcaggaaaattagtggaacaggctaattctccaaaacaccagtggggagaagaggaaccaaattctcagacggaaaaagatcataatagtgaagatgaggatgaagataaatatgcagatgatattgacatgcctggacagaattttgactccaagagacgaattactgtccggaatctcaggattcgagaagatattgcaaaatatttgaggaatttagatccaaattctgcctactatgatccaaaaactagagcaatgagagagaatccttatgccaatgcaggaaagaatccagatgaagtgagttatgctggagataactttgttaggtacacaggagataccatttcaatggctcagacacagttgtttgcatgggaagcctatgacaagggatctgaagtgcatctacaggcagatcctacaaagctagagctgttgtataagtccttcaaagtcaaaaaagaagatttcaaagaacagcagaaagaaagcatcctggaaaagtatggtggccaagaacatttggatgcccctccagctgaattgcttttagcccagactgaagactatgtggagtactcaagacatgggacagtcatcaaaggacaggagcgggctgttgcctgctctaagtatgaggaggatgtgaagatccacaatcacacacatatctggggatcgtactggaaagaaggccgatggggatacaaatgctgtcactcttttttcaagtattcctattgtactggagaagctgggaaggagattgttaactctgaggagtgtattataaatgagataactggggaagaatctgtgaaaaaacctcaaaccctcatggagctgcatcaagaaaaactgaaagaggaaaagaagaagaagaaaaagaaaaagaagaagcatcgaaagagcagttcagatagtgatgatgaagaaaagaagcatgaaaaattgaaaaaggcactgaacgcagaggaggcccgccttcttcatgtcaaggagaccatgcagattgatgagaggaagcggccttacaatagcatgtatgaaactcgagaacctactgaagaggaaatggaggcatatagaatgaaacgtcagaggccagatgaccccatggcctctttccttggacagtagcaactagtcagaagaccatccaagatagatgcagctgatacattcttttcagcttcttattgatgattgtagatagaaaaatccttgtttattcttcttgctgcctggctttaataaatatttcagatgcctcacagtaagttcactcctttccatactgaggaaacaagaaaagaagaagaggcacatgaagtgtgcttttgggaatagaatttaaaattggattaagattttatttccagttttttttatttatttatttttttttttggagacggagtcttgctctgtcgcccaggctgaagtgcggtggcgcgatctcggctcactgcaagctccacctcccaggttcacgccattctcctgcctcagcctccctagtagttgggactacaggcgcccgccaccatgctcagctaattttttgtatttttagtagagacggtttcatcgtgttagccaggatggtctcgatctcctgaccttgtgatccacccgcctcagcctcccaaagtgctgagattacaggcgtgagccacccgcgcctggcctatttccagttttatgtgagtcatgtaaaaaagccttggctctctacctattaagaatgtctctttctctatatttattaagcttcaaactttattgcttcgatttttgtggccctatatttagtattagcacaccttggttttgagaaaaaaacagggctttgtttttttaaataattactagcaactctgtgactacatttatttttattttttttagagacaggatcttgctatgttgcccaggctagagagcagtggcttttcacagacaaagtcataatgccctgcagtcttgggctcaagcgattctctcttccttggcctctggagtagactaaatgtgttagtctttgaatggaaaacaactattttctcatcattgggtcaatattgactgatcagtagtaggtcttttaccattctggacataagtctaggtgtagaaatcctttcctttatcatagaggatatggtttacattaccgtttgttttcattgtgattgcccctatgtaacaatcatgaatattagattttttaaattgtagaatatcctaatatttatagccagcagctgttactttgtttgtaaaatttgcaaaaaaacaaaacctgaagttggtttattgaaagaattataaggatagcttctagggatattagtaatagattgccatgatcctgaagcctcttctcagaacactgtgaagataatactgacagagtagaatcagtgaaaacagcctaacaaaacctctgacatcagtatatcaacttttaacagcccactcactggcttttctaaactaccaaaaaccacctgtaggatactgcattaagtcagcatctcagaaacagtggtgtgagtaactgagtcaaattgtcaagtactttggatatacatagtgtcgagctttagattggtatgaaattaaacagcaatgcaaatagatttaattcctatttactttaagaatgaaaaacaatgttcattttcctacctaaacagggtggttcaacataaaggctgatgttgtgtccgttttgtattttatcttttgttaaagatacataaatgacaatacttaa

SEQ ID NO: 446484 - DNA, 3904 bp, Homo sapiens
tccttgatgacttaatgatgtaactcttttctttagaatggtagggaatggagggctaagttagagtgagtgaggatgaaaatagaaggtgaggaaatggaggcagtgaatatagataactcttgagatgttcattcttgaaggggtacagagataggaccctcttttctctcattaagagttactgtgttagaaaagtttgagacatacacagaaagagggattaaggatggatatgagaaaagagtcctgtgaaattttaaatacacgtgtgtgtctctctccatttgtaaattggagttgagagagaaacagtgctaacagtatgtagagacctcgaggagggggaagagacccttccttacacataatataggagaaaaaaaaacatatgaaacagtatatattattaggatgtatttttggtagtttgagtgaattcatgaaggcctactttttactgtaagtttcacttcttttcctagaggaggccagataaccatgtcagccacagttgtagatgcagttaatgctgcacccctatcggggtccaaagaaatgagtttggaagaaccaaagaagatgaccagagaggactggagaaagaagaaggagctagaagaacagcgaaaattgggcaatgctcctgcagaagttgatgaagaaggaaaagacatcaacccccatattcctcagtatatttcttcagtgccatggtatattgatccttcaaaaagacctactttaaaacaccagagaccacaaccagaaaaacaaaagcagttcagctcatctggagaatggtacaagaggggtgtaaaagagaattccataattactaagtaccgcaaaggagcatgtgaaaattgtggggccatgacacacaaaaagaaagactgctttgagagacctaggcgagttggagccaaatttacaggtactaatatagctccagatgaacatgtccagcctcaactgatgtttgactatgatgggaagagggatcggtggaatggctacaatccagaagaacacatgaaaattgttgaagagtatgccaaagttgatttggcaaaacgaacattgaaagcccagaaactccaagaggaattagcctcaggaaaattagtggaacaggctaattctccaaaacaccagtggggagaagaggaaccaaattctcagacggaaaaagatcataatagtgaagatgaggatgaagataaatatgcagatgatattgacatgcctggacagaattttgactccaagagacgaattactgtccggaatctcaggattcgagaagatattgcaaaatatttgaggaatttagatccaaattctgcctactatgatccaaaaactagagcaatgagagagaatccttatgccaatgcaggaaagaatccagatgaagtgagttatgctggagataactttgttaggtacacaggagataccatttcaatggctcagacacagttgtttgcatgggaagcctatgacaagggatctgaagtgcatctacaggcagatcctacaaagctagagctgttgtataagtccttcaaagtcaaaaaagaagatttcaaagaacagcagaaagaaagcatcctggaaaagtatggtggccaagaacatttggatgcccctccagctgaattgcttttagcccagactgaagactatgtggagtactcaagacatgggacagtcatcaaaggacaggagcgggctgttgcctgctctaagtatgaggaggatgtgaagatccacaatcacacacatatctggggatcgtactggaaagaaggccgatggggatacaaatgctgtcactcttttttcaagtattcctattgtactggagaagctgggaaggagattgttaactctgaggagtgtattataaatgagataactggggaagaatctgtgaaaaaacctcaaaccctcatggagctgcatcaagaaaaactgaaagaggaaaagaagaagaagaaaaagaaaaagaagaagcatcgaaagagcagttcagatagtgatgatgaagaaaagaagcatgaaaaattgaaaaaggcactgaacgcagaggaggcccgccttcttcatgtcaaggagaccatgcagattgatgagaggaagcggccttacaatagcatgtatgaaactcgagaacctactgaagaggaaatggaggcatatagaatgaaacgtcagaggccagatgaccccatggcctctttccttggacagtagcaactagtcagaagaccatccaagatagatgcagctgatacattcttttcagcttcttattgatgattgtagatagaaaaatccttgtttattcttcttgctgcctggctttaataaatatttcagatgcctcacagtaagttcactcctttccatactgaggaaacaagaaaagaagaagaggcacatgaagtgtgcttttgggaatagaatttaaaattggattaagattttatttccagttttttttatttatttatttttttttttggagacggagtcttgctctgtcgcccaggctgaagtgcggtggcgcgatctcggctcactgcaagctccacctcccaggttcacgccattctcctgcctcagcctccctagtagttgggactacaggcgcccgccaccatgctcagctaattttttgtatttttagtagagacggtttcatcgtgttagccaggatggtctcgatctcctgaccttgtgatccacccgcctcagcctcccaaagtgctgagattacaggcgtgagccacccgcgcctggcctatttccagttttatgtgagtcatgtaaaaaagccttggctctctacctattaagaatgtctctttctctatatttattaagcttcaaactttattgcttcgatttttgtggccctatatttagtattagcacaccttggttttgagaaaaaaacagggctttgtttttttaaataattactagcaactctgtgactacatttatttttattttttttagagacaggatcttgctatgttgcccaggctagagagcagtggcttttcacagacaaagtcataatgccctgcagtcttgggctcaagcgattctctcttccttggcctctggagtagactaaatgtgttagtctttgaatggaaaacaactattttctcatcattgggtcaatattgactgatcagtagtaggtcttttaccattctggacataagtctaggtgtagaaatcctttcctttatcatagaggatatggtttacattaccgtttgttttcattgtgattgcccctatgtaacaatcatgaatattagattttttaaattgtagaatatcctaatatttatagccagcagctgttactttgtttgtaaaatttgcaaaaaaacaaaacctgaagttggtttattgaaagaattataaggatagcttctagggatattagtaatagattgccatgatcctgaagcctcttctcagaacactgtgaagataatactgacagagtagaatcagtgaaaacagcctaacaaaacctctgacatcagtatatcaacttttaacagcccactcactggcttttctaaactaccaaaaaccacctgtaggatactgcattaagtcagcatctcagaaacagtggtgtgagtaactgagtcaaattgtcaagtactttggatatacatagtgtcgagctttagattggtatgaaattaaacagcaatgcaaatagatttaattcctatttactttaagaatgaaaaacaatgttcattttcctacctaaacagggtggttcaacataaaggctgatgttgtgtccgttttgtattttatcttttgttaaagatacataaatgacaatacttaa

SEQ ID NO: 446485 - DNA, 2572 bp, Homo sapiens
tgtagtaggaaccctctctgcgtccaaattgaaaactagagcatgagagagaatctatatgccaatgccggacagaatccagatgaagtgagttatgctggagataactttgttaggtacacaggagataccatttcaatggctcagacacagttgtttgcatgggaagcctatgacaagggatctgaagtgcatctacaggcagatcctacaaagctagagctgttgtataagtccttcaaagtcaaaaaagaagatttcaaagaacagcagaaagaaagcatcctggaaaagtatggtggccaagaacatttggatgcccctccagctgaattgcttttagcccagactgaagactatgtggagtactcaagacatgggacagtcatcaaaggacaggagcgggctgttgcctgctctaagtatgaggaggatgtgaagatccacaatcacacacatatctggggatcgtactggaaagaaggccgatggggatacaaatgctgtcactcttttttcaagtattcctattgtactggagaagctgggaaggagattgttaactctgaggagtgtattataaatgagataactggggaagaatctgtgaaaaaacctcaaaccctcatggagctgcatcaagaaaaactgaaagaggaaaagaagaagaagaaaaagaaaaagaagaagcatcgaaagagcagttcagatagtgatgatgaagaaaagaagcatgaaaaattgaaaaaggcactgaacgcagaggaggcccgccttcttcatgtcaaggagaccatgcagattgatgagaggaagcggccttacaatagcatgtatgaaactcgagaacctactgaagaggaaatggaggcatatagaatgaaacgtcagaggccagatgaccccatggcctctttccttggacagtagcaactagtcagaagaccatccaagatagatgcagctgatacattcttttcagcttcttattgatgattgtagatagaaaaatccttgtttattcttcttgctgcctggctttaataaatatttcagatgcctcacagtaagttcactcctttccatactgaggaaacaagaaaagaagaagaggcacatgaagtgtgcttttgggaatagaatttaaaattggattaagattttatttccagttttttttatttatttatttttttttttggagacggagtcttgctctgtcgcccaggctgaagtgcggtggcgcgatctcggctcactgcaagctccacctcccaggttcacgccattctcctgcctcagcctccctagtagttgggactacaggcgcccgccaccatgctcagctaattttttgtatttttagtagagacggtttcatcgtgttagccaggatggtctcgatctcctgaccttgtgatccacccgcctcagcctcccaaagtgctgagattacaggcgtgagccacccgcgcctggcctatttccagttttatgtgagtcatgtaaaaaagccttggctctctacctattaagaatgtctctttctctatatttattaagcttcaaactttattgcttcgatttttgtggccctatatttagtattagcacaccttggttttgagaaaaaaacagggctttgtttttttaaataattactagcaactctgtgactacatttatttttattttttttagagacaggatcttgctatgttgcccaggctagagagcagtggcttttcacagacaaagtcataatgccctgcagtcttgggctcaagcgattctctcttccttggcctctggagtagactaaatgtgttagtctttgaatggaaaacaactattttctcatcattgggtcaatattgactgatcagtagtaggtcttttaccattctggacataagtctaggtgtagaaatcctttcctttatcatagaggatatggtttacattaccgtttgttttcattgtgattgcccctatgtaacaatcatgaatattagattttttaaattgtagaatatcctaatatttatagccagcagctgttactttgtttgtaaaatttgcaaaaaaacaaaacctgaagttggtttattgaaagaattataaggatagcttctagggatattagtaatagattgccatgatcctgaagcctcttctcagaacactgtgaagataatactgacagagtagaatcagtgaaaacagcctaacaaaacctctgacatcagtatatcaacttttaacagcccactcactggcttttctaaactaccaaaaaccacctgtaggatactgcattaagtcagcatctcagaaacagtggtgtgagtaactgagtcaaattgtcaagtactttggatatacatagtgtcgagctttagattggtatgaaattaaacagcaatgcaaatagatttaattcctatttactttaagaatgaaaaacaatgttcattttcctacctaaacagggtggttcaacataaaggctgatgttgtgtccgttttgtattttatcttttgttaaagatacataaatgacaatacttaa

SEQ ID NO: 446486 - DNA, 2807 bp, Homo sapiens
cgcacgctctgggtctggggctccaggtgagaccaactgatctgcaccggaatctcaggatcctgtaaggctattgctatacagtatttcgagcgaactatagactccgatagttctgcctagtagtgactccaccgacatactatgagcaggtgagacgacgacatcgctgtactgtcgcaagtgccctgcgagaaggaataccaggagtggacacgctgaagcttcagtgtcccttgggaggaagtaacctattggtctcaggggtaccgacacgtgtacgcactcagcccactcttgcaacagggattgcgaggagcatcacgttgtgctatatgccattgcgcgtaacggtcctaactcgaactacattggcggactcattggatagggtggctacttcatagcacggcgaagagtccctaccacacacgtctacgcatgtctgtggtagtaaagatccttcaaagtcaaggagagaagatttcgaaagcaacatggactaggaaatgaaagcatcctggaaaagtatggtggccaagaacatttggatgcccctccagctgaattgcttttagcccagactgaagactatgtggagtactcaagacatgggacagtcatcaaaggacaggagcgggctgttgcctgctctaagtatgaggaggatgtgaagatccacaatcacacacatatctggggatcgtactggaaagaaggccgatggggatacaaatgctgtcactcttttttcaagtattcctattgtactggagaagctgggaaggagattgttaactctgaggagtgtattataaatgagataactggggaagaatctgtgaaaaaacctcaaaccctcatggagctgcatcaagaaaaactgaaagaggaaaagaagaagaagaaaaagaaaaagaagaagcatcgaaagagcagttcagatagtgatgatgaagaaaagaagcatgaaaaattgaaaaaggcactgaacgcagaggaggcccgccttcttcatgtcaaggagaccatgcagattgatgagaggaagcggccttacaatagcatgtatgaaactcgagaacctactgaagaggaaatggaggcatatagaatgaaacgtcagaggccagatgaccccatggcctctttccttggacagtagcaactagtcagaagaccatccaagatagatgcagctgatacattcttttcagcttcttattgatgattgtagatagaaaaatccttgtttattcttcttgctgcctggctttaataaatatttcagatgcctcacagtaagttcactcctttccatactgaggaaacaagaaaagaagaagaggcacatgaagtgtgcttttgggaatagaatttaaaattggattaagattttatttccagttttttttatttatttatttttttttttggagacggagtcttgctctgtcgcccaggctgaagtgcggtggcgcgatctcggctcactgcaagctccacctcccaggttcacgccattctcctgcctcagcctccctagtagttgggactacaggcgcccgccaccatgctcagctaattttttgtatttttagtagagacggtttcatcgtgttagccaggatggtctcgatctcctgaccttgtgatccacccgcctcagcctcccaaagtgctgagattacaggcgtgagccacccgcgcctggcctatttccagttttatgtgagtcatgtaaaaaagccttggctctctacctattaagaatgtctctttctctatatttattaagcttcaaactttattgcttcgatttttgtggccctatatttagtattagcacaccttggttttgagaaaaaaacagggctttgtttttttaaataattactagcaactctgtgactacatttatttttattttttttagagacaggatcttgctatgttgcccaggctagagagcagtggcttttcacagacaaagtcataatgccctgcagtcttgggctcaagcgattctctcttccttggcctctggagtagactaaatgtgttagtctttgaatggaaaacaactattttctcatcattgggtcaatattgactgatcagtagtaggtcttttaccattctggacataagtctaggtgtagaaatcctttcctttatcatagaggatatggtttacattaccgtttgttttcattgtgattgcccctatgtaacaatcatgaatattagattttttaaattgtagaatatcctaatatttatagccagcagctgttactttgtttgtaaaatttgcaaaaaaacaaaacctgaagttggtttattgaaagaattataaggatagcttctagggatattagtaatagattgccatgatcctgaagcctcttctcagaacactgtgaagataatactgacagagtagaatcagtgaaaacagcctaacaaaacctctgacatcagtatatcaacttttaacagcccactcactggcttttctaaactaccaaaaaccacctgtaggatactgcattaagtcagcatctcagaaacagtggtgtgagtaactgagtcaaattgtcaagtactttggatatacatagtgtcgagctttagattggtatgaaattaaacagcaatgcaaatagatttaattcctatttactttaagaatgaaaaacaatgttcattttcctacctaaacagggtggttcaacataaaggctgatgttgtgtccgttttgtattttatcttttgttaaagatacataaatgacaatacttaa

SEQ ID NO: 446487 - DNA, 2031 bp, Homo sapiens
taacttcctaaaattctccgattctaaaagaaagctcctaaatagaagccaaaaagtagccgcccaacttgaaactccccacaagccgggtaaatagcgcgatacgcagcagctagagttctcgcgtttcccacggcgcaggagcactggagggcccccctccgcccccggccccgccaggaaattagtgcgcatgtgccggtcatccggaagttaccgcagtggccgccggaattaggcgaaaagccggaagtaaacattacgagattggcttggattctgtcggatggacttggggctagctgcggcggggctggaggaggccagataaccatgtcagccacagttgtagatgcagttaatgctgcacccctatcggggtccaaagaaatgagtttggaagaaccaaagaagatgaccagagaggactggagaaagaagaaggagctagaagaacagcgaaaattgggcaatgctcctgcagaagttgatgaagaaggaaaagacatcaacccccatattcctcagtatatttcttcagtgccatggtatattgatccttcaaaaagacctactttaaaacaccagagaccacaaccagaaaaacaaaagcagttcagctcatctggagaatggtacaagaggggtgtaaaagagaattccataattactaagtaccgcaaaggagcatgtgaaaattgtggggccatgacacacaaaaagaaagactgctttgagagacctaggcgagttggagccaaatttacaggtactaatatagctccagatgaacatgtccagcctcaactgatgtttgactatgatgggaagagggatcggtggaatggctacaatccagaagaacacatgaaaattgttgaagagtatgccaaagttgatttggcaaaacgaacattgaaagcccagaaactccaagaggaattagcctcaggaaaattagtggaacaggctaattctccaaaacaccagtggggagaagaggaaccaaattctcagacggaaaaagatcataatagtgaagatgaggatgaagataaatatgcagatgatattgacatgcctggacagaattttgactccaagagacgaattactgtccggaatctcaggattcgagaagatattgcaaaatatttgaggaatttagatccaaattctgcctactatgatccaaaaactagagcaatgagagagaatccttatgccaatgcaggaaagaatccagatgaagtgagttatgctggagataactttgttaggtacacaggagataccatttcaatggctcagacacagttgtttgcatgggaagcctatgacaagggatctgaagtgcatctacaggcagatcctacaaagctagagctgttgtataagtccttcaaagtcaaaaaagaagatttcaaagaacagcagaaagaaagcatcctggaaaagtatggtggccaagaacatttggatgcccctccagctgaattgcttttagcccagactgaagactatgtggagtactcaagacatgggacagtcatcaaaggacaggagcgggctgttgcctgctctaagtatgaggaggatgtgaagatccacaatcacacacatatctggggatcgtactggaaagaaggccgatggggatacaaatgctgtcactcttttttcaagtattcctattgtactggagaagctgggaaggagattgttaactctgaggagtgtattataaatgagataactggggaagaatctgtgaaaaaacctcaaaccctcatggagctgcatcaagaaaaactgaaagaggaaaagaagaagaagaaaaagaaaaagaagaagcatcgaaagagcagttcagatagtgatgatgaagaaaagaagcatgaaaaattgaaaaaggccctgagctaactagaactccaaagagtgcaaacaacttggcagcgatcctggctttaccttggcttttgcaaaagcggcagagcccaagcttacaagctctctgaatgggcaaca

SEQ ID NO: 446488 - DNA, 1998 bp, Homo sapiens
  misc_feature (38)..(39): n is a, c, g, or t
  misc_feature (49)..(49): n is a, c, g, or t
tgatccttacagtgcactcttctatatctacctgtgannaaactcaaancctcatggagctgcatcaagaaaaactgaaagaggaaaagaagaagaagaaaaagaaaaagaagaagcatcgaaagagcagttcagatagtgatgatgaagaaaagaagcatgaaaaattgaaaaaggcactgaacgcagaggaggcccgccttcttcatgtcaaggagaccatgcagattgatgagaggaagcggccttacaatagcatgtatgaaactcgagaacctactgaagaggaaatggaggcatatagaatgaaacgtcagaggccagatgaccccatggcctctttccttggacagtagcaactagtcagaagaccatccaagatagatgcagctgatacattcttttcagcttcttattgatgattgtagatagaaaaatccttgtttattcttcttgctgcctggctttaataaatatttcagatgcctcacagtaagttcactcctttccatactgaggaaacaagaaaagaagaagaggcacatgaagtgtgcttttgggaatagaatttaaaattggattaagattttatttccagttttttttatttatttatttttttttttggagacggagtcttgctctgtcgcccaggctgaagtgcggtggcgcgatctcggctcactgcaagctccacctcccaggttcacgccattctcctgcctcagcctccctagtagttgggactacaggcgcccgccaccatgctcagctaattttttgtatttttagtagagacggtttcatcgtgttagccaggatggtctcgatctcctgaccttgtgatccacccgcctcagcctcccaaagtgctgagattacaggcgtgagccacccgcgcctggcctatttccagttttatgtgagtcatgtaaaaaagccttggctctctacctattaagaatgtctctttctctatatttattaagcttcaaactttattgcttcgatttttgtggccctatatttagtattagcacaccttggttttgagaaaaaaacagggctttgtttttttaaataattactagcaactctgtgactacatttatttttattttttttagagacaggatcttgctatgttgcccaggctagagagcagtggcttttcacagacaaagtcataatgccctgcagtcttgggctcaagcgattctctcttccttggcctctggagtagactaaatgtgttagtctttgaatggaaaacaactattttctcatcattgggtcaatattgactgatcagtagtaggtcttttaccattctggacataagtctaggtgtagaaatcctttcctttatcatagaggatatggtttacattaccgtttgttttcattgtgattgcccctatgtaacaatcatgaatattagattttttaaattgtagaatatcctaatatttatagccagcagctgttactttgtttgtaaaatttgcaaaaaaacaaaacctgaagttggtttattgaaagaattataaggatagcttctagggatattagtaatagattgccatgatcctgaagcctcttctcagaacactgtgaagataatactgacagagtagaatcagtgaaaacagcctaacaaaacctctgacatcagtatatcaacttttaacagcccactcactggcttttctaaactaccaaaaaccacctgtaggatactgcattaagtcagcatctcagaaacagtggtgtgagtaactgagtcaaattgtcaagtactttggatatacatagtgtcgagctttagattggtatgaaattaaacagcaatgcaaatagatttaattcctatttactttaagaatgaaaaacaatgttcattttcctacctaaacagggtggttcaacataaaggctgatgttgtgtccgttttgtattttatcttttgttaaagatacataaatgacaatacttaa

SEQ ID NO: 446489 - DNA, 1973 bp, Homo sapiens
agtagaagggctgactccaaagctctttcaggcaatctgcgtttttgatagagcagttcatattcagtggggtgtgttggtactctgccacttttgaagaaaagacatctgatgtagagctgtgatacacattttattcctctcactataggcactgaacgcagaggaggcccgccttcttcatgtcaaggagaccatgcagattgatgagaggaagcggccttacaatagcatgtatgaaactcgagaacctactgaagaggaaatggaggcatatagaatgaaacgtcagaggccagatgaccccatggcctctttccttggacagtagcaactagtcagaagaccatccaagatagatgcagctgatacattcttttcagcttcttattgatgattgtagatagaaaaatccttgtttattcttcttgctgcctggctttaataaatatttcagatgcctcacagtaagttcactcctttccatactgaggaaacaagaaaagaagaagaggcacatgaagtgtgcttttgggaatagaatttaaaattggattaagattttatttccagttttttttatttatttatttttttttttggagacggagtcttgctctgtcgcccaggctgaagtgcggtggcgcgatctcggctcactgcaagctccacctcccaggttcacgccattctcctgcctcagcctccctagtagttgggactacaggcgcccgccaccatgctcagctaattttttgtatttttagtagagacggtttcatcgtgttagccaggatggtctcgatctcctgaccttgtgatccacccgcctcagcctcccaaagtgctgagattacaggcgtgagccacccgcgcctggcctatttccagttttatgtgagtcatgtaaaaaagccttggctctctacctattaagaatgtctctttctctatatttattaagcttcaaactttattgcttcgatttttgtggccctatatttagtattagcacaccttggttttgagaaaaaaacagggctttgtttttttaaataattactagcaactctgtgactacatttatttttattttttttagagacaggatcttgctatgttgcccaggctagagagcagtggcttttcacagacaaagtcataatgccctgcagtcttgggctcaagcgattctctcttccttggcctctggagtagactaaatgtgttagtctttgaatggaaaacaactattttctcatcattgggtcaatattgactgatcagtagtaggtcttttaccattctggacataagtctaggtgtagaaatcctttcctttatcatagaggatatggtttacattaccgtttgttttcattgtgattgcccctatgtaacaatcatgaatattagattttttaaattgtagaatatcctaatatttatagccagcagctgttactttgtttgtaaaatttgcaaaaaaacaaaacctgaagttggtttattgaaagaattataaggatagcttctagggatattagtaatagattgccatgatcctgaagcctcttctcagaacactgtgaagataatactgacagagtagaatcagtgaaaacagcctaacaaaacctctgacatcagtatatcaacttttaacagcccactcactggcttttctaaactaccaaaaaccacctgtaggatactgcattaagtcagcatctcagaaacagtggtgtgagtaactgagtcaaattgtcaagtactttggatatacatagtgtcgagctttagattggtatgaaattaaacagcaatgcaaatagatttaattcctatttactttaagaatgaaaaacaatgttcattttcctacctaaacagggtggttcaacataaaggctgatgttgtgtccgttttgtattttatcttttgttaaagatacataaatgacaatacttaa

SEQ ID NO: 446490 - DNA, 1675 bp, Homo sapiens
gtttattcttctgctgcctggctttaataaataaggatttttctatctacaatcatcaataagaagctgaaaagaatgtatcagacttcttattgatgattgtagatagaaaaatccttgtttattcttcttgctgcctggctttaataaatatttcagatgcctcacagtaagttcactcctttccatactgaggaaacaagaaaagaagaagaggcacatgaagtgtgcttttgggaatagaatttaaaattggattaagattttatttccagttttttttatttatttatttttttttttggagacggagtcttgctctgtcgcccaggctgaagtgcggtggcgcgatctcggctcactgcaagctccacctcccaggttcacgccattctcctgcctcagcctccctagtagttgggactacaggcgcccgccaccatgctcagctaattttttgtatttttagtagagacggtttcatcgtgttagccaggatggtctcgatctcctgaccttgtgatccacccgcctcagcctcccaaagtgctgagattacaggcgtgagccacccgcgcctggcctatttccagttttatgtgagtcatgtaaaaaagccttggctctctacctattaagaatgtctctttctctatatttattaagcttcaaactttattgcttcgatttttgtggccctatatttagtattagcacaccttggttttgagaaaaaaacagggctttgtttttttaaataattactagcaactctgtgactacatttatttttattttttttagagacaggatcttgctatgttgcccaggctagagagcagtggcttttcacagacaaagtcataatgccctgcagtcttgggctcaagcgattctctcttccttggcctctggagtagactaaatgtgttagtctttgaatggaaaacaactattttctcatcattgggtcaatattgactgatcagtagtaggtcttttaccattctggacataagtctaggtgtagaaatcctttcctttatcatagaggatatggtttacattaccgtttgttttcattgtgattgcccctatgtaacaatcatgaatattagattttttaaattgtagaatatcctaatatttatagccagcagctgttactttgtttgtaaaatttgcaaaaaaacaaaacctgaagttggtttattgaaagaattataaggatagcttctagggatattagtaatagattgccatgatcctgaagcctcttctcagaacactgtgaagataatactgacagagtagaatcagtgaaaacagcctaacaaaacctctgacatcagtatatcaacttttaacagcccactcactggcttttctaaactaccaaaaaccacctgtaggatactgcattaagtcagcatctcagaaacagtggtgtgagtaactgagtcaaattgtcaagtactttggatatacatagtgtcgagctttagattggtatgaaattaaacagcaatgcaaatagatttaattcctatttactttaagaatgaaaaacaatgttcattttcctacctaaacagggtggttcaacataaaggctgatgttgtgtccgttttgtattttatcttttgttaaagatacataaatgacaatacttaa

SEQ ID NO: 446491 - DNA, 742 bp, Homo sapiens
tggaggaatatatttgcgtatcaggctcttggtgagggtcaatattgactgatcagtagtaggtcttttaccattctggacataagtctaggtgtagaaatcctttcctttatcatagaggatatggtttacattaccgtttgttttcattgtgattgcccctatgtaacaatcatgaatattagattttttaaattgtagaatatcctaatatttatagccagcagctgttactttgtttgtaaaatttgcaaaaaaacaaaacctgaagttggtttattgaaagaattataaggatagcttctagggatattagtaatagattgccatgatcctgaagcctcttctcagaacactgtgaagataatactgacagagtagaatcagtgaaaacagcctaacaaaacctctgacatcagtatatcaacttttaacagcccactcactggcttttctaaactaccaaaaaccacctgtaggatactgcattaagtcagcatctcagaaacagtggtgtgagtaactgagtcaaattgtcaagtactttggatatacatagtgtcgagctttagattggtatgaaattaaacagcaatgcaaatagatttaattcctatttactttaagaatgaaaaacaatgttcattttcctacctaaacagggtggttcaacataaaggctgatgttgtgtccgttttgtattttatcttttgttaaagatacataaatgacaatacttaa

SEQ ID NO: 446492 - DNA, 639 bp, Homo sapiens
  misc_feature (91)..(91): n is a, c, g, or t
acatatatgcatagacataggtcaattatatgtctccattagaaaaataataattggaaaacatgttctagaactagttacaaaaataatntaaggtgaatatcctaatatttatagccagcagctgttactttgtttgtaaaatttgcaaaaaaacaaaacctgaagttggtttattgaaagaattataaggatagcttctagggatattagtaatagattgccatgatcctgaagcctcttctcagaacactgtgaagataatactgacagagtagaatcagtgaaaacagcctaacaaaacctctgacatcagtatatcaacttttaacagcccactcactggcttttctaaactaccaaaaaccacctgtaggatactgcattaagtcagcatctcagaaacagtggtgtgagtaactgagtcaaattgtcaagtactttggatatacatagtgtcgagctttagattggtatgaaattaaacagcaatgcaaatagatttaattcctatttactttaagaatgaaaaacaatgttcattttcctacctaaacagggtggttcaacataaaggctgatgttgtgtccgttttgtattttatcttttgttaaagatacataaatgacaatacttaa

SEQ ID NO: 446493 - DNA, 1864 bp, Homo sapiens
taacttcctaaaattctccgattctaaaagaaagctcctaaatagaagccaaaaagtagccgcccaacttgaaactccccacaagccgggtaaatagcgcgatacgcagcagctagagttctcgcgtttcccacggcgcaggagcactggagggcccccctccgcccccggccccgccaggaaattagtgcgcatgtgccggtcatccggaagttaccgcagtggccgccggaattaggcgaaaagccggaagtaaacattacgagattggcttggattctgtcggatggacttggggctagctgcggcggggctggaggaggccagataaccatgtcagccacagttgtagatgcagttaatgctgcacccctatcggggtccaaagaaatgagtttggaagaaccaaagaagatgaccagagaggactggagaaagaagaaggagctagaagaacagcgaaaattgggcaatgctcctgcagaagttgatgaagaaggaaaagacatcaacccccatattcctcagtatatttcttcagtgccatggtatattgatccttcaaaaagacctactttaaaacaccagagaccacaaccagaaaaacaaaagcagttcagctcatctggagaatggtacaagaggggtgtaaaagagaattccataattactaagtaccgcaaaggagcatgtgaaaattgtggggccatgacacacaaaaagaaagactgctttgagagacctaggcgagttggagccaaatttacaggtactaatatagctccagatgaacatgtccagcctcaactgatgtttgactatgatgggaagagggatcggtggaatggctacaatccagaagaacacatgaaaattgttgaagagtatgccaaagttgatttggcaaaacgaacattgaaagcccagaaactccaagaggaattagcctcaggaaaattagtggaacaggctaattctccaaaacaccagtggggagaagaggaaccaaattctcagacggaaaaagatcataatagtgaagatgaggatgaagataaatatgcagatgatattgacatgcctggacagaattttgactccaagagacgaattactgtccggaatctcaggattcgagaagatattgcaaaatatttgaggaatttagatccaaattctgcctactatgatccaaaaactagagcaatgagagagaatccttatgccaatgcaggaaagaatccagatgaagtgagttatgctggagataactttgttaggtacacaggagataccatttcaatggctcagacacagtgtaagtgtttcctctatgtcaagccattttatatcagctcataagacgtttgggattgtttaaagcttgttttcaagaagcatacagtaatgcagctgccaactcactaagatgttttgaattactctagtgtttgcatgggaagcctatgacaagggatctgaagtgcatctacaggcagatcctacaaagctagagctgttgtataagtccttcaaagtcaaaaaagaagatttcaaagaacagcagaaagaaagcatcctggaaaagtatggtggccaagaacatttggatgcccctccagctgaattgcttttagcccagactgaagactatgtggagtactcaagacatgggacagtcatcaaaggacaggagcgggctgttgcctgctctaagtatgaggaggatgtgaagatccacaatcacacagtatgtgctaaactggaacaattttgtgtccttgttggttttgctctgtattgcatttttccactacaactttattagctaaccatttgtattctctatgctttaaaaaaaaaa

SEQ ID NO: 446494 - DNA, 1198 bp, Homo sapiens
  misc_feature (1014)..(1014): n is a, c, g, or t
taacttcctaaaattctccgattctaaaagaaagctcctaaatagaagccaaaaagtagccgcccaacttgaaactccccacaagccgggtaaatagcgcgatacgcagcagctagagttctcgcgtttcccacggcgcaggagcactggagggcccccctccgcccccggccccgccaggaaattagtgcgcatgtgccggtcatccggaagttaccgcagtggccgccggaattaggcgaaaagccggaagtaaacattacgagattggcttggattctgtcggatggacttggggctagctgcggcggggctggaggaggccagataaccatgtcagccacagttgtagatgcagttaatgctgcacccctatcggggtccaaagaaatgagtttggaagaaccaaagaagatgaccagagaggactggagaaagaagaaggagctagaagaacagcgaaaattgggcaatgctcctgcagaagttgatgaagaaggaaaagacatcaacccccatattcctcagtatatttcttcagtgccatggtatattgatccttcaaaaagacctactttaaaacaccagagaccacaaccagaaaaacaaaagcagttcagctcatctggagaatggtacaagaggggtgtaaaagagaattccataattactaagtaccgcaaaggagcatgtgaaaattgtggggccatgacacacaaaaagaaagactgctttgagagacctaggcgagttggagccaaatttacaggtactaatatagctccagatgaacatgtccagcctcaactgatgtttgactatgatgggaagagggatcggtggaatggctacaatccagaagaacacatgaaaattgttgaagagtatgccaaagttgatttggcaaaacgaacattgaaagcccagaaactccaagaggaattagcctcaggaaaattagtggaacaggctaattctcccaaaacaccagtgggggggaagagggacccaaanttctccgaacgggaaaagatcctactaggggaacatgaggttagagatattttgcgcttattttgctgcccggccgattttggtccgaggcgaattctgggcgggatctcgggtctcagtctggcgattgggggttatccccgtcgcgccatggtcatagcggggaaccttgccgggagaacct

SEQ ID NO: 446495 - DNA, 549 bp, Homo sapiens
atgggaagaaaagcaaagccctgtggcaaaagggcatgtatacaaagataagaggaatttatggccatcttgtaacttactgtactcaacagatgaatagcaactgagacatcttctatttgcctcagaaaaaatttgtggctttttttttcctactgtgctttctataacaaaacccagtaaagaatgttccctttctttctgattagaaataaatgttttctggaaatttaaatgcaaatcaggttgtaaaatgtattgaataatgtccaatgtccttttagtatggtggccaagaacatttggatgcccctccagctgaattgcttttagcccagactgaagactatgtggagtactcaagacatgggacagtcatcaaaggacaggagcgggctgttgcctgctctaagtatgaggaggatgtgaagatccacaatcacacagtatgtgctaaactggaacaattttgtgtccttgttggttttgctctgtattgcatttttccactacaactttattagctaaccatttgtattctctatgctt

SEQ ID NO: 446496 - DNA, 495 bp, Homo sapiens
caagtagtgcacctgagctttgttttcacattaataacactgcatttcaatcctccctttcagctgcatcaagaaaaactgaaagaggaaaagaagaagaagaaaaagaaaaagaagaagcatcgaaagagcagttcagatagtgatgatgaagaaaagaagcatgaaaaattgaaaaaggcactgaacgcagaggaggcccgccttcttcatgtcaaggagaccatgcagattgatgagaggaagcggccttacaatagcatgtatgaaactcgagaacctactgaagaggaaatggaggcatatagaatgaaacgtcagaggccagatgaccccatggcctctttccttggacagtagcaactagtcagaagaccatccaagatagatgcagctgatacattcttttcagcttcttattgatgattgtagatagaaaaatccttgtttattcttcttgctgcctggctttaataaatatttcagatgcctcac

SEQ ID NO: 446497 - DNA, 299 bp, Homo sapiens
ctccccgccttttacaactatctcagtcatcaaaggacaggagcgggctgttgcctgctctaagtatgaggaggatgtgaagatccacaatcacacacatatctggggatcgtactggaaagaaggccgatggggatacaaatgctgtcactcttttttcaagtattcctattgtactggagaagctgggaaggagattgttaactctgaggagtgtattataaatgagataactggggaagaagaaagagcagttcagatagttgtaaatggcgccatttacaactatctcatgaagt

SEQ ID NO: 446498 - DNA, 3866 bp, Homo sapiens
taacttcctaaaattctccgattctaaaagaaagctcctaaatagaagccaaaaagtagccgcccaacttgaaactccccacaagccgggtaaatagcgcgatacgcagcagctagagttctcgcgtttcccacggcgcaggagcactggagggcccccctccgcccccggccccgccaggaaattagtgcgcatgtgccggtcatccggaagttaccgcagtggccgccggaattaggcgaaaagccggaagtaaacattacgagattggcttggattctgtcggatggacttggggctagctgcggcggggctggatggtgctgtattgaatttttggacggtactgcattggaggattttaagcttgggcagtaggacattgtattaatctgttttcacattgccaatgaagacatagcccagacctgccaatttactaaagaaaggaggccagataaccatgtcagccacagttgtagatgcagttaatgctgcacccctatcggggtccaaagaaatgagtttggaagaaccaaagaagatgaccagagaggactggagaaagaagaaggagctagaagaacagcgaaaattgggcaatgctcctgcagaagttgatgaagaaggaaaagacatcaacccccatattcctcagtatatttcttcagtgccatggtatattgatccttcaaaaagacctactttaaaacaccagagaccacaaccagaaaaacaaaagcagttcagctcatctggagaatggtacaagaggggtgtaaaagagaattccataattactaagtaccgcaaaggagcatgtgaaaattgtggggccatgacacacaaaaagaaagactgctttgagagacctaggcgagttggagccaaatttacaggtactaatatagctccagatgaacatgtccagcctcaactgatgtttgactatgatgggaagagggatcggtggaatggctacaatccagaagaacacatgaaaattgttgaagagtatgccaaagttgatttggcaaaacgaacattgaaagcccagaaactccaagaggaattagcctcaggaaaattagtggaacaggctaattctccaaaacaccagtggggagaagaggaaccaaattctcagacggaaaaagatcataatagtgaagatgaggatgaagataaatatgcagatgatattgacatgcctggacagaattttgactccaagagacgaattactgtccggaatctcaggattcgagaagatattgcaaaatatttgaggaatttagatccaaattctgcctactatgatccaaaaactagagcaatgagagagaatccttatgccaatgcaggaaagaatccagatgaagtgagttatgctggagataactttgttaggtacacaggagataccatttcaatggctcagacacagttgtttgcatgggaagcctatgacaagggatctgaagtgcatctacaggcagatcctacaaagctagagctgttgtataagtccttcaaagtcaaaaaagaagatttcaaagaacagcagaaagaaagcatcctggaaaagtatggtggccaagaacatttggatgcccctccagctgaattgcttttagcccagactgaagactatgtggagtactcaagacatgggacagtcatcaaaggacaggagcgggctgttgcctgctctaagtatgaggaggatgtgaagatccacaatcacacacatatctggggatcgtactggaaagaaggccgatggggatacaaatgctgtcactcttttttcaagtattcctattgtactggagaagctgggaaggagattgttaactctgaggagtgtattataaatgagataactggggaagaatctgtgaaaaaacctcaaaccctcatggagctgcatcaagaaaaactgaaagaggaaaagaagaagaagaaaaagaaaaagaagaagcatcgaaagagcagttcagatagtgatgatgaagaaaagaagcatgaaaaattgaaaaaggcactgaacgcagaggaggcccgccttcttcatgtcaaggagaccatgcagattgatgagaggaagcggccttacaatagcatgtatgaaactcgagaacctactgaagaggaaatggaggcatatagaatgaaacgtcagaggccagatgaccccatggcctctttccttggacagtagcaactagtcagaagaccatccaagatagatgcagctgatacattcttttcagcttcttattgatgattgtagatagaaaaatccttgtttattcttcttgctgcctggctttaataaatatttcagatgcctcacagtaagttcactcctttccatactgaggaaacaagaaaagaagaagaggcacatgaagtgtgcttttgggaatagaatttaaaattggattaagattttatttccagttttttttatttatttatttttttttttggagacggagtcttgctctgtcgcccaggctgaagtgcggtggcgcgatctcggctcactgcaagctccacctcccaggttcacgccattctcctgcctcagcctccctagtagttgggactacaggcgcccgccaccatgctcagctaattttttgtatttttagtagagacggtttcatcgtgttagccaggatggtctcgatctcctgaccttgtgatccacccgcctcagcctcccaaagtgctgagattacaggcgtgagccacccgcgcctggcctatttccagttttatgtgagtcatgtaaaaaagccttggctctctacctattaagaatgtctctttctctatatttattaagcttcaaactttattgcttcgatttttgtggccctatatttagtattagcacaccttggttttgagaaaaaaacagggctttgtttttttaaataattactagcaactctgtgactacatttatttttattttttttagagacaggatcttgctatgttgcccaggctagagagcagtggcttttcacagacaaagtcataatgccctgcagtcttgggctcaagcgattctctcttccttggcctctggagtagactaaatgtgttagtctttgaatggaaaacaactattttctcatcattgggtcaatattgactgatcagtagtaggtcttttaccattctggacataagtctaggtgtagaaatcctttcctttatcatagaggatatggtttacattaccgtttgttttcattgtgattgcccctatgtaacaatcatgaatattagattttttaaattgtagaatatcctaatatttatagccagcagctgttactttgtttgtaaaatttgcaaaaaaacaaaacctgaagttggtttattgaaagaattataaggatagcttctagggatattagtaatagattgccatgatcctgaagcctcttctcagaacactgtgaagataatactgacagagtagaatcagtgaaaacagcctaacaaaacctctgacatcagtatatcaacttttaacagcccactcactggcttttctaaactaccaaaaaccacctgtaggatactgcattaagtcagcatctcagaaacagtggtgtgagtaactgagtcaaattgtcaagtactttggatatacatagtgtcgagctttagattggtatgaaattaaacagcaatgcaaatagatttaattcctatttactttaagaatgaaaaacaatgttcattttcctacctaaacagggtggttcaacataaaggctgatgttgtgtccgttttgtattttatcttttgttaaagatacataaatgacaatacttaa

SEQ ID NO: 446499 - DNA, 3475 bp, Homo sapiens
caggctgtaccggccgagtctaaggatggacttggggctagctgcggcggggctggaggaggccagataaccatgtcagccacagttgtagatgcagttaatgctgcacccctatcggggtccaaagaaatgagtttggaagaaccaaagaagatgaccagagaggactggagaaagaagaaggagctagaagaacagcgaaaattgggcaatgctcctgcagaagttgatgaagaaggaaaagacatcaacccccatattcctcagtatatttcttcagtgccatggtatattgatccttcaaaaagacctactttaaaacaccagagaccacaaccagaaaaacaaaagcagttcagctcatctggagaatggtacaagaggggtgtaaaagagaattccataattactaagtaccgcaaaggagcatgtgaaaattgtggggccatgacacacaaaaagaaagactgctttgagagacctaggcgagttggagccaaatttacaggtactaatatagctccagatgaacatgtccagcctcaactgatgtttgactatgatgggaagagggatcggtggaatggctacaatccagaagaacacatgaaaattgttgaagagtatgccaaagttgatttggcaaaacgaacattgaaagcccagaaactccaagaggaattagcctcaggaaaattagtggaacaggctaattctccaaaacaccagtggggagaagaggaaccaaattctcagacggaaaaagatcataatagtgaagatgaggatgaagataaatatgcagatgatattgacatgcctggacagaattttgactccaagagacgaattactgtccggaatctcaggattcgagaagatattgcaaaatatttgaggaatttagatccaaattctgcctactatgatccaaaaactagagcaatgagagagaatccttatgccaatgcaggaaagaatccagatgaagtgagttatgctggagataactttgttaggtacacaggagataccatttcaatggctcagacacagttgtttgcatgggaagcctatgacaagggatctgaagtgcatctacaggcagatcctacaaagctagagctgttgtataagtccttcaaagtcaaaaaagaagatttcaaagaacagcagaaagaaagcatcctggaaaagtatggtggccaagaacatttggatgcccctccagctgaattgcttttagcccagactgaagactatgtggagtactcaagacatgggacagtcatcaaaggacaggagcgggctgttgcctgctctaagtatgaggaggatgtgaagatccacaatcacacacatatctggggatcgtactggaaagaaggccgatggggatacaaatgctgtcactcttttttcaagtattcctattgtactggagaagctgggaaggagattgttaactctgaggagtgtattataaatgagataactggggaagaatctgtgaaaaaacctcaaaccctcatggagctgcatcaagaaaaactgaaagaggaaaagaagaagaagaaaaagaaaaagaagaagcatcgaaagagcagttcagatagtgatgatgaagaaaagaagcatgaaaaattgaaaaaggcactgaacgcagaggaggcccgccttcttcatgtcaaggagaccatgcagattgatgagaggaagcggccttacaatagcatgtatgaaactcgagaacctactgaagaggaaatggaggcatatagaatgaaacgtcagaggccagatgaccccatggcctctttccttggacagtagcaactagtcagaagaccatccaagatagatgcagctgatacattcttttcagcttcttattgatgattgtagatagaaaaatccttgtttattcttcttgctgcctggctttaataaatatttcagatgcctcacagtaagttcactcctttccatactgaggaaacaagaaaagaagaagaggcacatgaagtgtgcttttgggaatagaatttaaaattggattaagattttatttccagttttttttatttatttatttttttttttggagacggagtcttgctctgtcgcccaggctgaagtgcggtggcgcgatctcggctcactgcaagctccacctcccaggttcacgccattctcctgcctcagcctccctagtagttgggactacaggcgcccgccaccatgctcagctaattttttgtatttttagtagagacggtttcatcgtgttagccaggatggtctcgatctcctgaccttgtgatccacccgcctcagcctcccaaagtgctgagattacaggcgtgagccacccgcgcctggcctatttccagttttatgtgagtcatgtaaaaaagccttggctctctacctattaagaatgtctctttctctatatttattaagcttcaaactttattgcttcgatttttgtggccctatatttagtattagcacaccttggttttgagaaaaaaacagggctttgtttttttaaataattactagcaactctgtgactacatttatttttattttttttagagacaggatcttgctatgttgcccaggctagagagcagtggcttttcacagacaaagtcataatgccctgcagtcttgggctcaagcgattctctcttccttggcctctggagtagactaaatgtgttagtctttgaatggaaaacaactattttctcatcattgggtcaatattgactgatcagtagtaggtcttttaccattctggacataagtctaggtgtagaaatcctttcctttatcatagaggatatggtttacattaccgtttgttttcattgtgattgcccctatgtaacaatcatgaatattagattttttaaattgtagaatatcctaatatttatagccagcagctgttactttgtttgtaaaatttgcaaaaaaacaaaacctgaagttggtttattgaaagaattataaggatagcttctagggatattagtaatagattgccatgatcctgaagcctcttctcagaacactgtgaagataatactgacagagtagaatcagtgaaaacagcctaacaaaacctctgacatcagtatatcaacttttaacagcccactcactggcttttctaaactaccaaaaaccacctgtaggatactgcattaagtcagcatctcagaaacagtggtgtgagtaactgagtcaaattgtcaagtactttggatatacatagtgtcgagctttagattggtatgaaattaaacagcaatgcaaatagatttaattcctatttactttaagaatgaaaaacaatgttcattttcctacctaaacagggtggttcaacataaaggctgatgttgtgtccgttttgtattttatcttttgttaaagatacataaatgacaatacttaa

SEQ ID NO: 446500 - DNA, 2242 bp, Homo sapiens
taacttcctaaaattctccgattctaaaagaaagctcctaaatagaagccaaaaagtagccgcccaacttgaaactccccacaagccgggtaaatagcgcgatacgcagcagctagagttctcgcgtttcccacggcgcaggagcactggagggcccccctccgcccccggccccgccaggaaattagtgcgcatgtgccggtcatccggaagttaccgcagtggccgccggaattaggcgaaaagccggaagtaaacattacgagattggcttggattctgtcggatggacttggggctagctgcggcggggctggaggaggccagataaccatgtcagccacagttgtagatgcagttaatgctgcacccctatcggggtccaaagaaatgagtttggaagaaccaaagaagatgaccagagaggactggagaaagaagaaggagctagaagaacagcgaaaattgggcaatgctcctgcagaagttgatgaagaaggaaaagacatcaacccccatattcctcagtatatttcttcagtgccatggtatattgatccttcaaaaagacctactttaaaacaccagagaccacaaccagaaaaacaaaagcagttcagctcatctggagaatggtacaagaggggtgtaaaagagaattccataattactaagtaccgcaaaggagcatgtgaaaattgtggggccatgacacacaaaaagaaagactgctttgagagacctaggcgagttggagccaaatttacaggtactaatatagctccagatgaacatgtccagcctcaactgatgtttgactatgatgggaagagggatcggtggaatggctacaatccagaagaacacatgaaaattgttgaagagtatgccaaagttgatttggcaaaacgaacattgaaagcccagaaactccaagaggaattagcctcaggaaaattagtggaacaggctaattctccaaaacaccagtggggagaagaggaaccaaattctcagacggaaaaagatcataatagtgaagatgaggatgaagataaatatgcagatgatattgacatgcctggacagaattttgactccaagagacgaattactgtccggaatctcaggattcgagaagatattgcaaaatatttgaggaatttagatccaaattctgcctactatgatccaaaaactagagcaatgagagagaatccttatgccaatgcaggaaagaatccagatgaagtgagttatgctggagataactttgttaggtacacaggagataccatttcaatggctcagacacagttgtttgcatgggaagcctatgacaagggatctgaagtgcatctacaggcagatcctacaaagctagagctgttgtataagtccttcaaagtcaaaaaagaagatttcaaagaacagcagaaagaaagcatcctggaaaagtatggtggccaagaacatttggatgcccctccagctgaattgcttttagcccagactgaagactatgtggagtactcaagacatgggacagtcatcaaaggacaggagcgggctgttgcctgctctaagtatgaggaggatgtgaagatccacaatcacacacatatctggggatcgtactggaaagaaggccgatggggatacaaatgctgtcactcttttttcaagtattcctattgtactggagaagctgggaaggagattgttaactctgaggagtgtattataaatgagataactggggaagaatctgtgaaaaaacctcaaaccctcatggagctgcatcaagaaaaactgaaagaggaaaagaagaagaagaaaaagaaaaaggccaaggctctgagcacctggcgtcagaagatccgaaaatacaaccgtgatttcgagtcccatatcacaagctacaagcagaaccccgagcagtcggcggatgaagatgctgagaaaaatgaggaggattcagaaggctcttcagatgaggatgaggatgaggacggagtcagtgcggcaactttcttgaagaagaaatcagaagctccttctggggagagtcgcaagttcctcaaaaagatggctgatgacgatgaggactcagaagattccgaagatgatgaagactgcgacacgggtccacatcttcgattcgactcaaggaggagagggaacaacggctggctaagattttaaaggcccacaagtgatgctgtgggcgagcaatgatgaa

SEQ ID NO: 446501 - DNA, 2171 bp, Homo sapiens
tgtagacccccgccttcatcatacctacccgccttcatcatacctacctcacacacatatctggggatcgtactggaaagaaggccgatggggatacaaatgctgtcactcttttttcaagtattcctattgtactggagaagctgggaaggagattgttaactctgaggagtgtattataaatgagataactggggaagaatctgtgaaaaaacctcaaaccctcatggagctgcatcaagaaaaactgaaagaggaaaagaagaagaagaaaaagaaaaagaagaagcatcgaaagagcagttcagatagtgatgatgaagaaaagaagcatgaaaaattgaaaaaggcactgaacgcagaggaggcccgccttcttcatgtcaaggagaccatgcagattgatgagaggaagcggccttacaatagcatgtatgaaactcgagaacctactgaagaggaaatggaggcatatagaatgaaacgtcagaggccagatgaccccatggcctctttccttggacagtagcaactagtcagaagaccatccaagatagatgcagctgatacattcttttcagcttcttattgatgattgtagatagaaaaatccttgtttattcttcttgctgcctggctttaataaatatttcagatgcctcacagtaagttcactcctttccatactgaggaaacaagaaaagaagaagaggcacatgaagtgtgcttttgggaatagaatttaaaattggattaagattttatttccagttttttttatttatttatttttttttttggagacggagtcttgctctgtcgcccaggctgaagtgcggtggcgcgatctcggctcactgcaagctccacctcccaggttcacgccattctcctgcctcagcctccctagtagttgggactacaggcgcccgccaccatgctcagctaattttttgtatttttagtagagacggtttcatcgtgttagccaggatggtctcgatctcctgaccttgtgatccacccgcctcagcctcccaaagtgctgagattacaggcgtgagccacccgcgcctggcctatttccagttttatgtgagtcatgtaaaaaagccttggctctctacctattaagaatgtctctttctctatatttattaagcttcaaactttattgcttcgatttttgtggccctatatttagtattagcacaccttggttttgagaaaaaaacagggctttgtttttttaaataattactagcaactctgtgactacatttatttttattttttttagagacaggatcttgctatgttgcccaggctagagagcagtggcttttcacagacaaagtcataatgccctgcagtcttgggctcaagcgattctctcttccttggcctctggagtagactaaatgtgttagtctttgaatggaaaacaactattttctcatcattgggtcaatattgactgatcagtagtaggtcttttaccattctggacataagtctaggtgtagaaatcctttcctttatcatagaggatatggtttacattaccgtttgttttcattgtgattgcccctatgtaacaatcatgaatattagattttttaaattgtagaatatcctaatatttatagccagcagctgttactttgtttgtaaaatttgcaaaaaaacaaaacctgaagttggtttattgaaagaattataaggatagcttctagggatattagtaatagattgccatgatcctgaagcctcttctcagaacactgtgaagataatactgacagagtagaatcagtgaaaacagcctaacaaaacctctgacatcagtatatcaacttttaacagcccactcactggcttttctaaactaccaaaaaccacctgtaggatactgcattaagtcagcatctcagaaacagtggtgtgagtaactgagtcaaattgtcaagtactttggatatacatagtgtcgagctttagattggtatgaaattaaacagcaatgcaaatagatttaattcctatttactttaagaatgaaaaacaatgttcattttcctacctaaacagggtggttcaacataaaggctgatgttgtgtccgttttgtattttatcttttgttaaagatacataaatgacaatacttaa

SEQ ID NO: 446502 - DNA, 1734 bp, Homo sapiens
taacttcctaaaattctccgattctaaaagaaagctcctaaatagaagccaaaaagtagccgcccaacttgaaactccccacaagccgggtaaatagcgcgatacgcagcagctagagttctcgcgtttcccacggcgcaggagcactggagggcccccctccgcccccggccccgccaggaaattagtgcgcatgtgccggtcatccggaagttaccgcagtggccgccggaattaggcgaaaagccggaagtaaacattacgagattggcttggattctgtcggatggacttggggctagctgcggcggggctggaggaggccagataaccatgtcagccacagttgtagatgcagttaatgctgcacccctatcggggtccaaagaaatgagtttggaagaaccaaagaagatgaccagagaggactggagaaagaagaaggagctagaagaacagcgaaaattgggcaatgctcctgcagaagttgatgaagaaggaaaagacatcaacccccatattcctcagtatatttcttcagtgccatggtatattgatccttcaaaaagacctactttaaaacaccagagaccacaaccagaaaaacaaaagcagttcagctcatctggagaatggtacaagaggggtgtaaaagagaattccataattactaagtaccgcaaaggagcatgtgaaaattgtggggccatgacacacaaaaagaaagactgctttgagagacctaggcgagttggagccaaatttacaggtactaatatagctccagatgaacatgtccagcctcaactgatgtttgactatgatgggaagagggatcggtggaatggctacaatccagaagaacacatgaaaattgttgaagagtatgccaaagttgatttggcaaaacgaacattgaaagcccagaaactccaagaggaattagcctcaggaaaattagtggaacaggctaattctccaaaacaccagtggggagaagaggaaccaaattctcagacggaaaaagatcataatagtgaagatgaggatgaagataaatatgcagatgatattgacatgcctggacagaattttgactccaagagacgaattactgtccggaatctcaggattcgagaagatattgcaaaatatttgaggaatttagatccaaattctgcctactatgatccaaaaactagagcaatgagagagaatccttatgccaatgcaggaaagaatccagatgaagtgagttatgctggagataactttgttaggtacacaggagataccatttcaatggctcagacacagttgtttgcatgggaagcctatgacaagggatctgaagtgcatctacaggcagatcctacaaagctagagctgttgtataagtccttcaaagtcaaaaaagaagatttcaaagaacagcagaaagaaagcatcctggaaaagtatggtggccaagaacatttggatgcccctccagctgaattgcttttagcccagactgaagactatgtggagtactcaagacatgggacagtcatcaaaggacaggagcgggctgttgcctgctctaagtatgaggaggatgtgaagatccacaatcacacagtatgtgctaaactggaacaattttgtgtccttgttggttttgctctgtattgcatttttccactacaactttattagctaaccatttgtattctctatgctttaaaaaaaaaa

SEQ ID NO: 446503 - DNA, 888 bp, Homo sapiens
  misc_feature (2)..(2): n is a, c, g, or t
anttcggcacagttcctccgctcgctgcctctcctccgcttccttctctctgcgtagtgggactcttctttggcagcgcatccgtcatgtacatggcccctaagtcccgccatcctgaggagcagcagaaggtcctttttctattttacagttctttcaacccgatgctaaaccccctgatttacaacctgaggaatgtagaggtcaagggtgccctgaggagagcactgtgcaaggaaagtcattcctaagaggtgtgacatttgaactgccagcctcagttgtcacgtggactcttgatgcccaattattgcctcaatccagaaaagtttacttctctttatctgtgctttactgacagaagggcaagtcttctctcgttttttgcagataaaattttagatgtgttgcattcattgggtttctatgagatgtggttttatcagacaattttttcttttatttcacaattactttaatatctgtaaaataaagaattattttaattcattttcccagtcccaaaagttaaatacaggccacttacttctttaaccaaatgatatagtttggctctgtgtccccacccaaatctcatgtcaaattgtaatccccgcatgtcaggggagggacctggtgggaggtgattggatcatggggagggatttcccccttgctgttctgttgatagtgaacgagttctcacgaaatctgatggtttaaaagtgcagcacttctccctttgctctctctctcctgctgtgccatggtaagacgtgccttgcttcccctgtggcttccgccatgattgtacctttcctgaggcctctccagccatgtggaactgtgagccaattaaacttcttttctttagaaattatccagtcc

SEQ ID NO: 446504 - DNA, 751 bp, Homo sapiens
gtttccttgacccagagtctggtcctcacattttagattcagctttgggaattttgttcaggaactgcatcatacaacccaaaagcaaaagaggaaaatgcataagccaggatacctaaatgttcctttatttaaacttgaaaatgtgactgcaaaaggagtcaagaagtttagtactcaacacatttcttctttgtagaaataactgctcaagaagataaattgttacctaacagttgattgatgaatatgaaatcagagcaagaggggctaattagagattttactagctagggctatttacccaaaccatctatccagactgtagacatagaatcaccagatggctaggatcctggtgcagctggttcccctttttccttaccctgaatgtcattaaggatgcattgccaaatgctgcccctctggcctgatgactacactccatattggtcacctgccttctttttcctacagtcttcctccagacaggcacgccatacaaccgactacacttgggctcactgaatgaatcacattcttctgctgtgcctcccagagatttcatcaaagcacccgcagtggccttctggaggctcctcaaactctccactcaatgtttcctgaaagtgtcgtgtttctcacctctagattgttattctcatcagttacatgtgggtttcacaaatttatttctcagaatgcaagtctgtctcttatatcctcgggaaacacacctttatatcccagt

SEQ ID NO: 446505 - DNA, 679 bp, Homo sapiens
gataatttctaaagaaaagaagtttaattggctcacagttccacatggctggagaggcctcaggaaaggtacaatcatggcggaagccacaggggaagcaaggcacgtcttaccatggcacagcaggagagagagagcaaagggagaagtgctgcacttttaaaccatcagatttcgtgagaactcgttcactatcaacagaacagcaagggggaaatccctccccatgatccaatcacctcccaccaggtccctccgctgacatgcggggattacaatttgacatgagatttgggtggggacacagagccaaactatatcatttggttaaagaagtaagtggcctgtatttaacttttgggactgggaaaatgaattaaaataattctttattttacagatattaaagtaattgtgaaataaaagaaaaaattgtctgataaaaccacatctcatagaaacccaatgaatgcaacacatctaaaattttatctgcaaaaaacgagagaagacttgcccttctgtcagtaaagcacagataaagagaagtaaacttttctggattgaggcaataattgggcatcaagagtccacgtgacaactgaggctggcagttcaaatgtcacacctcttaggaatgactttccttgcacagtgctctcctcagggcacccttgac

SEQ ID NO: 446506 - DNA, 403 bp, Homo sapiens
tgtagtttgcaggtcattcaacatttattcaaccaaaaatactaagtcagctctatacaaactaatggaaggatacagctatgcaaatatagaacactaaagtgttacatgacagatgtatgagatattaaagtaattgtgaaataaaagaaaaaattgtctgataaaaccacatctcatagaaacccaatgaatgcaacacatctaaaattttatctgcaaaaaacgagagaagacttgcccttctgtcagtaaagcacagataaagagaagtaaacttttctggattgaggcaataattgggcatcaagagtccacgtgacaactgaggctggcagttcaaatgtcacacctcttaggaatgactttccttgcacagtgctctcctcagggcacccttgac

SEQ ID NO: 446507 - DNA, 434 bp, Homo sapiens
tgtagtttgcaggtcattcaacatttattcaaccaaaaatactaagtcagctctatacaaactaatggaaggatacagctatgcaaatatagaacactaaagtgttacatgacagatgtatgagaagtaccttttgcctcccactgtgattctgaggcctccccagccatgtgcaactaactgggaagaaaggaccctgaaaagttagctggttccaagtgaccctccaaggggaagagtgctggattcagagcccacctcaggggaagacaggaccctctccaagatggtttccctagaagctactacctctccctggagggtggagatatttgctggtcaaagcaagaaggccctctgcagatgctgacaccttgatattggacttcccagattccagaactctgagaaataaatttctattttaaataaat

SEQ ID NO: 446508 - DNA, 1754 bp, Homo sapiens
aacagcaagttttcaagtaaaactttacttatgtataactgaatgagttcttaaagacatttactaacaattttccacaaactaaaaatttataaaacaataaataaaatagactttaaaaaaaagcgtgtcacacagctgcttgttttttgtttgtttctttgtttgttttttagtagtgaaatggtgaaaaatcagacaatggtcacagagttcctcctactgggatttctcctgggcccaaggattcagatgctcctctttgggctcttctccctgttctatgtcttcaccctgctggggaatgggaccatcctggggctcatctcactggactccagactccacacccccatgtacttcttcctctcacacctggccgtcgtcaacatcgcctatgcctgcaacacagtgccccagatgctggtgaacctcctgcatccagccaagcccatctcctttgctggctgcatgacatagacctttctctttttgagttttgcacatactgaatgcctcctgttggtgctgatgtcctacgatcggtacgtggccatctgccaccctctccgatatttcatcatcatgacctggaaagtctgcatcactctggccatcacttcctggacatgtggctccctcctggctatggtccatgtgagcctcatcctaagactgcccttttgtgggcctcgtgaaatcaaccacttcttctgtgaaatcctgtctgtccctcaggctggcctgtgctgatacctggctcaaccaggtggtcatctttgcagcctgcatgttcatcctggtgggaccactctgcctggtgctggtctcctactcacacatcctggcggccatcctgaggatccagtctggggagggccgcagaaaggccttctccacctgctcctcccacctctgcgtagtgggactcttctttggcagcgcatccgtcatgtacatggcccctaagtcccgccatcctgaggagcagcagaaggtcctttttctattttacagttctttcaacccgatgctaaaccccctgatttacaacctgaggaatgtagaggtcaagggtgccctgaggagagcactgtgcaaggaaagtcattcctaagaggtgtgacatttgaactgccagcctcagttgtcacgtggactcttgatgcccaattattgcctcaatccagaaaagtttacttctctttatctgtgctttactgacagaagggcaagtcttctctcgttttttgcagataaaattttagatgtgttgcattcattgggtttctatgagatgtggttttatcagacaattttttcttttatttcacaattactttaatatctgtaaaataaagaattattttaattcattttcccagtcccaaaagttaaatacaggccacttacttctttaaccaaatgatatagtttggctctgtgtccccacccaaatctcatgtcaaattgtaatccccgcatgtcaggggagggacctggtgggaggtgattggatcatggggagggatttcccccttgctgttctgttgatagtgaacgagttctcacgaaatctgatggtttaaaagtgcagcacttctccctttgctctctctctcctgctgtgccatggtaagacgtgccttgcttcccctgtggcttccgccatgattgtacctttcctgaggcctctccagccatgtggaactgtgagccaattaaacttcttttctttagaaattatccagtcc

SEQ ID NO: 446509 - DNA, 2251 bp, Homo sapiens
gcggggtgacccggggaaggggcgcgcacagagacagagggagccagccgggccccacggtgtcctcggacgcctccgaaatctccctgcgtgtttgtttcttcggagcttcaccggagcctgactctggaaccggcctgtctgcctgctgcagtctgcacatcttcacaatgaaatcttcacaagctcagaaccatcaacttgctacactgtgttcctccagtgcccagttcacaggaagcactcaagagtaggatcaattgttatcaacctctagcagattattgaatagacggtcgttacatgaaactgacactcagttcttcatggtccacgatagttcttatatccagaaaacgtacttacgttatcaactctgactccataagacaactttgcaaagtcttggctcataactataaatcaaggctgaatcaaacaggactactgttctgaaagaatactcagactatgagtcttcctccagacaggcacgccatacaaccgactacacttgggctcactgaatgaatcacattcttctgctgtgcctcccagagatttcatcaaagcacccgcagtggccttctggaggctcctcaaactctccactcaatgtttcctgaaagtgtcgtgtttctcacctctagattgttattctcatcagttacattagtgaaatggtgaaaaatcagacaatggtcacagagttcctcctactgggatttctcctgggcccaaggattcagatgctcctctttgggctcttctccctgttctatgtcttcaccctgctggggaatgggaccatcctggggctcatctcactggactccagactccacacccccatgtacttcttcctctcacacctggccgtcgtcaacatcgcctatgcctgcaacacagtgccccagatgctggtgaacctcctgcatccagccaagcccatctcctttgctggctgcatgacatagacctttctctttttgagttttgcacatactgaatgcctcctgttggtgctgatgtcctacgatcggtacgtggccatctgccaccctctccgatatttcatcatcatgacctggaaagtctgcatcactctggccatcacttcctggacatgtggctccctcctggctatggtccatgtgagcctcatcctaagactgcccttttgtgggcctcgtgaaatcaaccacttcttctgtgaaatcctgtctgtccctcaggctggcctgtgctgatacctggctcaaccaggtggtcatctttgcagcctgcatgttcatcctggtgggaccactctgcctggtgctggtctcctactcacacatcctggcggccatcctgaggatccagtctggggagggccgcagaaaggccttctccacctgctcctcccacctctgcgtagtgggactcttctttggcagcgcatccgtcatgtacatggcccctaagtcccgccatcctgaggagcagcagaaggtcctttttctattttacagttctttcaacccgatgctaaaccccctgatttacaacctgaggaatgtagaggtcaagggtgccctgaggagagcactgtgcaaggaaagtcattcctaagaggtgtgacatttgaactgccagcctcagttgtcacgtggactcttgatgcccaattattgcctcaatccagaaaagtttacttctctttatctgtgctttactgacagaagggcaagtcttctctcgttttttgcagataaaattttagatgtgttgcattcattgggtttctatgagatgtggttttatcagacaattttttcttttatttcacaattactttaatatctgtaaaataaagaattattttaattcattttcccagtcccaaaagttaaatacaggccacttacttctttaaccaaatgatatagtttggctctgtgtccccacccaaatctcatgtcaaattgtaatccccgcatgtcaggggagggacctggtgggaggtgattggatcatggggagggatttcccccttgctgttctgttgatagtgaacgagttctcacgaaatctgatggtttaaaagtgcagcacttctccctttgctctctctctcctgctgtgccatggtaagacgtgccttgcttcccctgtggcttccgccatgattgtacctttcctgaggcctctccagccatgtggaactgtgagccaattaaacttcttttctttagaaattatccagtcc

SEQ ID NO: 446510 - DNA, 2332 bp, Homo sapiens
gattgtccacactgttcctgcttcctgacaggttcacttgaaccatctggagatggggaacaagggcaatgagttgaacatgtaggaagtttcatggcccagcccctcctgagagccctgaactgccaaccagactgagcccatcagagaataacacctcattttctgaggattctgataccttttcaatcagaaacagaagcaaagattctgcagctcccacagaaactcccagaaaccttgcggtgcttcacccttctgagatccttgagtccgaatgtgggagctaaccaggcacatcttcacaatgaaatcttcacaagctcagaaccatcaacttgctacactgtgttcctccagtgcccagttcacaggaagcactcaagagtaggatcaattgttatcaacctctagcagattattgaatagacggtcgttacatgaaactgacactcagttcttcatggtccacgatagttcttatatccagaaaacgtacttacgttatcaactctgactccataagacaactttgcaaagtcttggctcataactattcttcctccagacaggcacgccatacaaccgactacacttgggctcactgaatgaatcacattcttctgctgtgcctcccagagatttcatcaaagcacccgcagtggccttctggaggctcctcaaactctccactcaatgtttcctgaaagtgtcgtgtttctcacctctagattgttattctcatcagttacattagtgaaatggtgaaaaatcagacaatggtcacagagttcctcctactgggatttctcctgggcccaaggattcagatgctcctctttgggctcttctccctgttctatgtcttcaccctgctggggaatgggaccatcctggggctcatctcactggactccagactccacacccccatgtacttcttcctctcacacctggccgtcgtcaacatcgcctatgcctgcaacacagtgccccagatgctggtgaacctcctgcatccagccaagcccatctcctttgctggctgcatgacatagacctttctctttttgagttttgcacatactgaatgcctcctgttggtgctgatgtcctacgatcggtacgtggccatctgccaccctctccgatatttcatcatcatgacctggaaagtctgcatcactctggccatcacttcctggacatgtggctccctcctggctatggtccatgtgagcctcatcctaagactgcccttttgtgggcctcgtgaaatcaaccacttcttctgtgaaatcctgtctgtccctcaggctggcctgtgctgatacctggctcaaccaggtggtcatctttgcagcctgcatgttcatcctggtgggaccactctgcctggtgctggtctcctactcacacatcctggcggccatcctgaggatccagtctggggagggccgcagaaaggccttctccacctgctcctcccacctctgcgtagtgggactcttctttggcagcgcatccgtcatgtacatggcccctaagtcccgccatcctgaggagcagcagaaggtcctttttctattttacagttctttcaacccgatgctaaaccccctgatttacaacctgaggaatgtagaggtcaagggtgccctgaggagagcactgtgcaaggaaagtcattcctaagaggtgtgacatttgaactgccagcctcagttgtcacgtggactcttgatgcccaattattgcctcaatccagaaaagtttacttctctttatctgtgctttactgacagaagggcaagtcttctctcgttttttgcagataaaattttagatgtgttgcattcattgggtttctatgagatgtggttttatcagacaattttttcttttatttcacaattactttaatatctgtaaaataaagaattattttaattcattttcccagtcccaaaagttaaatacaggccacttacttctttaaccaaatgatatagtttggctctgtgtccccacccaaatctcatgtcaaattgtaatccccgcatgtcaggggagggacctggtgggaggtgattggatcatggggagggatttcccccttgctgttctgttgatagtgaacgagttctcacgaaatctgatggtttaaaagtgcagcacttctccctttgctctctctctcctgctgtgccatggtaagacgtgccttgcttcccctgtggcttccgccatgattgtacctttcctgaggcctctccagccatgtggaactgtgagccaattaaacttcttttctttagaaattatccagtcc

SEQ ID NO: 446511 - DNA, 229 bp, Homo sapiens
gtcccggaatgcttggatttcatgaatcccagcactgcccttgttccccaagcttcagatggttcaagtgaacctgtcaggaagcagaaccagtgtgacaatgaataagctcctggcaggaacctctgtagctcagcctctccctgatgtaatctgggttacttgtgttgcagcagaactgggaagaaaggaccctgaaaagttagctggttccaagtgaccctccaag

SEQ ID NO: 446512 - DNA, 2252 bp, Homo sapiens
gtttccttgacccagagtctggtcctcacattttagattcagctttgggaattttgttcaggaactgcatcatacaacccaaaagcaaaagaggaaaatgcataagccaggatacctaaatgttcctttatttaaacttgaaaatgtgactgcaaaaggagtcaagaagtttagtactcaacacatttcttctttgtagaaataactgctcaagaagataaattgttacctaacagttgattgatgaatatgaaatcagagcaagaggggctaattagagattttactagctagggctatttacccaaaccatctatccagactgtagacatagaatcaccagatggctaggatcctggtgcagctggttcccctttttccttaccctgaatgtcattaaggatgcattgccaaatgctgcccctctggcctgatgactacactccatattggtcacctgccttctttttcctacagtcttcctccagacaggcacgccatacaaccgactacacttgggctcactgaatgaatcacattcttctgctgtgcctcccagagatttcatcaaagcacccgcagtggccttctggaggctcctcaaactctccactcaatgtttcctgaaagtgtcgtgtttctcacctctagattgttattctcatcagttacattagtgaaatggtgaaaaatcagacaatggtcacagagttcctcctactgggatttctcctgggcccaaggattcagatgctcctctttgggctcttctccctgttctatgtcttcaccctgctggggaatgggaccatcctggggctcatctcactggactccagactccacacccccatgtacttcttcctctcacacctggccgtcgtcaacatcgcctatgcctgcaacacagtgccccagatgctggtgaacctcctgcatccagccaagcccatctcctttgctggctgcatgacatagacctttctctttttgagttttgcacatactgaatgcctcctgttggtgctgatgtcctacgatcggtacgtggccatctgccaccctctccgatatttcatcatcatgacctggaaagtctgcatcactctggccatcacttcctggacatgtggctccctcctggctatggtccatgtgagcctcatcctaagactgcccttttgtgggcctcgtgaaatcaaccacttcttctgtgaaatcctgtctgtccctcaggctggcctgtgctgatacctggctcaaccaggtggtcatctttgcagcctgcatgttcatcctggtgggaccactctgcctggtgctggtctcctactcacacatcctggcggccatcctgaggatccagtctggggagggccgcagaaaggccttctccacctgctcctcccacctctgcgtagtgggactcttctttggcagcgcatccgtcatgtacatggcccctaagtcccgccatcctgaggagcagcagaaggtcctttttctattttacagttctttcaacccgatgctaaaccccctgatttacaacctgaggaatgtagaggtcaagggtgccctgaggagagcactgtgcaaggaaagtcattcctaagaggtgtgacatttgaactgccagcctcagttgtcacgtggactcttgatgcccaattattgcctcaatccagaaaagtttacttctctttatctgtgctttactgacagaagggcaagtcttctctcgttttttgcagataaaattttagatgtgttgcattcattgggtttctatgagatgtggttttatcagacaattttttcttttatttcacaattactttaatatctgtaaaataaagaattattttaattcattttcccagtcccaaaagttaaatacaggccacttacttctttaaccaaatgatatagtttggctctgtgtccccacccaaatctcatgtcaaattgtaatccccgcatgtcaggggagggacctggtgggaggtgattggatcatggggagggatttcccccttgctgttctgttgatagtgaacgagttctcacgaaatctgatggtttaaaagtgcagcacttctccctttgctctctctctcctgctgtgccatggtaagacgtgccttgcttcccctgtggcttccgccatgattgtacctttcctgaggcctctccagccatgtggaactgtgagccaattaaacttcttttctttagaaattatccagtcc

SEQ ID NO: 446513 - DNA, 1998 bp, Homo sapiens
gcggggtgacccggggaaggggcgcgcacagagacagagggagccagccgggccccacggtgtcctcggacgcctccgaaatctccctgcgtgtttgtttcttcggagcttcaccggagcctgactctggaaccggcctgtctgcctgctgcagtctgcacatcttcacaatgaaatcttcacaagctcagaaccatcaacttgctacactgtgttcctccagtgcccagttcacaggaagcactcaagagtaggatcaattgttatcaacctctagcagattattgaatagacggtcgttacatgaaactgacactcagttcttcatggtccacgatagttcttatatccagaaaacgtacttacgttatcaactctgactccataagacaactttgcaaagtcttggctcataactattagtgaaatggtgaaaaatcagacaatggtcacagagttcctcctactgggatttctcctgggcccaaggattcagatgctcctctttgggctcttctccctgttctatgtcttcaccctgctggggaatgggaccatcctggggctcatctcactggactccagactccacacccccatgtacttcttcctctcacacctggccgtcgtcaacatcgcctatgcctgcaacacagtgccccagatgctggtgaacctcctgcatccagccaagcccatctcctttgctggctgcatgacatagacctttctctttttgagttttgcacatactgaatgcctcctgttggtgctgatgtcctacgatcggtacgtggccatctgccaccctctccgatatttcatcatcatgacctggaaagtctgcatcactctggccatcacttcctggacatgtggctccctcctggctatggtccatgtgagcctcatcctaagactgcccttttgtgggcctcgtgaaatcaaccacttcttctgtgaaatcctgtctgtccctcaggctggcctgtgctgatacctggctcaaccaggtggtcatctttgcagcctgcatgttcatcctggtgggaccactctgcctggtgctggtctcctactcacacatcctggcggccatcctgaggatccagtctggggagggccgcagaaaggccttctccacctgctcctcccacctctgcgtagtgggactcttctttggcagcgcatccgtcatgtacatggcccctaagtcccgccatcctgaggagcagcagaaggtcctttttctattttacagttctttcaacccgatgctaaaccccctgatttacaacctgaggaatgtagaggtcaagggtgccctgaggagagcactgtgcaaggaaagtcattcctaagaggtgtgacatttgaactgccagcctcagttgtcacgtggactcttgatgcccaattattgcctcaatccagaaaagtttacttctctttatctgtgctttactgacagaagggcaagtcttctctcgttttttgcagataaaattttagatgtgttgcattcattgggtttctatgagatgtggttttatcagacaattttttcttttatttcacaattactttaatatctgtaaaataaagaattattttaattcattttcccagtcccaaaagttaaatacaggccacttacttctttaaccaaatgatatagtttggctctgtgtccccacccaaatctcatgtcaaattgtaatccccgcatgtcaggggagggacctggtgggaggtgattggatcatggggagggatttcccccttgctgttctgttgatagtgaacgagttctcacgaaatctgatggtttaaaagtgcagcacttctccctttgctctctctctcctgctgtgccatggtaagacgtgccttgcttcccctgtggcttccgccatgattgtacctttcctgaggcctctccagccatgtggaactgtgagccaattaaacttcttttctttagaaattatccagtcc

SEQ ID NO: 446514 - DNA, 1702 bp, Homo sapiens
tgtagtttgcaggtcattcaacatttattcaaccaaaaatactaagtcagctctatacaaactaatggaaggatacagctatgcaaatatagaacactaaagtgttacatgacagatgtatgagtagtgaaatggtgaaaaatcagacaatggtcacagagttcctcctactgggatttctcctgggcccaaggattcagatgctcctctttgggctcttctccctgttctatgtcttcaccctgctggggaatgggaccatcctggggctcatctcactggactccagactccacacccccatgtacttcttcctctcacacctggccgtcgtcaacatcgcctatgcctgcaacacagtgccccagatgctggtgaacctcctgcatccagccaagcccatctcctttgctggctgcatgacatagacctttctctttttgagttttgcacatactgaatgcctcctgttggtgctgatgtcctacgatcggtacgtggccatctgccaccctctccgatatttcatcatcatgacctggaaagtctgcatcactctggccatcacttcctggacatgtggctccctcctggctatggtccatgtgagcctcatcctaagactgcccttttgtgggcctcgtgaaatcaaccacttcttctgtgaaatcctgtctgtccctcaggctggcctgtgctgatacctggctcaaccaggtggtcatctttgcagcctgcatgttcatcctggtgggaccactctgcctggtgctggtctcctactcacacatcctggcggccatcctgaggatccagtctggggagggccgcagaaaggccttctccacctgctcctcccacctctgcgtagtgggactcttctttggcagcgcatccgtcatgtacatggcccctaagtcccgccatcctgaggagcagcagaaggtcctttttctattttacagttctttcaacccgatgctaaaccccctgatttacaacctgaggaatgtagaggtcaagggtgccctgaggagagcactgtgcaaggaaagtcattcctaagaggtgtgacatttgaactgccagcctcagttgtcacgtggactcttgatgcccaattattgcctcaatccagaaaagtttacttctctttatctgtgctttactgacagaagggcaagtcttctctcgttttttgcagataaaattttagatgtgttgcattcattgggtttctatgagatgtggttttatcagacaattttttcttttatttcacaattactttaatatctgtaaaataaagaattattttaattcattttcccagtcccaaaagttaaatacaggccacttacttctttaaccaaatgatatagtttggctctgtgtccccacccaaatctcatgtcaaattgtaatccccgcatgtcaggggagggacctggtgggaggtgattggatcatggggagggatttcccccttgctgttctgttgatagtgaacgagttctcacgaaatctgatggtttaaaagtgcagcacttctccctttgctctctctctcctgctgtgccatggtaagacgtgccttgcttcccctgtggcttccgccatgattgtacctttcctgaggcctctccagccatgtggaactgtgagccaattaaacttcttttctttagaaattatccagtcc

SEQ ID NO: 446515 - DNA, 1950 bp, Homo sapiens
gccccaaccatcctgaagctacaggtgctccctcctggaatctccaatggatttcagtcgcagaagcttccacagaagcctgagctcctccttgcaggcccctgtagtcagtacagtgggcatgcagcgcctcgggacgacacccagcgtttatgggggtgctggaggccggggcatccgcatctccaactccagacacacggtgaactatgggagcgatctcacaggcggcggggacctgtttgttggcaatgagaaaatggccatgcagaacctaaatgaccgtctagcgagctacctagaaaaggtgcggaccctggagcagtccaactccaaacttgaagtgcaaatcaagcagtggtacgaaaccaacgccccgagggctggtcgcgactacagtgcatattacagacaaattgaagagctgcgaagtcagattaaggatgctcaactgcaaaatgctcggtgtgtcctgcaaattgataatgctaaactggctgctgaggacttcagactgaagtatgagactgagagaggaatacgtctaacagtggaagctgatctccaaggcctgaataaggtctttgatgacctaaccctacataaaacagatttggagattcaaattgaagaactgaataaagacctagctctcctcaaaaaggagcatcaggaggaagtcgatggcctacacaagcatctgggcaacactgtcaatgtggaggttgatgctgctccaggcctgaaccttggcgtcatcatgaatgaaatgaggcagaagtatgaagtcatggcccagaagaaccttcaagaggccaaagaacagtttgagagacagactgcagttctgcagcaacaggtcacagtgaatactgaagaattaaaaggaactgaggttcaactaacggagctgagacgcacctcccagagccttgagatagaactccagtcccatctcagcatgaaagagtctttggagcacactctagaggagaccaaggcccgttacagcagccagttagccaacctccagtcgctgttgagctctctggaggcccaactgatgcagattcggagtaacatggaacgccagaacaacgaataccatatccttcttgacataaagactcgacttgaacaggaaattgctacttaccgccgccttctggaaggagaagacgtaaaaactacagaatatcagttaagcaccctggaagagagagatataaagaaaaccaggaagattaagacagtcgtgcaagaagtagtggatggcaaggtcgtgtcatctgaagtcaaagaggtggaagaaaatatctaaatagctaccagaaggagatgctgctgaggttttgaaagaaatttggctataatcttatctttgctccctgcaagaaatcagccataagaaagcactattaatactctgcagtgattagaaggggtggggtggcgggaatcctatttatcagactctgtaattgaatataaatgttttactcagaggagctgcaaattgcctgcaaaaatgaaatccagtgagcactagaatatttaaaacatcattactgccatctttatcatgaagcacatcaattacaagctgtagaccacctaatatcaatttgtaggtaatgttcctgaaaattgcaatacatttcaattatactaaacctcacaaagtagaggaatccatgtaaattgcaaataaaccactttctaattttttcctgtttctgaattgtaaaaccccctttgggagtccctggtttcttattgagccaatttctgggttaatcttattgatttttcagcatcagtacaactctacaacctttgagctatatctgctttttcccattgcttccactgccttttaaaactcaacacagctttttgaataatttgagagtcaaattcaatcacaaatgctgagcagaataagagtga

SEQ ID NO: 446516 - DNA, 753 bp, Homo sapiens
ggtaccaaagtgatcctccatcttaaagaagatcagcaagagtacctagaagacagtcgtgcaagaagtagtggatggcaaggtcgtgtcatctgaagtcaaagaggtggaagaaaatatctaaatagctaccagaaggagatgctgctgaggttttgaaagaaatttggctataatcttatctttgctccctgcaagaaatcagccataagaaagcactattaatactctgcagtgattagaaggggtggggtggcgggaatcctatttatcagactctgtaattgaatataaatgttttactcagaggagctgcaaattgcctgcaaaaatgaaatccagtgagcactagaatatttaaaacatcattactgccatctttatcatgaagcacatcaattacaagctgtagaccacctaatatcaatttgtaggtaatgttcctgaaaattgcaatacatttcaattatactaaacctcacaaagtagaggaatccatgtaaattgcaaataaaccactttctaattttttcctgtttctgaattgtaaaaccccctttgggagtccctggtttcttattgagccaatttctgggttaatcttattgatttttcagcatcagtacaactctacaacctttgagctatatctgctttttcccattgcttccactgccttttaaaactcaacacagctttttgaataatttgagagtcaaattcaatcacaaatgctgagcagaataagagtga

SEQ ID NO: 446517 - DNA, 745 bp, Homo sapiens
gccccaaccatcctgaagctacaggtgctccctcctggaatctccaatggatttcagtcgcagaagcttccacagaagcctgagctcctccttgcaggcccctgtagtcagtacagtgggcatgcagcgcctcgggacgacacccagcgtttatgggggtgctggaggccggggcatccgcatctccaactccagacacacggtgaactatgggagcgatctcacaggcggcggggacctgtttgttggcaatgagaaaatggccatgcagaacctaaatgaccgtctagcgagctacctagaaaaggtgcggaccctggagcagtccaactccaaacttgaagtgcaaatcaagcagtggtacgaaaccaacgccccgagggctggtcgcgactacagtgcatattacagacaaattgaagagctgcgaagtcagattaaggatgctcaactgcaaaatgctcggtgtgtcctgcaaattgataatgctaaactggctgctgaggacttcagactgaagtaggttccctaatacgtggcaaaagtttctgaaaaagaattcctttagtagtccttccagatactcagctttccatatcattgttgataaaggaagcacggttcaattcctcatccttggaaggatgagaaattggtgtatgcatcggggtagtccgagtaacgtcggggcattccggatagccgagaaagtgttgtgggaagaaagttagatttacgcctattc

SEQ ID NO: 446518 - DNA, 310 bp, Homo sapiens
tgagctctctggaggcccaactgatgcagattcggagtaacatggaacgccagaacaacgaataccatatccttcttgacataaagactcgacttgaacaggaaattgctacttaccgccgccttctggaaggagaagacgtaaagtaaggctcttagaatcaaggaataggtgtcaatatctgtatgcacttctattttaatgtccctgtcactcattacccagcaccaatgcaatccctaggacagaagcaattatactcacacatgcctcaccacgaacaacaaaacgaaaatataccaaaaaatac

SEQ ID NO: 446519 - DNA, 1726 bp, Homo sapiens
gccccaaccatcctgaagctacaggtgctccctcctggaatctccaatggatttcagtcgcagaagcttccacagaagcctgagctcctccttgcaggcccctgtagtcagtacagtgggcatgcagcgcctcgggacgacacccagcgtttatgggggtgctggaggccggggcatccgcatctccaactccagacacacggtgaactatgggagcgatctcacaggcggcggggacctgtttgttggcaatgagaaaatggccatgcagaacctaaatgaccgtctagcgagctacctagaaaaggtgcggaccctggagcagtccaactccaaacttgaagtgcaaatcaagcagtggtacgaaaccaacgccccgagggctggtcgcgactacagtgcatattacagacaaattgaagagctgcgaagtcagattaaggatgctcaactgcaaaatgctcggtgtgtcctgcaaattgataatgctaaactggctgctgaggacttcagactgaagtatgagactgagagaggaatacgtctaacagtggaagctgatctccaaggcctgaataaggtctttgatgacctaaccctacataaaacagatttggagattcaaattgaagaactgaataaagacctagctctcctcaaaaaggagcatcaggaggaagtcgatggcctacacaagcatctgggcaacactgtcaatgtggaggttgatgctgctccaggcctgaaccttggcgtcatcatgaatgaaatgaggcagaagtatgaagtcatggcccagaagaaccttcaagaggccaaagaacagtttgagagacagactgcagttctgcagcaacaggtcacagtgaatactgaagaattaaaaggaactgaggttcaactaacggagctgagacgcacctcccagagccttgagatagaactccagtcccatctcagcatgaaagagtctttggagcacactctagaggagaccaaggcccgttacagcagccagttagccaacctccagtcgctgttgagctctctggaggcccaactgatgcagattcggagtaacatggaacgccagaacaacgaataccatatccttcttgacataaagactcgacttgaacaggaaattgctacttaccgccgccttctggaaggagaagacgtaaaaactacagaatatcagttaagcaccctggaagagagagatataaagaaaaccaggaagattaagacagtcgtgcaagaagtagtggatggcaaggtcgtgtcatctgaagtcaaagaggtggaagaaaatatctaaatagctaccagaaggagatgctgctgaggttttgaaagaaatttggctataatcttatctttgctccctgcaagaaatcagccataagaaagcactattaatactctgcagtgattagaaggggtggggtggcgggaatcctatttatcagactctgtaattgaatataaatgttttactcagaggagctgcaaattgcctgcaaaaatgaaatccagtgagcactagaatatttaaaacatcattactgccatctttatcatgaagcacatcaattacaagctgtagaccacctaatatcaatttgtaggtaatgttcctgaaaattgcaatacatttcaattatactaaacctcacaaagtagaggaatccatgtaaattgcaaataaaccactttctaattt

SEQ ID NO: 446520 - DNA, 1489 bp, Homo sapiens
gccccaaccatcctgaagctacaggtgctccctcctggaatctccaatggatttcagtcgcagaagcttccacagaagcctgagctcctccttgcaggcccctgtagtcagtacagtgggcatgcagcgcctcgggacgacacccagcgtttatgggggtgctggaggccggggcatccgcatctccaactccagacacacggtgaactatgggagcgatctcacaggcggcggggacctgtttgttggcaatgagaaaatggccatgcagaacctaaatgaccgtctagcgagctacctagaaaaggtgcggaccctggagcagtccaactccaaacttgaagtgcaaatcaagcagtggtacgaaaccaacgccccgagggctggtcgcgactacagtgcatattacagacaaattgaagagctgcgaagtcagattaaggatgctcaactgcaaaatgctcggtgtgtcctgcaaattgataatgctaaactggctgctgaggacttcagactgaagtatgagactgagagaggaatacgtctaacagtggaagctgatctccaaggcctgaataaggtctttgatgacctaaccctacataaaacagatttggagattcaaattgaagaactgaataaagacctagctctcctcaaaaaggagcatcaggaggaagtcgatggcctacacaagcatctgggcaacactgtcaatgtggaggttgatgctgctccaggcctgaaccttggcgtcatcatgaatgaaatgaggcagaagtatgaagtcatggcccagaagaaccttcaagaggccaaagaacagtttgagagacagactgcagttctgcagcaacaggtcacagtgaatactgaagaattaaaaggaactgaggttcaactaacggagctgagacgcacctcccagagccttgagatagaactccagtcccatctcagcatgaaagagtctttggagcacactctagaggagaccaaggcccgttacagcagccagttagccaacctccagtcgctgttgagctctctggaggcccaactgatgcagattcggagtaacatggaacgccagaacaacgaataccatatccttcttgacataaagactcgacttgaacaggaaattgctacttaccgccgccttctggaaggagaagacgtaaaaactacagaatatcagttaagcaccctggaagagagagatataaagaaaaccaggaagattaagacagtcgtgcaagaagtagtggatggcaaggtcgtgtcatctgaagtcaaagaggtggaagaaaatatctaaatagctaccagaaggagatgctgctgaggttttgaaagaaatttggctataatcttatctttgctccctgcaagaaatcagccataagaaagcactattaatactctgcagagaggggcggagcagcagagaggggcggagcagcagagaggggcgagcaggggtacc

SEQ ID NO: 446521 - DNA, 260 bp, Homo sapiens
tttctctattgactactccaccttatcctcagttaccacctccaacttattcagggtttctcccattcctgttccttcacagctcatatcaggacatcctgtgagactcttccccctgactcccccattgtgttaagaacccagcaacccaggagcctagtacaatatagtgatgccatcccgtcgactctccatttaaattgtttctctttctgcataataaacatttgttaataaaaaccaaattctaatttggaatg

SEQ ID NO: 446522 - DNA, 1353 bp, Homo sapiens
tgcacgagggcagttgaggaagggaagtagatataatggagcttagtggcagagcagctggaatcctgagagaagagaataactttagttcagagcaggtggggaaatgagagattgagtaggaggaccaaggttgagggaagcagatcttcttagttgctgtcagcggctgatggggaagattgttggtagaaggaagtcagaatataggtacagagggataagtttgctaagaacagagatcagcaaacagcttttctgagagaaagaaacatctgcaaatgacatgctgtttctgcagtttctgctgctagctcttcttctcccaggtggtgacaatgcagacgcatcccaggaacacgtctccttccatgtcatccagatcttctcatttgtcaaccaatcctgggcacgaggtcagggctcaggatggctggacgagttgcagactcatggctgggacagtgaatcaggcacaataattttcctgcataactggtccaagggcaacttcagcaatgaagagttgtcagacctagagttgttatttcgtttctacctctttggattaactcgggagattcaagaccatgcaagtcaagattactcgaaatatccctttgaagtacaggtgaaagcgggctgtgagctgcattctggaaagagcccagaaggcttctttcaggtagctttcaacggattagatttactgagtttccagaatacaacatgggtgccatctccaggctgtggaagtttggcccaaagtgtctgtcatctactcaatcatcagtatgaaggcgtcacagaaacagtgtataatctcataagaagcacttgcccccgatttctcttgggtctcctggatgcagggaagatgtatgtacacaggcaagtgaggccagaagcctggctgtccagtcgccccagccttgggtctggccagctgttgctggtttgtcatgcctccggcttctacccaaagcctgtttgggtgacatggatgcggaatgaacaggagcaactgggcactaaacatggtgatattcttcctaatgctgatgggacatggtatcttcaggtgatcctggaggtggcatctgaggagcctgctggcctgtcttgtcgagtgagacacagcagtctaggaggccaggacatcatcctctactgggctcatatcaggacatcctgtgagactcttccccctgactcccccattgtgttaagaacccagcaacccaggagcctagtacaatatagtgatgccatcccgtcgactctccatttaaattgtttctctttctgcataataaacatttgttaataaaaaccaaattctaatttggaatg

SEQ ID NO: 446523 - DNA, 741 bp, Homo sapiens
  misc_feature (699)..(699): n is a, c, g, or t
tgcacgagggcagttgaggaagggaagtagatataatggagcttagtggcagagcagctggaatcctgagagaagagaataactttagttcagagcaggtggggaaatgagagattgagtaggaggaccaaggttgagggaagcagatcttcttagttgctgtcagcggctgatggggaagattgttggtagaaggaagtcagaatataggtacagagggataagtttgctaagaacagagatcagcaaacagcttttctgagagaaagaaacatctgcaaatgacatgctgtttctgcagtttctgctgctagctcttcttctcccaggtggtgacaatgcagacgcatcccaggaacacgtctccttccatgtcatccagatcttctcatttgtcaaccaatcctgggcacgaggtcagggctcaggatggctggacgagttgcagactcatggctgggacagtgaatcaggcacaataattttcctgcataactggtccaagggcaacttcagcaatgaagagttgtcagacctagagttgttatttcgtttctacctctttggattaactcgggagattcaagaccatgcaagtcaagattactcgaaatatccctttgaagtacaggtgaaagcgggctgtgagctgcattctggaaagagccccaacaagggcttccccctgaaggtaccctnttaaacgccccctccccacccccactcgagccctcccaacaa

SEQ ID NO: 446524 - DNA, 708 bp, Homo sapiens
ggaggccaggacatcatcctctactggggtaagactggaggttggaagtgtaggtaggtggttcttgagcctagaggttaggggagaggaaattttgaggatagcagacctaggtgagggattgtaggaagaaatgtatagggtaatttaaagaatagtggagtaagacctaagggatacatggatactagagatttaaggggaaatgaggaatccttccttgagtaagttttggaatagagtgactgaaataggataactgatgcaactcatccaatgcatatgttaagtaaggaaatcaatagatggaatagaatcagcagtgagtttaaaatggcatccatgtatctttccaatatgtgcaggacaccacttttccatgaattggattgccttggtagtgatagtgcccttggtgattctaatagtccttgtgttatggtttaagaagcactggtgagttttttgtatttcctcctctcctcccagtttcttatttcacattccatttttcactctcttagcttttctctattgactactccaccttatcctcagttaccacctccaacttattcagggtttctcccattcctgttccttcacagctcatatcaggacatcctgtgagactcttccccctgactcccccattgtgttaagaacccagcaacccaggagcctagtacaatatagtgatgccatccc

SEQ ID NO: 446525 - DNA, 1444 bp, Homo sapiens
tgcacgagggcagttgaggaagggaagtagatataatggagcttagtggcagagcagctggaatcctgagagaagagaataactttagttcagagcaggtggggaaatgagagattgagtaggaggaccaaggttgagggaagcagatcttcttagttgctgtcagcggctgatggggaagattgttggtagaaggaagtcagaatataggtacagagggataagtttgctaagaacagagatcagcaaacagcttttctgagagaaagaaacatctgcaaatgacatgctgtttctgcagtttctgctgctagctcttcttctcccaggtggtgacaatgcagacgcatcccaggaacacgtctccttccatgtcatccagatcttctcatttgtcaaccaatcctgggcacgaggtcagggctcaggatggctggacgagttgcagactcatggctgggacagtgaatcaggcacaataattttcctgcataactggtccaagggcaacttcagcaatgaagagttgtcagacctagagttgttatttcgtttctacctctttggattaactcgggagattcaagaccatgcaagtcaagattactcgaaatatccctttgaagtacaggtgaaagcgggctgtgagctgcattctggaaagagcccagaaggcttctttcaggtagctttcaacggattagatttactgagtttccagaatacaacatgggtgccatctccaggctgtggaagtttggcccaaagtgtctgtcatctactcaatcatcagtatgaaggcgtcacagaaacagtgtataatctcataagaagcacttgcccccgatttctcttgggtctcctggatgcagggaagatgtatgtacacaggcaagtgaggccagaagcctggctgtccagtcgccccagccttgggtctggccagctgttgctggtttgtcatgcctccggcttctacccaaagcctgtttgggtgacatggatgcggaatgaacaggagcaactgggcactaaacatggtgatattcttcctaatgctgatgggacatggtatcttcaggtgatcctggaggtggcatctgaggagcctgctggcctgtcttgtcgagtgagacacagcagtctaggaggccaggacatcatcctctactggggacaccacttttccatgaattggattgccttggtagtgatagtgcccttggtgattctaatagtccttgtgttatggtttaagaagcactgctcatatcaggacatcctgtgagactcttccccctgactcccccattgtgttaagaacccagcaacccaggagcctagtacaatatagtgatgccatcccgtcgactctccatttaaattgtttctctttctgcataataaacatttgttaataaaaaccaaattctaatttggaatg

SEQ ID NO: 446526 - DNA, 907 bp, Homo sapiens
gtgggcagtgtacagtgcagaaacaaagttctaggcagaggaaaaaggatttacagaaagcctggcatacagggcagggggacggggcctgcacacggggctgtttcaccgttagacgttataagcacagtacttggggctatgggcttcctgaaggtcccaagtatttgagacctgaaaaaaatttattgacacctacataggaaaagtgaacttttaaattaataattccaaaattcaaatcacgaattgtttcaaaaattttacatgatagaattcatatttagtaagcgatacgggtatattttaatgcatttgattttaaaaacggggtagggcctactaagaacaggccaagccctggccccagtgggtttggatataatcctgagggcagctgggaaccactgagagaagcaggagaatgttctctgtggctacagtgaggagaatggattggagggaggccagactggaggcccagtggctagagaccagataggcagttacagtcttccagactgcgagacaatctctctttagtgccaagattagcataaaatcatagcattatataacccaattattctttgattcctgcatccccaatctgactcagcattctaaatttacttaagatctggggacaagggtttttggcaaatccttgaaggcaaatgatgttacagtcaatcagtatatgccttgagccagacagacatgggtacgggcctcagttctgctgcttgctagctatgtgactttgcacaagtgatttaacttctctgggccttggattccttactggtaacacgagcataatcgattcctcacagaattaagtgagaaaactatgtatgtaggacttcttatggagtgggtacttagaaataaatggtagccgtta

SEQ ID NO: 446527 - DNA, 468 bp, Homo sapiens
gctcccagggggccagagtttcccaggaacaccattgagtaccactgaactaagaccagataggcagttacagtcttccagactgcgagacaatctctctttagtgccaagattagcataaaatcatagcattatataacccaattattctttgattcctgcatccccaatctgactcagcattctaaatttacttaagatctggggacaagggtttttggcaaatccttgaaggcaaatgatgttacagtcaatcagtatatgccttgagccagacagacatgggtacgggcctcagttctgctgcttgctagctatgtgactttgcacaagtgatttaacttctctgggccttggattccttactggtaacacgagcataatcgattcctcacagaattaagtgagaaaactatgtatgtaggacttcttatggagtgggtacttagaaataaatggtagccgtta

SEQ ID NO: 446528 - DNA, 1380 bp, Homo sapiens
gtgggcagtgtacagtgcagaaacaaagttctaggcagaggaaaaaggatttacagaaagcctggcatacagggcagggggacggggcctgcacacggggctgtttcaccgttagacgttataagcacagtacttggggctatgggcttcctgaaggtcccaagtatttgagacctgaaaaaaatttattgacacctacataggaaaagtgaacttttaaattaataattccaaaattcaaatcacgaattgtttcaaaaattttacatgatagaattcatatttagtaagcgatacgggtatattttaatgcatttgattttaaaaacggggtagggcctactaagaacaggccaagccctggccccagtgggtttggatataatcctgagggcagctgggaaccactgagagaagcaggagaatgttctctgtggctacagtgaggagaatggattggagggaggccagactggaggcccagtggctagagaccagataggcagttacagtcttccagactgcgagacaatctctctttagtgccaagattagcataaaatcatagcattatataacccaattattctttgattcctgcatccccaatctgactcagcattctaaatttacttaagatctggggacaagggtttttggcaaatccttgaaggcaaatgatgttacagtcaatcagtatatgccttgagccagacagacatgggtacgggcctcagttctgctgcttgctagctatgtgactttgcacaagtgatttaacttctctgggccttggattccttactggtaacacgagcataatcgattcctcacagaattaagtgagaaaactatgtatgtaggacttcttatggagtgggtacttagaaataaatggtagccgttatcatttatgtgcctttgttctgaaatctgcttaagttttctctaggaagtaacagagggtagaataaattatttagtattttcatcaatcttctgagataaaaattattatcctcattttgcagataaggaaaagggctcagagattagatcacagctctgtgaagtaggggcacaaagtggtcaacctggaagagctggactttattttgcttgcacttctgtccatgcactctctccagcagttgacatttgccctctttgatggctccacgaccaatttcccttagtcatggcatgagtcagctgtgagggctgatggcacaccaccgaatactctgctgtggcgccactagcctccatttaccttcttctccaacgttttccagcctccctcataccttgccccccagttttatagcttctggattttccttattaaagagcttgtttctgagactcaaaaaaaaaaac

SEQ ID NO: 446529 - DNA, 2964 bp, Homo sapiens
ggagggagtctatgcgagctggacagcagtgggaggtttgtgaggctcgcactggccgcagaccctcgggctcgatcgcccgggagccaggactcggcgacgcgaggctgccgggctacccggccgaggcttcgggggcgcaaactaatgggactggctcgctcggcagcatctccccgctcttctaagtacactgagcagggcccgcgctgaagtagaagctgtccgggggcgcgtagcccggagtcccagtgtggcccggaggaacggagcccgtgccagggcggcccagtcgggagcccggggaccgagcttgtgctgtggggaaacccccacttcttccaagggacagcgatcccgggacggtcgaggcgtcggggcggtcaccgagacctctgcgggaagaccccgtcggggagagggcgcgcagccccgaagcgtctcgggaagtcgagcggaatcgggcgggatcacccgggggcgcagagcccccgtcgcgcctcgtgcggcagcggagagcccaggagaacgagccctcgggggccgaagcccatgcccgggttgggggcggctgcccagtgagtcctcctggccggccgggcggagaagagcgacaccgaagccggcgggaggggagcacttcaaggccggcggctgcggaggatgggcgcctgagcggctccgagcgcagcgcggcagaggaaggcgaggcgagctttggtgaggaggcgccaagggatcccgaagtgcagtctgcccccgggaagatggctcggcctgggcagcgttggctcggcaagtggcttgtggcgatggtcgtgtgggcgctgtgccggctcgccacaccgctggccaagaacctggagcccgtatcctggagctccctcaaccccaagttcctgagtgggaagggcttggtgatctatccgaaaattggagacaagctggacatcatctgcccccgagcagaagcagggcggccctatgagtactacaagctgtacctggtgcggcctgagcaggcagctgcctgtagcacagttctcgaccccaacgtgttggtcacctgcaataggccagagcaggaaatacgctttaccatcaagttccaggagttcagccccaactacatgggcctggagttcaagaagcaccatgattactacattacctcaacatccaatggaagcctggaggggctggaaaaccgggagggcggtgtgtgccgcacacgcaccatgaagatcatcatgaaggttgggcaagatcccaatgctgtgacgcctgagcagctgactaccagcaggcccagcaaggaggcagacaacactgtcaagatggccacacaggcccctggtagtcggggctccctgggtgactctgatggcaagcatgagactgtgaaccaggaagagaagagtggcccaggtgcaagtgggggcagcagcggggaccctgatggcttcttcaactccaaggtggcattgttcgcggctgtcggtgccggttgcgtcatcttcctgctcatcatcatcttcctgacggtcctactactgaagctacgcaagcggcaccgcaagcacacacagcagcgggcggctgccctctcgctcagtaccctggccagtcccaaggggggcagtggcacagcgggcaccgagcccagcgacatcatcattcccttacggactacagagaacaactactgcccccactatgagaaggtgagtggggactacgggcaccctgtctacatcgtccaagagatgccgccccagagcccggcgaacatctactacaaggtctgagtgcccggcacggcctcaggcccccgagggacagtcggcctggaccggacctctcctttcgcccccacaccccctccccttgccagctgtgcccacctttgtatttagttttgtagtttcttggcttttataatccccctttttccctgccccctgggcttcggaggggggtgcttgtgcccctaacccccatgctcttgtgccttccccctctggccaggcctctgggctccgtgggggcgccccttcttggaaggcagggctggacactgatggacagcaggcagggagacagtcccctggccctgcccctccctcgccccccttgccaccttcccaggactgcttgtccgctatcatcactgtttttaatgcttttgtgttcattttttagctgtcaactcattttcatctgttttttgaagaaaaatggaaaaatgtaaaaggcagcccctccccaggctttgtgagcctggcccaagccagtacaagagggcctggggcacgatgtggtcagccaggaagcataggatgccatttcttttatagattccttggtatttctggtggggtaaggggcaggccagggctgttcacgcccatgagggaagaggaaagtgccactgggcaaggtgtcccaccctcccctcctgaccctcctacgaggcttatcctggcaatggggtagtcactgccacccttccacacacacacacacacacacacacacacacacaaaaatcccttccttgtgggattcttgggcatctcctgcctccctcactctcacggtaattaatgtcttaattggctgttgcctggggaacaggagagctgctgcaggcagatgacctcatggggggtggagggaggtgaggtgcccaggtggctatttgccctgcagagctgggagtttcacccccaccccccaccctgttctctccttacctttggcatcctttggcctggtggggaaacagaggcccagggtggagacctaagcgggtataagaccaggtggcctgctccttttctgggccctagcacaggtgggtaacccccacccaacccagctcctgctgctgtcccagtcttgggctggggcctggaaagaggaagaggctgcctgggagcaggtcgtctcgttccaagatct

SEQ ID NO: 446530 - DNA, 2492 bp, Homo sapiens
ttgatctctcagccctggagtaggagaaggcagctttagttttcttctcctcgattaaggttcctgagtgggaagggcttggtgatctatccgaaaattggagacaagctggacatcatctgcccccgagcagaagcagggcggccctatgagtactacaagctgtacctggtgcggcctgagcaggcagctgcctgtagcacagttctcgaccccaacgtgttggtcacctgcaataggccagagcaggaaatacgctttaccatcaagttccaggagttcagccccaactacatgggcctggagttcaagaagcaccatgattactacattacctcaacatccaatggaagcctggaggggctggaaaaccgggagggcggtgtgtgccgcacacgcaccatgaagatcatcatgaaggttgggcaagatcccaatgctgtgacgcctgagcagctgactaccagcaggcccagcaaggaggcagacaacactgtcaagatggccacacaggcccctggtagtcggggctccctgggtgactctgatggcaagcatgagactgtgaaccaggaagagaagagtggcccaggtgcaagtgggggcagcagcggggaccctgatggcttcttcaactccaaggtggcattgttcgcggctgtcggtgccggttgcgtcatcttcctgctcatcatcatcttcctgacggtcctactactgaagctacgcaagcggcaccgcaagcacacacagcagcgggcggctgccctctcgctcagtaccctggccagtcccaaggggggcagtggcacagcgggcaccgagcccagcgacatcatcattcccttacggactacagagaacaactactgcccccactatgagaaggtgagtggggactacgggcaccctgtctacatcgtccaagagatgccgccccagagcccggcgaacatctactacaaggtctgagtgcccggcacggcctcaggcccccgagggacagtcggcctggaccggacctctcctttcgcccccacaccccctccccttgccagctgtgcccacctttgtatttagttttgtagtttcttggcttttataatccccctttttccctgccccctgggcttcggaggggggtgcttgtgcccctaacccccatgctcttgtgccttccccctctggccaggcctctgggctccgtgggggcgccccttcttggaaggcagggctggacactgatggacagcaggcagggagacagtcccctggccctgcccctccctcgccccccttgccaccttcccaggactgcttgtccgctatcatcactgtttttaatgcttttgtgttcattttttagctgtcaactcattttcatctgttttttgaagaaaaatggaaaaatgtaaaaggcagcccctccccaggctttgtgagcctggcccaagccagtacaagagggcctggggcacgatgtggtcagccaggaagcataggatgccatttcttttatagattccttggtatttctggtggggtaaggggcaggccagggctgttcacgcccatgagggaagaggaaagtgccactgggcaaggtgtcccaccctcccctcctgaccctcctacgaggcttatcctggcaatggggtagtcactgccacccttccacacacacacacacacacacacacacacacacaaaaatcccttccttgtgggattcttgggcatctcctgcctccctcactctcacggtaattaatgtcttaattggctgttgcctggggaacaggagagctgctgcaggcagatgacctcatggggggtggagggaggtgaggtgcccaggtggctatttgccctgcagagctgggagtttcacccccaccccccaccctgttctctccttacctttggcatcctttggcctggtggggaaacagaggcccagggtggagacctaagcgggtataagaccaggtggcctgctccttttctgggccctagcacaggtgggtaacccccacccaacccagctcctgctgctgtcccagtcttgggctggggcctggaaagaggaagaggctgcctggggctgggccagcccgctgtgcactttgaccccagttccttgccagcacggctgctaacagactgccacttgagtgcgccttgcaggcactcccagagcagccatggaaggagctggccctcacaccatccacctccacactgcctcctggccagctgcccaccccagtgccaggtgggagagggagcagaacagccagccccttccaggtggcagtcggaagggtttttgtttttgtttctgttgccatttgtgtaaatactagtctttttggaaaaaaaataatgtaaagatgttttgtataaactctgaattattttcttgttgcttttttcttagaaaaaaatgagaactaaaaaaaaaaaattaaccacatggaaaaaaaaaaata

SEQ ID NO: 446531 - DNA, 2715 bp, Homo sapiens
ggagggagtctatgcgagctggacagcagtgggaggtttgtgaggctcgcactggccgcagaccctcgggctcgatcgcccgggagccaggactcggcgacgcgaggctgccgggctacccggccgaggcttcgggggcgcaaactaatgggactggctcgctcggcagcatctccccgctcttctaagtacactgagcagggcccgcgctgaagtagaagctgtccgggggcgcgtagcccggagtcccagtgtggcccggaggaacggagcccgtgccagggcggcccagtcgggagcccggggaccgagcttgtgctgtggggaaacccccacttcttccaagggacagcgatcccgggacggtcgaggcgtcggggcggtcaccgagacctctgcgggaagaccccgtcggggagagggcgcgcagccccgaagcgtctcgggaagtcgagcggaatcgggcgggatcacccgggggcgcagagcccccgtcgcgcctcgtgcggcagcggagagcccaggagaacgagccctcgggggccgaagcccatgcccgggttgggggcggctgcccagtgagtcctcctggccggccgggcggagaagagcgacaccgaagccggcgggaggggagcacttcaaggccggcggctgcggaggatgggcgcctgagcggctccgagcgcagcgcggcagaggaaggcgaggcgagctttggtgaggaggcgccaagggatcccgaagtgcagtctgcccccgggaagatggctcggcctgggcagcgttggctcggcaagtggcttgtggcgatggtcgtgtgggcgctgtgccggctcgccacaccgctggccaagaacctggagcccgtatcctggagctccctcaaccccaagttcctgagtgggaagggcttggtgatctatccgaaaattggagacaagctggacatcatctgcccccgagcagaagcagggcggccctatgagtactacaagctgtacctggtgcggcctgagcaggcagctgcctgtagcacagttctcgaccccaacgtgttggtcacctgcaataggccagagcaggaaatacgctttaccatcaagttccaggagttcagccccaactacatgggcctggagttcaagaagcaccatgattactacattacctcaacatccaatggaagcctggaggggctggaaaaccgggagggcggtgtgtgccgcacacgcaccatgaagatcatcatgaaggttgggcaagatcccaatgctgtgacgcctgagcagctgactaccagcaggcccagcaaggaggcagacaacactgtcaagatggccacacaggcccctggtagtcggggctccctgggtgactctgatggcaagcatgagactgtgaaccaggaagagaagagtggcccaggtgcaagtgggggcagcagcggggaccctgatggcttcttcaactccaaggtggcattgttcgcggctgtcggtgccggttgcgtcatcttcctgctcatcatcatcttcctgacggtcctactactgaagctacgcaagcggcaccgcaagcacacacagcagcgggcggctgccctctcgctcagtaccctggccagtcccaaggggggcagtggcacagcgggcaccgagcccagcgacatcatcattcccttacggactacagagaacaactactgcccccactatgagaaggtgagtggggactacgggcaccctgtctacatcgtccaagagatgccgccccagagcccggcgaacatctactacaaggtctgagtgcccggcacggcctcaggcccccgagggacagtcggcctggaccggacctctcctttcgcccccacaccccctccccttgccagctgtgcccacctttgtatttagttttgtagtttcttggcttttataatccccctttttccctgccccctgggcttcggaggggggtgcttgtgcccctaacccccatgctcttgtgccttccccctctggccaggcctctgggctccgtgggggcgccccttcttggaaggcagggctggacactgatggacagcaggcagggagacagtcccctggccctgcccctccctcgccccccttgccaccttcccaggactgcttgtccgctatcatcactgtttttaatgcttttgtgttcattttttagctgtcaactcattttcatctgttttttgaagaaaaatggaaaaatgtaaaaggcagcccctccccaggctttgtgagcctggcccaagccagtacaagagggcctggggcacgatgtggtcagccaggaagcataggatgccatttcttttatagattccttggtatttctggtggggtaaggggcaggccagggctgttcacgcccatgagggaagaggaaagtgccactgggcaaggtgtcccacccatccacctccacactgcctcctggccagctgcccaccccagtgccaggtgggagagggagcagaacagccagccccttccaggtggcagtcggaagggtttttgtttttgtttctgttgccatttgtgtaaatactagtctttttggaaaaaaaataatgtaaagatgttttgtataaactctgaattattttcttgttgcttttttcttagaaaaaaatgagaactaaaaaaaaaaaattaaccacatggaaaaaaaaaaata

SEQ ID NO: 446532 - DNA, 3328 bp, Homo sapiens
ggagggagtctatgcgagctggacagcagtgggaggtttgtgaggctcgcactggccgcagaccctcgggctcgatcgcccgggagccaggactcggcgacgcgaggctgccgggctacccggccgaggcttcgggggcgcaaactaatgggactggctcgctcggcagcatctccccgctcttctaagtacactgagcagggcccgcgctgaagtagaagctgtccgggggcgcgtagcccggagtcccagtgtggcccggaggaacggagcccgtgccagggcggcccagtcgggagcccggggaccgagcttgtgctgtggggaaacccccacttcttccaagggacagcgatcccgggacggtcgaggcgtcggggcggtcaccgagacctctgcgggaagaccccgtcggggagagggcgcgcagccccgaagcgtctcgggaagtcgagcggaatcgggcgggatcacccgggggcgcagagcccccgtcgcgcctcgtgcggcagcggagagcccaggagaacgagccctcgggggccgaagcccatgcccgggttgggggcggctgcccagtgagtcctcctggccggccgggcggagaagagcgacaccgaagccggcgggaggggagcacttcaaggccggcggctgcggaggatgggcgcctgagcggctccgagcgcagcgcggcagaggaaggcgaggcgagctttggtgaggaggcgccaagggatcccgaagtgcagtctgcccccgggaagatggctcggcctgggcagcgttggctcggcaagtggcttgtggcgatggtcgtgtgggcgctgtgccggctcgccacaccgctggccaagaacctggagcccgtatcctggagctccctcaaccccaagttcctgagtgggaagggcttggtgatctatccgaaaattggagacaagctggacatcatctgcccccgagcagaagcagggcggccctatgagtactacaagctgtacctggtgcggcctgagcaggcagctgcctgtagcacagttctcgaccccaacgtgttggtcacctgcaataggccagagcaggaaatacgctttaccatcaagttccaggagttcagccccaactacatgggcctggagttcaagaagcaccatgattactacattacctcaacatccaatggaagcctggaggggctggaaaaccgggagggcggtgtgtgccgcacacgcaccatgaagatcatcatgaaggttgggcaagatcccaatgctgtgacgcctgagcagctgactaccagcaggcccagcaaggaggcagacaacactgtcaagatggccacacaggcccctggtagtcggggctccctgggtgactctgatggcaagcatgagactgtgaaccaggaagagaagagtggcccaggtgcaagtgggggcagcagcggggaccctgatggcttcttcaactccaaggtggcattgttcgcggctgtcggtgccggttgcgtcatcttcctgctcatcatcatcttcctgacggtcctactactgaagctacgcaagcggcaccgcaagcacacacagcagcgggcggctgccctctcgctcagtaccctggccagtcccaaggggggcagtggcacagcgggcaccgagcccagcgacatcatcattcccttacggactacagagaacaactactgcccccactatgagaaggtgagtggggactacgggcaccctgtctacatcgtccaagagatgccgccccagagcccggcgaacatctactacaaggtctgagtgcccggcacggcctcaggcccccgagggacagtcggcctggaccggacctctcctttcgcccccacaccccctccccttgccagctgtgcccacctttgtatttagttttgtagtttcttggcttttataatccccctttttccctgccccctgggcttcggaggggggtgcttgtgcccctaacccccatgctcttgtgccttccccctctggccaggcctctgggctccgtgggggcgccccttcttggaaggcagggctggacactgatggacagcaggcagggagacagtcccctggccctgcccctccctcgccccccttgccaccttcccaggactgcttgtccgctatcatcactgtttttaatgcttttgtgttcattttttagctgtcaactcattttcatctgttttttgaagaaaaatggaaaaatgtaaaaggcagcccctccccaggctttgtgagcctggcccaagccagtacaagagggcctggggcacgatgtggtcagccaggaagcataggatgccatttcttttatagattccttggtatttctggtggggtaaggggcaggccagggctgttcacgcccatgagggaagaggaaagtgccactgggcaaggtgtcccaccctcccctcctgaccctcctacgaggcttatcctggcaatggggtagtcactgccacccttccacacacacacacacacacacacacacacacacaaaaatcccttccttgtgggattcttgggcatctcctgcctccctcactctcacggtaattaatgtcttaattggctgttgcctggggaacaggagagctgctgcaggcagatgacctcatggggggtggagggaggtgaggtgcccaggtggctatttgccctgcagagctgggagtttcacccccaccccccaccctgttctctccttacctttggcatcctttggcctggtggggaaacagaggcccagggtggagacctaagcgggtataagaccaggtggcctgctccttttctgggccctagcacaggtgggtaacccccacccaacccagctcctgctgctgtcccagtcttgggctggggcctggaaagaggaagaggctgcctggggctgggccagcccgctgtgcactttgaccccagttccttgccagcacggctgctaacagactgccacttgagtgcgccttgcaggcactcccagagcagccatggaaggagctggccctcacaccatccacctccacactgcctcctggccagctgcccaccccagtgccaggtgggagagggagcagaacagccagccccttccaggtggcagtcggaagggtttttgtttttgtttctgttgccatttgtgtaaatactagtctttttggaaaaaaaataatgtaaagatgttttgtataaactctgaattattttcttgttgcttttttcttagaaaaaaatgagaactaaaaaaaaaaaattaaccacatggaaaaaaaaaaata

SEQ ID NO: 446533 - DNA, 3235 bp, Homo sapiens
ggagggagtctatgcgagctggacagcagtgggaggtttgtgaggctcgcactggccgcagaccctcgggctcgatcgcccgggagccaggactcggcgacgcgaggctgccgggctacccggccgaggcttcgggggcgcaaactaatgggactggctcgctcggcagcatctccccgctcttctaagtacactgagcagggcccgcgctgaagtagaagctgtccgggggcgcgtagcccggagtcccagtgtggcccggaggaacggagcccgtgccagggcggcccagtcgggagcccggggaccgagcttgtgctgtggggaaacccccacttcttccaagggacagcgatcccgggacggtcgaggcgtcggggcggtcaccgagacctctgcgggaagaccccgtcggggagagggcgcgcagccccgaagcgtctcgggaagtcgagcggaatcgggcgggatcacccgggggcgcagagcccccgtcgcgcctcgtgcggcagcggagagcccaggagaacgagccctcgggggccgaagcccatgcccgggttgggggcggctgcccagtgagtcctcctggccggccgggcggagaagagcgacaccgaagccggcgggaggggagcacttcaaggccggcggctgcggaggatgggcgcctgagcggctccgagcgcagcgcggcagaggaaggcgaggcgagctttggtgaggaggcgccaagggatcccgaagtgcagtctgcccccgggaagatggctcggcctgggcagcgttggctcggcaagtggcttgtggcgatggtcgtgtgggcgctgtgccggctcgccacaccgctggccaagaacctggagcccgtatcctggagctccctcaaccccaagttcctgagtgggaagggcttggtgatctatccgaaaattggagacaagctggacatcatctgcccccgagcagaagcagggcggccctatgagtactacaagctgtacctggtgcggcctgagcaggcagctgcctgtagcacagttctcgaccccaacgtgttggtcacctgcaataggccagagcaggaaatacgctttaccatcaagttccaggagttcagccccaactacatgggcctggagttcaagaagcaccatgattactacattacctcaacatccaatggaagcctggaggggctggaaaaccgggagggcggtgtgtgccgcacacgcaccatgaagatcatcatgaaggttgggcaagatcccaatgctgtgacgcctgagcagctgactaccagcaggcccagcaaggaggcagacaacactgtcaagatggccacacaggcccctggtagtcggggctccctgggtgactctgatggcaagcatgagactgtgaaccaggaagagaagagtggcccaggtgcaagtgggggcagcagcggggaccctgatggcttcttcaactccaaggtggcattgttcgcggctgtcggtgccggttgcgtcatcttcctgctcatcatcatcttcctgacggtcctactactgaagctacgcaagcggcaccgcaagcacacacagcagcgggcggctgccctctcgctcagtaccctggccagtcccaaggggggcagtggcacagcgggcaccgagcccagcgacatcatcattcccttacggactacagagaacaactactgcccccactatgagaaggtgagtggggactacgggcaccctgtctacatcgtccaagagatgccgccccagagcccggcgaacatctactacaaggtctgagtgcccggcacggcctcaggcccccgagggacagtcggcctggaccggacctctcctttcgcccccacaccccctccccttgccagctgtgcccacctttgtatttagttttgtagtttcttggcttttataatccccctttttccctgccccctgggcttcggaggggggtgcttgtgcccctaacccccatgctcttgtgccttccccctctggccaggcctctgggctccgtgggggcgccccttcttggaaggcagggctggacactgatggacagcaggcagggagacagtcccctggccctgcccctccctcgccccccttgccaccttcccaggactgcttgtccgctatcatcactgtttttaatgcttttgtgttcattttttagctgtcaactcattttcatctgttttttgaagaaaaatggaaaaatgtaaaaggcagcccctccccaggctttgtgagcctggcccaagccagtacaagagggcctggggcacgatgtggtcagccaggaagcataggatgccatttcttttatagattccttggtatttctggtggggtaaggggcaggccagggctgttcacgcccatgagggaagaggaaagtgccactgggcaaggtgtcccaccctcccctcctgaccctcctacgaggcttatcctggcaatggggtagtcactgccacccttccacacacacacacacacacacacacacacacacaaaaatcccttccttgtgggattcttgggcatctcctgcctccctcactctcacggtaattaatgtcttaattggctgttgcctggggaacaggagagctgctgcaggcagatgacctcatggggggtggagggaggtgaggtgcccaggtggctatttgccctgcagagctgggagtttcacccccaccccccaccctgttctctccttacctttggcatcctttggcctggtggggaaacagaggcccagggtggagacctaagcgggtataagaccaggtggcctgctccttttctgggccctagcacaggtgggtaacccccacccaacccagctcctgctgctgtcccagtcttgggctggggcctggaaagaggaagaggctgcctggggctgggccagcccgctgtgcactttgaccccagttccttgccagcacggctgctaacagactgccacttgagtgcgccttgcaggcactcccagaaacagccagccccttccaggtggcagtcggaagggtttttgtttttgtttctgttgccatttgtgtaaatactagtctttttggaaaaaaaataatgtaaagatgttttgtataaactctgaattattttcttgttgcttttttcttagaaaaaaatgagaactaaaaaaaaaaaattaaccacatggaaaaaaaaaaata

SEQ ID NO: 446534 - DNA, 745 bp, Homo sapiens
agaagaggcggcgcgtgcgtagaggggcggtgagagctaagaggggcagcgcgtgtgcagaggggcggtgtgacttaggacggggcgatggcggctgagaggagctgcgcgtgcgcgaacatgtaactggtgggatctgcggcggctcccagatgatggtcgtcctcctgggcgcgacgaccctagtgctcgtcgccgtggcgccatgggtgttgtccgcagccgcaggtggaaaaaatctaaaatctcctcaaaaagtagaggtcgacatcatagatgacaactttatcctgaggtggaacaggagcgatgagtctgtcgggaatgtgactttttcattcgattatcaaaaaactgggatggataattggataaaattgtctgggtgtcagaatattactagtaccaaatgcaacttttcttcactcaagctgaatgtttatgaagaaattaaattgcgtataagagcagaaaaagaaaacacttcttcatggtatgaggttgactcatttacaccatttcgcaaagctcagattggtcctccagaagtacatttagaagctgaagataaggcaatagtgatacacatctctcctggaacaaaagatagtgttatgtgggctttggatggtttaagctttacatatagcttagttatctggaaaaactcttcaggtgtagaaaaaaaaggattggaaaatttattcccgacttaaattttttaacctttacccgagattctttt

SEQ ID NO: 446535 - DNA, 3345 bp, Homo sapiens
agaagaggcggcgcgtgcgtagaggggcggtgagagctaagaggggcagcgcgtgtgcagaggggcggtgtgacttaggacggggcgatggcggctgagaggagctgcgcgtgcgcgaacatgtaactggtgggatctgcggcggctcccagatgatggtcgtcctcctgggcgcgacgaccctagtgctcgtcgccgtggcgccatgggtgttgtccgcagccgcaggtggaaaaaatctaaaatctcctcaaaaagtagaggtcgacatcatagatgacaactttatcctgaggtggaacaggagcgatgagtctgtcgggaatgtgactttttcattcgattatcaaaaaactgggatggataattggataaaattgtctgggtgtcagaatattactagtaccaaatgcaacttttcttcactcaagctgaatgtttatgaagaaattaaattgcgtataagagcagaaaaagaaaacacttcttcatggtatgaggttgactcatttacaccatttcgcaaagctcagattggtcctccagaagtacatttagaagctgaagataaggcaatagtgatacacatctctcctggaacaaaagatagtgttatgtgggctttggatggtttaagctttacatatagcttagttatctggaaaaactcttcaggtgtagaagaaaggattgaaaatatttattccagacataaaatttataaactctcaccagagactacttattgtctaaaagttaaagcagcactacttacgtcatggaaaattggtgtctatagtccagtacattgtataaagaccacagttgaaaatgaactacctccaccagaaaatatagaagtcagtgtccaaaatcagaactatgttcttaaatgggattatacatatgcaaacatgacctttcaagttcagtggctccacgcctttttaaaaaggaatcctggaaaccatttgtataaatggaaacaaatacctgactgtgaaaatgtcaaaactacccagtgtgtctttcctcaaaacgttttccaaaaaggaatttaccttctccgcgtacaagcatctgatggaaataacacatctttttggtctgaagagataaagtttgatactgaaatacaagctttcctacttcctccagtctttaacattagatcccttagtgattcattccatatctatatcggtgctccaaaacagtctggaaacacgcctgtgatccaggattatccactgatttatgaaattattttttgggaaaacacttcaaatgctgagagaaaaattatcgagaaaaaaactgatgttacagttcctaatttgaaaccactgactgtatattgtgtgaaagccagagcacacaccatggatgaaaagctgaataaaagcagtgtttttagtgacgctgtatgtgagaaaacaaaaccaggaaatacctctaaaatttggcttatagttggaatttgtattgcattatttgctctcccgtttgtcatttatgctgcgaaagtcttcttgagatgcatcaattatgtcttctttccatcacttaaaccttcttccagtatagatgagtatttctctgaacagccattgaagaatcttctgctttcaacttctgaggaacaaatcgaaaaatgtttcataattgaaaatataagcacaattgctacagtagaagaaactaatcaaactgatgaagatcataaaaaatacagttcccaaactagccaagattcaggaaattattctaatgaagatgaaagcgaaagtaaaacaagtgaagaactacagcaggactttgtatgaccagaaatgaactgtgtcaagtataaggtttttcagcaggagttacactgggagcctgaggtcctcaccttcctctcagtaactacagagaggacgtttccctgtttagggaaagaaaaaacatcttcagatcataggtcctaaaaatacgggcaagctcttaactatttaaaaatgaaattacaggcccgggcacggtggctcacacctgtaatcccagcactttgggaggctgaggcaggcagatcatgaggtcaagagatcgagaccagcctggccaacgtggtgaaaccccatctctactaaaaatacaaaaattagccgggtgtggtggcgcgcgcctgttgtcttagctactcaggaggctgaggcaggagaatcgcttgaaaacaggaggtggaggttgcagtgagccgagatcacgccactgcactccagcctggtgacagcgtgagactctttaaaaaaagaaattaaaagagttgagacaaacgtttcctacattcttttccatgtgtaaaatcatgaaaaagcctgtcaccggacttgcattggatgagatgagtcagaccaaaacagtggccacccgtcttcctcctgtgagcctaagtgcagccgtgctagctgcgcaccgtggctaaggatgacgtctgtgttcctgtccatcactgatgctgctggctactgcatgtgccacacctgtctgttcgccattcctaacattctgtttcattcttcctcgggagatatttcaaacatttggtcttttcttttaacactgagggtaggcccttaggaaatttatttaggaaagtctgaacacgttatcacttggttttctggaaagtagcttaccctagaaaacagctgcaaatgccagaaagatgatccctaaaaatgttgagggacttctgttcattcatcccgagaacattggcttccacatcacagtatctacccttacatggtttaggattaaagccaggcaatcttttactatgcattaagaccctttgctatgtagtctcatggtctagcatgcatcttgtagaaacaaggcatgctggcagattgcagggttgagatgtgtttatctgtttatattttaaaagattctgccagaaaataaaaccagaccttgttctaaagcccaggttatggaccaactcagtgcttcaggtcttaatgcctccatacctcttcctcaccaactttactagtagctgagatttaatgggcactattatgctacatatcatgttaggtaaatctgactgactctttccccacctcctttggtgtgcttccctgaatgagtattaccccaggatgaggtctgcatcagcttagttagccattgatgcaatactagggaaagactaggaggatgagccagggtgctaataaggataagtgttggaccaaggttgctttgtttgcttaagaaggagtgactggtcaggttggccgtatccatatggagcgagcgagggcaaaaccgtaaggaccgtcttaaaaa

SEQ ID NO: 446536 - DNA, 3361 bp, Homo sapiens
  misc_feature (119)..(119): n is a, c, g, or t
gtagagcattcatgggcggctgtgacgttaagaaggtaagatagcgtggtgaataggatgtgtgctatggacaatacttgtaattgagtaggtagtctgggatcgtcatcctcaagtanatgaaatgagcgtcgctggctgcgctggagccgacgacggtatcctgcatagatgacttcgcatgatgcgaggtgctcggcagggtgcatgttagctggcgtactactgaagcgggagatccaagtcgtagacattgcttctcaaaatatgtagcacgcggtcgacatcatagatgacaactttatcctgaggtggaacaggagcgatgagtctgtcgggaatgtgactttttcattcgattatcaaaaaactgggatggataattggataaaattgtctgggtgtcagaatattactagtaccaaatgcaacttttcttcactcaagctgaatgtttatgaagaaattaaattgcgtataagagcagaaaaagaaaacacttcttcatggtatgaggttgactcatttacaccatttcgcaaagctcagattggtcctccagaagtacatttagaagctgaagataaggcaatagtgatacacatctctcctggaacaaaagatagtgttatgtgggctttggatggtttaagctttacatatagcttagttatctggaaaaactcttcaggtgtagaagaaaggattgaaaatatttattccagacataaaatttataaactctcaccagagactacttattgtctaaaagttaaagcagcactacttacgtcatggaaaattggtgtctatagtccagtacattgtataaagaccacagttgaaaatgaactacctccaccagaaaatatagaagtcagtgtccaaaatcagaactatgttcttaaatgggattatacatatgcaaacatgacctttcaagttcagtggctccacgcctttttaaaaaggaatcctggaaaccatttgtataaatggaaacaaatacctgactgtgaaaatgtcaaaactacccagtgtgtctttcctcaaaacgttttccaaaaaggaatttaccttctccgcgtacaagcatctgatggaaataacacatctttttggtctgaagagataaagtttgatactgaaatacaagctttcctacttcctccagtctttaacattagatcccttagtgattcattccatatctatatcggtgctccaaaacagtctggaaacacgcctgtgatccaggattatccactgatttatgaaattattttttgggaaaacacttcaaatgctgagagaaaaattatcgagaaaaaaactgatgttacagttcctaatttgaaaccactgactgtatattgtgtgaaagccagagcacacaccatggatgaaaagctgaataaaagcagtgtttttagtgacgctgtatgtgagaaaacaaaaccaggaaatacctctaaaatttggcttatagttggaatttgtattgcattatttgctctcccgtttgtcatttatgctgcgaaagtcttcttgagatgcatcaattatgtcttctttccatcacttaaaccttcttccagtatagatgagtatttctctgaacagccattgaagaatcttctgctttcaacttctgaggaacaaatcgaaaaatgtttcataattgaaaatataagcacaattgctacagtagaagaaactaatcaaactgatgaagatcataaaaaatacagttcccaaactagccaagattcaggaaattattctaatgaagatgaaagcgaaagtaaaacaagtgaagaactacagcaggactttgtatgaccagaaatgaactgtgtcaagtataaggtttttcagcaggagttacactgggagcctgaggtcctcaccttcctctcagtaactacagagaggacgtttccctgtttagggaaagaaaaaacatcttcagatcataggtcctaaaaatacgggcaagctcttaactatttaaaaatgaaattacaggcccgggcacggtggctcacacctgtaatcccagcactttgggaggctgaggcaggcagatcatgaggtcaagagatcgagaccagcctggccaacgtggtgaaaccccatctctactaaaaatacaaaaattagccgggtgtggtggcgcgcgcctgttgtcttagctactcaggaggctgaggcaggagaatcgcttgaaaacaggaggtggaggttgcagtgagccgagatcacgccactgcactccagcctggtgacagcgtgagactctttaaaaaaagaaattaaaagagttgagacaaacgtttcctacattcttttccatgtgtaaaatcatgaaaaagcctgtcaccggacttgcattggatgagatgagtcagaccaaaacagtggccacccgtcttcctcctgtgagcctaagtgcagccgtgctagctgcgcaccgtggctaaggatgacgtctgtgttcctgtccatcactgatgctgctggctactgcatgtgccacacctgtctgttcgccattcctaacattctgtttcattcttcctcgggagatatttcaaacatttggtcttttcttttaacactgagggtaggcccttaggaaatttatttaggaaagtctgaacacgttatcacttggttttctggaaagtagcttaccctagaaaacagctgcaaatgccagaaagatgatccctaaaaatgttgagggacttctgttcattcatcccgagaacattggcttccacatcacagtatctacccttacatggtttaggattaaagccaggcaatcttttactatgcattaagaccctttgctatgtagtctcatggtctagcatgcatcttgtagaaacaaggcatgctggcagattgcagggttgagatgtgtttatctgtttatattttaaaagattctgccagaaaataaaaccagaccttgttctaaagcccaggttatggaccaactcagtgcttcaggtcttaatgcctccatacctcttcctcaccaactttactagtagctgagatttaatgggcactattatgctacatatcatgttaggtaaatctgactgactctttccccacctcctttggtgtgcttccctgaatgagtattaccccaggatgaggtctgcatcagcttagttagccattgatgcaatactagggaaagactaggaggatgagccagggtgctaataaggataagtgttggaccaaggttgctttgtttgcttaagaaggagtgactggtcaggttggccgtatccatatggagcgagcgagggcaaaaccgtaaggaccgtcttaaaaa

SEQ ID NO: 446537 - DNA, 1525 bp, Homo sapiens
agaagaggcggcgcgtgcgtagaggggcggtgagagctaagaggggcagcgcgtgtgcagaggggcggtgtgacttaggacggggcgatggcggctgagaggagctgcgcgtgcgcgaacatgtaactggtgggatctgcggcggctcccagatgatggtcgtcctcctgggcgcgacgaccctagtgctcgtcgccgtggcgccatgggtgttgtccgcagccgcaggtggaaaaaatctaaaatctcctcaaaaagtagaggtcgacatcatagatgacaactttatcctgaggtggaacaggagcgatgagtctgtcgggaatgtgactttttcattcgattatcaaaaaactgggatggataattggataaaattgtctgggtgtcagaatattactagtaccaaatgcaacttttcttcactcaagctgaatgtttatgaagaaattaaattgcgtataagagcagaaaaagaaaacacttcttcatggtatgaggttgactcatttacaccatttcgcaaagctcagattggtcctccagaagtacatttagaagctgaagataaggcaatagtgatacacatctctcctggaacaaaagatagtgttatgtgggctttggatggtttaagctttacatatagcttagttatctggaaaaactcttcaggtgtagaagaaaggattgaaaatatttattccagacataaaatttataaactctcaccagagactacttattgtctaaaagttaaagcagcactacttacgtcatggaaaattggtgtctatagtccagtacattgtataaagaccacagttgaaaatgaactacctccaccagaaaatatagaagtcagtgtccaaaatcagaactatgttcttaaatgggattatacatatgcaaacatgacctttcaagttcagtggctccacgcctttttaaaaaggaatcctggaaaccatttgtataaatggaaacaaatacctgactgtgaaaatgtcaaaactacccagtgtgtctttcctcaaaacgttttccaaaaaggaatttaccttctccgcgtacaagcatctgatggaaataacacatctttttggtctgaagagataaagtttgatactgaaatacaagctttcctacttcctccagtctttaacattagatcccttagtgattcattccatatctatatcggtgctccaaaacagtctggaaacacgcctgtgatccaggattatccactgatttatgaaattattttttgggaaaacacttcaaatgctgaggtaaaaagactgtatagtataattttgtaacttagagttataattatgatttgggtaaataaagcttgaatgtaaaatttgggggaaatttttaaactttatgtgggctggatgcagtggcctgtaatcccagcacttcaggaggccaaggcgagaggatcacttgagcctaagggtttgagaccagcctgggcaacatagggagaccctgtctcaataaaaattttaaa

SEQ ID NO: 446538 - DNA, 1360 bp, Homo sapiens
gtggaaaatctggtgtccccatgatctcaccagaaatggtttggtagttacaaagcaagatagagcagttgagcaaatacttagcccatctagtcctctaccactaccaccttcgccttttaatgagcaggactttgtagtaagcgagttgttgaaaaggagctccacatacttagtaacagcctcggagcggatggaaagaagtaggcattgctgcagagctgagatgaacctgcacggagacagccttggccccagggaatgatcactgcactccagcctggtgacagcgtgagactctttaaaaaaagaaattaaaagagttgagacaaacgtttcctacattcttttccatgtgtaaaatcatgaaaaagcctgtcaccggacttgcattggatgagatgagtcagaccaaaacagtggccacccgtcttcctcctgtgagcctaagtgcagccgtgctagctgcgcaccgtggctaaggatgacgtctgtgttcctgtccatcactgatgctgctggctactgcatgtgccacacctgtctgttcgccattcctaacattctgtttcattcttcctcgggagatatttcaaacatttggtcttttcttttaacactgagggtaggcccttaggaaatttatttaggaaagtctgaacacgttatcacttggttttctggaaagtagcttaccctagaaaacagctgcaaatgccagaaagatgatccctaaaaatgttgagggacttctgttcattcatcccgagaacattggcttccacatcacagtatctacccttacatggtttaggattaaagccaggcaatcttttactatgcattaagaccctttgctatgtagtctcatggtctagcatgcatcttgtagaaacaaggcatgctggcagattgcagggttgagatgtgtttatctgtttatattttaaaagattctgccagaaaataaaaccagaccttgttctaaagcccaggttatggaccaactcagtgcttcaggtcttaatgcctccatacctcttcctcaccaactttactagtagctgagatttaatgggcactattatgctacatatcatgttaggtaaatctgactgactctttccccacctcctttggtgtgcttccctgaatgagtattaccccaggatgaggtctgcatcagcttagttagccattgatgcaatactagggaaagactaggaggatgagccagggtgctaataaggataagtgttggaccaaggttgctttgtttgcttaagaaggagtgactggtcaggttggccgtatccatatggagcgagcgagggcaaaaccgtaaggaccgtcttaaaaa

SEQ ID NO: 446539 - DNA, 1512 bp, Homo sapiens
agaagaggcggcgcgtgcgtagaggggcggtgagagctaagaggggcagcgcgtgtgcagaggggcggtgtgacttaggacggggcgatggcggctgagaggagctgcgcgtgcgcgaacatgtaactggtgggatctgcggcggctcccagatgatggtcgtcctcctgggcgcgacgaccctagtgctcgtcgccgtggcgccatgggtgttgtccgcagccgcaggtggaaaaaatctaaaatctcctcaaaaagtagaggtcgacatcatagatgacaactttatcctgaggtggaacaggagcgatgagtctgtcgggaatgtgactttttcattcgattatcaaaaaactgggatggataattggataaaattgtctgggtgtcagaatattactagtaccaaatgcaacttttcttcactcaagctgaatgtttatgaagaaattaaattgcgtataagagcagaaaaagaaaacacttcttcatggtatgaggttgactcatttacaccatttcgcaaagctcagattggtcctccagaagtacatttagaagctgaagataaggcaatagtgatacacatctctcctggaacaaaagatagtgttatgtgggctttggatggtttaagctttacatatagcttagttatctggaaaaactcttcaggtgtagaagaaaggattgaaaatatttattccagacataaaatttataaactctcaccagagactacttattgtctaaaagttaaagcagcactacttacgtcatggaaaattggtgtctatagtccagtacattgtataaagaccacagttgaaaatgaactacctccaccagaaaatatagaagtcagtgtccaaaatcagaactatgttcttaaatgggattatacatatgcaaacatgacctttcaagttcagtggctccacgcctttttaaaaaggaatcctggaaaccatttgtataaatggaaacaaatacctgactgtgaaaatgtcaaaactacccagtgtgtctttcctcaaaacgttttccaaaaaggaatttaccttctccgcgtacaagcatctgatggaaataacacatctttttggtctgaagagataaagtttgatactgaaatacaagctttcctacttcctccagtctttaacattagatcccttagtgattcattccatatctatatcggtgctccaaaacagtctggaaacacgcctgtgatccaggattatccactgatttatgaaattattttttgggaaaacacttcaaatgctgagagaaaaattatcgagaaaaaaactgatgttacagttcctaatttgaaaccactgactgtatattgtgtgaaagccagagcacacaccatggatgaaaagctgaataaaagcagtgtttttagtgacgctgtatgtgagaaaacaaaaccaggtcagaatcttttattgtcttttttaaaaatgtagctagacataataaaagtaattctatactgta

SEQ ID NO: 446540 - DNA, 3190 bp, Homo sapiens
agaagaggcggcgcgtgcgtagaggggcggtgagagctaagaggggcagcgcgtgtgcagaggggcggtgtgacttaggacggggcgatggcggctgagaggagctgcgcgtgcgcgaacatgtaactggtgggatctgcggcggctcccagatgatggtcgtcctcctgggcgcgacgaccctagtgctcgtcgccgtggcgccatgggtgttgtccgcagccgcaggtggaaaaaatctaaaatctcctcaaaaagtagaggtcgacatcatagatgacaactttatcctgaggtggaacaggagcgatgagtctgtcgggaatgtgactttttcattcgattatcaaaaaactgggatggataattggataaaattgtctgggtgtcagaatattactagtaccaaatgcaacttttcttcactcaagctgaatgtttatgaagaaattaaattgcgtataagagcagaaaaagaaaacacttcttcatggtatgaggttgactcatttacaccatttcgcaaaggaaaggattgaaaatatttattccagacataaaatttataaactctcaccagagactacttattgtctaaaagttaaagcagcactacttacgtcatggaaaattggtgtctatagtccagtacattgtataaagaccacagttgaaaatgaactacctccaccagaaaatatagaagtcagtgtccaaaatcagaactatgttcttaaatgggattatacatatgcaaacatgacctttcaagttcagtggctccacgcctttttaaaaaggaatcctggaaaccatttgtataaatggaaacaaatacctgactgtgaaaatgtcaaaactacccagtgtgtctttcctcaaaacgttttccaaaaaggaatttaccttctccgcgtacaagcatctgatggaaataacacatctttttggtctgaagagataaagtttgatactgaaatacaagctttcctacttcctccagtctttaacattagatcccttagtgattcattccatatctatatcggtgctccaaaacagtctggaaacacgcctgtgatccaggattatccactgatttatgaaattattttttgggaaaacacttcaaatgctgagagaaaaattatcgagaaaaaaactgatgttacagttcctaatttgaaaccactgactgtatattgtgtgaaagccagagcacacaccatggatgaaaagctgaataaaagcagtgtttttagtgacgctgtatgtgagaaaacaaaaccaggaaatacctctaaaatttggcttatagttggaatttgtattgcattatttgctctcccgtttgtcatttatgctgcgaaagtcttcttgagatgcatcaattatgtcttctttccatcacttaaaccttcttccagtatagatgagtatttctctgaacagccattgaagaatcttctgctttcaacttctgaggaacaaatcgaaaaatgtttcataattgaaaatataagcacaattgctacagtagaagaaactaatcaaactgatgaagatcataaaaaatacagttcccaaactagccaagattcaggaaattattctaatgaagatgaaagcgaaagtaaaacaagtgaagaactacagcaggactttgtatgaccagaaatgaactgtgtcaagtataaggtttttcagcaggagttacactgggagcctgaggtcctcaccttcctctcagtaactacagagaggacgtttccctgtttagggaaagaaaaaacatcttcagatcataggtcctaaaaatacgggcaagctcttaactatttaaaaatgaaattacaggcccgggcacggtggctcacacctgtaatcccagcactttgggaggctgaggcaggcagatcatgaggtcaagagatcgagaccagcctggccaacgtggtgaaaccccatctctactaaaaatacaaaaattagccgggtgtggtggcgcgcgcctgttgtcttagctactcaggaggctgaggcaggagaatcgcttgaaaacaggaggtggaggttgcagtgagccgagatcacgccactgcactccagcctggtgacagcgtgagactctttaaaaaaagaaattaaaagagttgagacaaacgtttcctacattcttttccatgtgtaaaatcatgaaaaagcctgtcaccggacttgcattggatgagatgagtcagaccaaaacagtggccacccgtcttcctcctgtgagcctaagtgcagccgtgctagctgcgcaccgtggctaaggatgacgtctgtgttcctgtccatcactgatgctgctggctactgcatgtgccacacctgtctgttcgccattcctaacattctgtttcattcttcctcgggagatatttcaaacatttggtcttttcttttaacactgagggtaggcccttaggaaatttatttaggaaagtctgaacacgttatcacttggttttctggaaagtagcttaccctagaaaacagctgcaaatgccagaaagatgatccctaaaaatgttgagggacttctgttcattcatcccgagaacattggcttccacatcacagtatctacccttacatggtttaggattaaagccaggcaatcttttactatgcattaagaccctttgctatgtagtctcatggtctagcatgcatcttgtagaaacaaggcatgctggcagattgcagggttgagatgtgtttatctgtttatattttaaaagattctgccagaaaataaaaccagaccttgttctaaagcccaggttatggaccaactcagtgcttcaggtcttaatgcctccatacctcttcctcaccaactttactagtagctgagatttaatgggcactattatgctacatatcatgttaggtaaatctgactgactctttccccacctcctttggtgtgcttccctgaatgagtattaccccaggatgaggtctgcatcagcttagttagccattgatgcaatactagggaaagactaggaggatgagccagggtgctaataaggataagtgttggaccaaggttgctttgtttgcttaagaaggagtgactggtcaggttggccgtatccatatggagcgagcgagggcaaaaccgtaaggaccgtcttaaaaa

SEQ ID NO: 446541 - DNA, 3048 bp, Homo sapiens
agaagaggcggcgcgtgcgtagaggggcggtgagagctaagaggggcagcgcgtgtgcagaggggcggtgtgacttaggacggggcgatggcggctgagaggagctgcgcgtgcgcgaacatgtaactggtgggatctgcggcggctcccagatgatggtcgtcctcctgggcgcgacgaccctagtgctcgtcgccgtggcgccatgggtgttgtccgcagccgcaggtggaaaaaatctaaaatctcctcaaaaagtagaggtcgacatcatagatgacaactttatcctgaggtggaacaggagcgatgagtctgtcgggaatgtgactttttcattcgattatcaaaaaactgggatggataattggataaaattgtctgggtgtcagaatattactagtaccaaatgcaacttttcttcactcaagctgaatgtttatgaagaaattaaattgcgtataagagcagaaaaagaaaacacttcttcatggtatgaggttgactcatttacaccatttcgcaaagttgaaaatgaactacctccaccagaaaatatagaagtcagtgtccaaaatcagaactatgttcttaaatgggattatacatatgcaaacatgacctttcaagttcagtggctccacgcctttttaaaaaggaatcctggaaaccatttgtataaatggaaacaaatacctgactgtgaaaatgtcaaaactacccagtgtgtctttcctcaaaacgttttccaaaaaggaatttaccttctccgcgtacaagcatctgatggaaataacacatctttttggtctgaagagataaagtttgatactgaaatacaagctttcctacttcctccagtctttaacattagatcccttagtgattcattccatatctatatcggtgctccaaaacagtctggaaacacgcctgtgatccaggattatccactgatttatgaaattattttttgggaaaacacttcaaatgctgagagaaaaattatcgagaaaaaaactgatgttacagttcctaatttgaaaccactgactgtatattgtgtgaaagccagagcacacaccatggatgaaaagctgaataaaagcagtgtttttagtgacgctgtatgtgagaaaacaaaaccaggaaatacctctaaaatttggcttatagttggaatttgtattgcattatttgctctcccgtttgtcatttatgctgcgaaagtcttcttgagatgcatcaattatgtcttctttccatcacttaaaccttcttccagtatagatgagtatttctctgaacagccattgaagaatcttctgctttcaacttctgaggaacaaatcgaaaaatgtttcataattgaaaatataagcacaattgctacagtagaagaaactaatcaaactgatgaagatcataaaaaatacagttcccaaactagccaagattcaggaaattattctaatgaagatgaaagcgaaagtaaaacaagtgaagaactacagcaggactttgtatgaccagaaatgaactgtgtcaagtataaggtttttcagcaggagttacactgggagcctgaggtcctcaccttcctctcagtaactacagagaggacgtttccctgtttagggaaagaaaaaacatcttcagatcataggtcctaaaaatacgggcaagctcttaactatttaaaaatgaaattacaggcccgggcacggtggctcacacctgtaatcccagcactttgggaggctgaggcaggcagatcatgaggtcaagagatcgagaccagcctggccaacgtggtgaaaccccatctctactaaaaatacaaaaattagccgggtgtggtggcgcgcgcctgttgtcttagctactcaggaggctgaggcaggagaatcgcttgaaaacaggaggtggaggttgcagtgagccgagatcacgccactgcactccagcctggtgacagcgtgagactctttaaaaaaagaaattaaaagagttgagacaaacgtttcctacattcttttccatgtgtaaaatcatgaaaaagcctgtcaccggacttgcattggatgagatgagtcagaccaaaacagtggccacccgtcttcctcctgtgagcctaagtgcagccgtgctagctgcgcaccgtggctaaggatgacgtctgtgttcctgtccatcactgatgctgctggctactgcatgtgccacacctgtctgttcgccattcctaacattctgtttcattcttcctcgggagatatttcaaacatttggtcttttcttttaacactgagggtaggcccttaggaaatttatttaggaaagtctgaacacgttatcacttggttttctggaaagtagcttaccctagaaaacagctgcaaatgccagaaagatgatccctaaaaatgttgagggacttctgttcattcatcccgagaacattggcttccacatcacagtatctacccttacatggtttaggattaaagccaggcaatcttttactatgcattaagaccctttgctatgtagtctcatggtctagcatgcatcttgtagaaacaaggcatgctggcagattgcagggttgagatgtgtttatctgtttatattttaaaagattctgccagaaaataaaaccagaccttgttctaaagcccaggttatggaccaactcagtgcttcaggtcttaatgcctccatacctcttcctcaccaactttactagtagctgagatttaatgggcactattatgctacatatcatgttaggtaaatctgactgactctttccccacctcctttggtgtgcttccctgaatgagtattaccccaggatgaggtctgcatcagcttagttagccattgatgcaatactagggaaagactaggaggatgagccagggtgctaataaggataagtgttggaccaaggttgctttgtttgcttaagaaggagtgactggtcaggttggccgtatccatatggagcgagcgagggcaaaaccgtaaggaccgtcttaaaaa

SEQ ID NO: 446542 - DNA, 830 bp, Homo sapiens
gttgacaagagacattccagcccaccacttcccaagtaaagaattaaaatgcagcatgatggctaaggcaagggcctgcagaagaatgtaaaggagggaggaagagcaggggattcagagcaggaaggaggagacagttactgtctatcccgcagacgtggtgctctttgaagggatcctggccttctactcccaggaggtacgagacctgttccagatgaagctttttgtggatacagatgcggacacccggctctcacgcagagtattaagggacatcagcgagagaggcagggatcttgagcagattttatctcagtacattacgttcgtcaagcctgcctttgaggaattctgcttgccaacaaagaagtatgctgatgtgatcatccctagaggtgcagataatctggtggccatcaacctcatcgtgcagcacatccaggacatcctgaatggagggccctccaaacggcagaccaatggctgtctcaacggctacaccccttcacgcaagaggcaggcatcggagtccagcagcaggccgcattgacccgtctccatcggaccccagcccctatctccaagagacagaggaggggtcaggaggcactgctcatctgtacatactgtttcctatgacattactgtatttaagaaaacaccatggagatgaaatgcctttgattttttttttctttttgtactttggaacgacaaaatgaaacagaacttgaccctgagcttaaataacaaaactgtgccaactactactggtgatgcctaattatgaatccaacgtgtaaccagttataaatacatatatatat

SEQ ID NO: 446543 - DNA, 719 bp, Homo sapiens
ctcgccgcctccgcctcggcgaatagcagcgcgctgcccgcccggattggagcagcagcatcacgctgacctctgcctgggatgtaaaccggaccagccgctgcgggcaaaggaaggctcttggctccttcgggaaacccagccccgtcaccgggctccgagcggctcgcaggcgagcgacagcggcctcagccccggcagcgcccagcggcggctgcggaaagcggagggagtccgacgcgggcgcgggcggggagcgtgcgtccgttcgcacaggcagcgggaggaggggcggcgcgaaccatggccggggacagcgagcagaccctgcagaaccaccagcagcccaacggcggcgagcccttccttataggcgtcagcgggggaacagctagcggcaagtcttccgtgtgtgctaagatcgtgcagctcctggggcagaatgaggtggactatcgccagaagcaggtggtcatcctgagccaggatagcttctaccgtgtccttacctcggagcagaaggccaaagccctgaagggccagttcaactttgaccacccggatgccctttgacaatgaaacctcattttcttcgaagaacatcttccaagagcaaaaattctactttgaaaacgggggcaacaataccgagggtctccccaacggatttcgccccccggcgtggttcatttggaacccttttatgggttcattccccc

SEQ ID NO: 446544 - DNA, 5172 bp, Homo sapiens
  misc_feature (5096)..(5096): n is a, c, g, or t
ctcgccgcctccgcctcggcgaatagcagcgcgctgcccgcccggattggagcagcagcatcacgctgacctctgcctgggatgtaaaccggaccagccgctgcgggcaaaggaaggctcttggctccttcgggaaacccagccccgtcaccgggctccgagcggctcgcaggcgagcgacagcggcctcagccccggcagcgcccagcggcggctgcggaaagcggagggagtccgacgcgggcgcgggcggggagcgtgcgtccgttcgcacaggcagcgggaggaggggcggcgcgaaccatggccggggacagcgagcagaccctgcagaaccaccagcagcccaacggcggcgagcccttccttataggcgtcagcgggggaacagctagcggcaagtcttccgtgtgtgctaagatcgtgcagctcctggggcagaatgaggtggactatcgccagaagcaggtggtcatcctgagccaggatagcttctaccgtgtccttacctcggagcagaaggccaaagccctgaagggccagttcaactttgaccacccggatgcctttgacaatgaactcattctcaaaacactcaaagaaatcactgaagggaaaacagtccagatccccgtgtatgactttgtctcccattcccggaaggaggagacagttactgtctatcccgcagacgtggtgctctttgaagggatcctggccttctactcccaggaggtacgagacctgttccagatgaagctttttgtggatacagatgcggacacccggctctcacgcagagtattaagggacatcagcgagagaggcagggatcttgagcagattttatctcagtacattacgttcgtcaagcctgcctttgaggaattctgcttgccaacaaagaagtatgctgatgtgatcatccctagaggtgcagataatctggtggccatcaacctcatcgtgcagcacatccaggacatcctgaatggagggccctccaaacggcagaccaatggctgtctcaacggctacaccccttcacgcaagaggcaggcatcggagtccagcagcaggccgcattgacccgtctccatcggaccccagcccctatctccaagagacagaggaggggtcaggaggcactgctcatctgtacatactgtttcctatgacattactgtatttaagaaaacaccatggagatgaaatgcctttgattttttttttctttttgtactttggaacgacaaaatgaaacagaacttgaccctgagcttaaataacaaaactgtgccaactactactggtgatgcctaattatgaatccaacgtgtaaccagttataaatacatatatatataaaaaaggatctatttttgtgtaaatgtacaaatactgtaaagctgttgccataagtattttgcaggagggtctgtacttgagtgttttaggactggagctggaatttcaccaaggggaaattgcctgttgtgtcccagggtggggaggctcgggcatctgtgagagacagggagggtggctaaggtccagttgcttttgagtgccccgtggaacttgatgggaatggggttggaacaccttgattgcctcctctgtcacatgccactcttggagctggagcttagtgatatgtcaatgagagatactcttgtcttttttttttttcttttcttttttttttggagttgaaattaggtaaaatctcaactcaaaaatcaaactcagggaagaggcccactgaggagaacaagtcttctgcattttcttcctgccctgctcccaccttctcgcctctggctgcttggatagctgtggtgactccttcctcaccctcctgcttctctgtctctccaagaagccagagctgcctctttccttccctggaagagattttatggggatcgcttcctgatagaagatgggaaggagagggcagaactttgcctgctgtcatatctgaagaatcacgggttctttctgcatcccaggggcgtaactgatctgactcctggggcttttcctgtatggtggaatatagaggggaccattgcaggctgggtgtgggtgagggcttcggtaactgatgccggcagcagcgcctcatggagtggcaggggagctctgtctgtggaggggtagtagtttccgcttcctggaggtttgcagtgaggtgaggagagtaactttggtcagggattctcactagcagcgtcatggccaggatgctttacttatttgcaataccacctagtggatatggcaactgcagagcataaaaggggctcggaaaagcagtttttacaaagtatttaaaaggagagtatttaaatcataggtacctaagttggagcctgaggttgaaatatttggggtggagatttctagctttcctgagagctgctgcttggtggtagtgttttctctggaagtacagattcctgacattctgggtggaggggagcccaagtgagcctgaaggagttctgattatagagtcccgagcctcagtttctgactgcagaagagccagagatgttcatttcattgttgaccaccctagtgcttggtggactgtgcccttagctatcccactgtggctgccattgccagaaacattttggagaaccttttcttcccattgctctcagagcctgttcgagccattcaggtaaattggtctccattattacctggtcacaccagattttcccccagactcagcaccatccagtctgattccccgtttctgggctcagtttgactctaaatctgttttgctattttaaaaagtcaaacctggtccccagcagagcttgccacccggagactttcaggagaccgtgcaggctctgaagggagctcccagtcacagcagccgcctacttggagcaagggaaggctcccaagatgcctcctttgaaagccggtgctcaccaagatcagttcaggatcaatcattatccttgtagtcatgccttgatcagttctgagatgaagcagggaatgcaggcctgggttagcatcctgaggacacagggcccctggccttgatggcactgggccgtgctcaggtgaagcccacccgtgtctgggagagccttggcttttcagtgggcagcatgctcaactttacttgaagctcccaggtgccaaaccatttagtgccttggctgtttatcccactgccttggaagatggactcctctcatctctgagcctttacctagctgcttcctcatctacctgtggtgttgggaccaagcctccaatatctctgaatagcccactcctagcttggaaacagctataagggctgccctgccccttgtcaaatgatcaccaattcttggtggcttggctggggacaatgaacagtgtctgctggggtctgtgacacactgtttctggaacaaggaagggatggaaggctctacccctccgtggcagcccagcatttggccaactctgtatctgaacttgagctttctatggaacaaacaatggtcttagttttttaagagcctctgggtctctgattccatggagagtcaggagtagaattagtggaccagaaaccatgacatttgccatctaggtactctgctgttcagggtggaggcacagatgagcagagtggggtgatgttggttgtatgtgcatagaagtcccctggctccagagccatccagtggtgcttggttctctcttcctgcccaggtattgtgtgtggaccaagtgtttaggaaacaagcatagaagcattatgtcacaggaaggcctggcctctcactccttcacactaatgagccttctactgacccaagtttctttttctcgggcagcctgggaccactatgagcagagagatgggagtctgtgtaagaaggatgcaagtatcctttgatttggagtggacagagcaggtccttgcaaaggcagtgggttaaacaacgggatgtctgtgggacaggccagggaaggagggcagagacagggtctccagttcaccttgccgcagaactagcctaatcgtccctgcttctggtcttggccacttggcaatcatggggaagttgactccccgcctcacttgggcttggagctggatactcgtggccacgcccaggataggttgccagagtttcattaggccgctgggtcgggctggaggcttgtgtacacctcggagcagtcgggcagcaggagggccggaagcctggttggtttgtatatgacctctcttgcccttgtgcactttccttgatttagcaaccttgacctgcactggccctcacagctgttggagggaagtagcctcttgcagggaaatattttcccctgccctggaatctcctatgtgcctgttaaagattccagggccaagaactcggcaggctgaggagcagctaggtaggtgggttatgcggttcaggactgcttctggaagggactgcctgtacttctgtaccaccgttgccctttacactttgctcagggcggggtgggggaagcattcaaacaaaacaaggaagggaactgtctggcaaagcataagtggatgcatccagagctcagtcccctttaatcttttgtctctgggcgttctgctgccttcctcataccggggactggcattccaggtcagcttggctgtggtcttagaggcagggagtgcctacccagtcctgcctcaggagcagggtgagtagctaaatacagacttaggcttttttttccccccttttaagatgcttgctcctctcccttttctttttaccaccctacctttattgttagtggttacaaagtgaccacatattatgtactttgctgtaaataaagacagacaaaaaggcaaaaaaaaaaaaaaaaaaaaaaaaaactgggggggaccaagagggggggggggaaaaagggcgatcgaacggggccacggcccaacagcggtcccggacccagtttccgggtccaagggggaaaaccggggggctcccccaataggggggagaggggaaaaaattgcgaaaagcgcgggcttaccgctagatgtgttcacacaaacacacacngacaacacaaaacgacggaccagaaagaacgaggggggacaacaactccaaaaacagaggggcgaaaacagataga

SEQ ID NO: 446545 - DNA, 5432 bp, Homo sapiens
ctcgccgcctccgcctcggcgaatagcagcgcgctgcccgcccggattggagcagcagcatcacgctgacctctgcctgggatgtaaaccggaccagccgctgcgggcaaaggaaggctcttggctccttcgggaaacccagccccgtcaccgggctccgagcggctcgcaggcgagcgacagcggcctcagccccggcagcgcccagcggcggctgcggaaagcggagggagtccgacgcgggcgcgggcggggagcgtgcgtccgttcgcacaggcagcgggaggaggggcggcgcgaaccatggccggggacagcgagcagaccctgcagaaccaccagcagcccaacggcggcgagcccttccttataggcgtcagcgggggaacagctagcggcaagtcttccgtgtgtgctaagatcgtgcagctcctggggcagaatgaggtggactatcgccagaagcaggtggtcatcctgagccaggatagcttctaccgtgtccttacctcggagcagaaggccaaagccctgaagggccagttcaactttgaccacccggatgcctttgacaatgaactcattctcaaaacactcaaagaaatcactgaagggaaaacagtccagatccccgtgtatgactttgtctcccattcccggaaggaggagacagttactgtctatcccgcagacgtggtgctctttgaagggatcctggccttctactcccaggaggtacgagacctgttccagatgaagctttttgtggatacagatgcggacacccggctctcacgcagagtattaagggacatcagcgagagaggcagggatcttgagcagattttatctcagtacattacgttcgtcaagcctgcctttgaggaattctgcttgccaacaaagaagtatgctgatgtgatcatccctagaggtgcagataatctggtggccatcaacctcatcgtgcagcacatccaggacatcctgaatggagggccctccaaacggcagaccaatggctgtctcaacggctacaccccttcacgcaagaggcaggcatcggagtccagcagcaggccgcattgacccgtctccatcggaccccagcccctatctccaagagacagaggaggggtcaggaggcactgctcatctgtacatactgtttcctatgacattactgtatttaagaaaacaccatggagatgaaatgcctttgattttttttttctttttgtactttggaacgacaaaatgaaacagaacttgaccctgagcttaaataacaaaactgtgccaactactactggtgatgcctaattatgaatccaacgtgtaaccagttataaatacatatatatataaaaaaggatctatttttgtgtaaatgtacaaatactgtaaagctgttgccataagtattttgcaggagggtctgtacttgagtgttttaggactggagctggaatttcaccaaggggaaattgcctgttgtgtcccagggtggggaggctcgggcatctgtgagagacagggagggtggctaaggtccagttgcttttgagtgccccgtggaacttgatgggaatggggttggaacaccttgattgcctcctctgtcacatgccactcttggagctggagcttagtgatatgtcaatgagagatactcttgtcttttttttttttcttttcttttttttttggagttgaaattaggtaaaatctcaactcaaaaatcaaactcagggaagaggcccactgaggagaacaagtcttctgcattttcttcctgccctgctcccaccttctcgcctctggctgcttggatagctgtggtgactccttcctcaccctcctgcttctctgtctctccaagaagccagagctgcctctttccttccctggaagagattttatggggatcgcttcctgatagaagatgggaaggagagggcagaactttgcctgctgtcatatctgaagaatcacgggttctttctgcatcccaggggcgtaactgatctgactcctggggcttttcctgtatggtggaatatagaggggaccattgcaggctgggtgtgggtgagggcttcggtaactgatgccggcagcagcgcctcatggagtggcaggggagctctgtctgtggaggggtagtagtttccgcttcctggaggtttgcagtgaggtgaggagagtaactttggtcagggattctcactagcagcgtcatggccaggatgctttacttatttgcaataccacctagtggatatggcaactgcagagcataaaaggggctcggaaaagcagtttttacaaagtatttaaaaggagagtatttaaatcataggtacctaagttggagcctgaggttgaaatatttggggtggagatttctagctttcctgagagctgctgcttggtggtagtgttttctctggaagtacagattcctgacattctgggtggaggggagcccaagtgagcctgaaggagttctgattatagagtcccgagcctcagtttctgactgcagaagagccagagatgttcatttcattgttgaccaccctagtgcttggtggactgtgcccttagctatcccactgtggctgccattgccagaaacattttggagaaccttttcttcccattgctctcagagcctgttcgagccattcaggtaaattggtctccattattacctggtcacaccagattttcccccagactcagcaccatccagtctgattccccgtttctgggctcagtttgactctaaatctgttttgctattttaaaaagtcaaacctggtccccagcagagcttgccacccggagactttcaggagaccgtgcaggctctgaagggagctcccagtcacagcagccgcctacttggagcaagggaaggctcccaagatgcctcctttgaaagccggtgctcaccaagatcagttcaggatcaatcattatccttgtagtcatgccttgatcagttctgagatgaagcagggaatgcaggcctgggttagcatcctgaggacacagggcccctggccttgatggcactgggccgtgctcaggtgaagcccacccgtgtctgggagagccttggcttttcagtgggcagcatgctcaactttacttgaagctcccaggtgccaaaccatttagtgccttggctgtttatcccactgccttggaagatggactcctctcatctctgagcctttacctagctgcttcctcatctacctgtggtgttgggaccaagcctccaatatctctgaatagcccactcctagcttggaaacagctataagggctgccctgccccttgtcaaatgatcaccaattcttggtggcttggctggggacaatgaacagtgtctgctggggtctgtgacacactgtttctggaacaaggaagggatggaaggctctacccctccgtggcagcccagcatttggccaactctgtatctgaacttgagctttctatggaacaaacaatggtcttagttttttaagagcctctgggtctctgattccatggagagtcaggagtagaattagtggaccagaaaccatgacatttgccatctaggtactctgctgttcagggtggaggcacagatgagcagagtggggtgatgttggttgtatgtgcatagaagtcccctggctccagagccatccagtggtgcttggttctctcttcctgcccaggtattgtgtgtggaccaagtgtttaggaaacaagcatagaagcattatgtcacaggaaggcctggcctctcactccttcacactaatgagccttctactgacccaagtttctttttctcgggcagcctgggaccactatgagcagagagatgggagtctgtgtaagaaggatgcaagtatcctttgatttggagtggacagagcaggtccttgcaaaggcagtgggttaaacaacgggatgtctgtgggacaggccagggaaggagggcagagacagggtctccagttcaccttgccgcagaactagcctaatcgtccctgcttctggtcttggccacttggcaatcatggggaagttgactccccgcctcacttgggcttggagctggatactcgtggccacgcccaggataggttgccagagtttcattaggccgctgggtcgggctggaggcttgtgtacacctcggagcagtcgggcagcaggagggccggaagcctggttggtttgtatatgacctctcttgcccttgtgcactttccttgatttagcaaccttgacctgcactggccctcacagctgttggagggaagtagcctcttgcagggaaatattttcccctgccctggaatctcctatgtgcctgttaaagattccagggccaagaactcggcaggctgaggagcagctaggtaggtgggttatgcggttcaggactgcttctggaagggactgcctgtacttctgtaccaccgttgccctttacactttgctcagggcggggtgggggaagcattcaaacaaaacaaggaagggaactgtctggcaaagcataagtggatgcatccagagctcagtcccctttaatcttttgtctctgggcgttctgctgccttcctcataccggggactggcattccaggtcagcttggctgtggtcttagaggcagggagtgcctacccagtcctgcctcaggagcagggtgagtagctaaatacagacttaggcttttttttccccccttttaagatgcttgctcctctcccttttctttttaccaccctacctttattgttagtggttacaaagtgaccacatattatgtactttgctgtaaataaagacagacaaaaaggcaaaaacccaaacacacaacaacaaaaataaaaaaacaacaaaatcatacaacgaaaaaaaaaaacaaagaggcggggcacccaacaaatacacacacacgacgggcccgcacaagcacccaacccacaccctatcttgcaccaagggcagccccataagggagcgacactaatcaaaacgaccagcggcgggcccgacaaccaacactcgatggcgaaacacccgcacacgtgcatcaccttggcagaagaacccctaccccgcggccgaccagaaacaggcgcacgacaacacacgagagtgtaaagccccgaggcggcaacaaccagcagcgcgactgggtgaacaacccagctactactagcggagactactgcaccggggtctttgagcctatccgcggtcgcaacaggagctgcaacagaccactgcaccaccgaccgggcagaccggcagagcagcagcgaagctagcaggtacagcaggaggcgacgggggagcgcccacaagggcgaccagaccccacccggcacacagaccgacagcgag

SEQ ID NO: 446546 - DNA, 5415 bp, Homo sapiens
  misc_feature (5339)..(5339): n is a, c, g, or t
cctaagtggtatattatgccaggtatgactccttgcacattctgggctagtagttgctcaataaatttgttgttgttttttaaaaactctgagctgttatgacagtttttagacctgcgtttggacttgggaaatgattaattctaacttcttaaggcaccaccaacaaattaggcagttaattttctccttccgaaggaaaaccacttttcctttttagtatttatcagttaggcatcctaaaatgctcttaatatctagtgtcagtacagattgaacatccctaatctaaaaacccaaaatgtgaaatgctccaaaatctgaaactttttgagtgccagtgtgacgttcaaaggaaatgctcattggagcatttcagattttggattttcatgttagggaggctcattgtagatcctctctccccctgccatattagggatgccctaaatataatgcagatattccaaaatctgaaaaaaatccaaaattcaaaaattctaaacacctaagcatttcatataagggatacttaacctggatatgtaaacttagtgcagccattgtgttctctgttagtgtgttcaagtggactcttgcacatacattcactttatttttggacaaagccttcccacactctccttggtgtaggggagttgcctagagagtggctcactatttcacttacccattggttctgttttctgaacttctctaggttgccttcttatgcacaatgacaatgggcacaccattttctggcagctgacattcctctagactggtgcttctctaccctggctgcatgttagaaatatcttgggagcttctaaatagtgttgaagttctagctccacttcagactcattaaatcagagctccttgggggtaggatccaggaaggaggagacagttactgtctatcccgcagacgtggtgctctttgaagggatcctggccttctactcccaggaggtacgagacctgttccagatgaagctttttgtggatacagatgcggacacccggctctcacgcagagtattaagggacatcagcgagagaggcagggatcttgagcagattttatctcagtacattacgttcgtcaagcctgcctttgaggaattctgcttgccaacaaagaagtatgctgatgtgatcatccctagaggtgcagataatctggtggccatcaacctcatcgtgcagcacatccaggacatcctgaatggagggccctccaaacggcagaccaatggctgtctcaacggctacaccccttcacgcaagaggcaggcatcggagtccagcagcaggccgcattgacccgtctccatcggaccccagcccctatctccaagagacagaggaggggtcaggaggcactgctcatctgtacatactgtttcctatgacattactgtatttaagaaaacaccatggagatgaaatgcctttgattttttttttctttttgtactttggaacgacaaaatgaaacagaacttgaccctgagcttaaataacaaaactgtgccaactactactggtgatgcctaattatgaatccaacgtgtaaccagttataaatacatatatatataaaaaaggatctatttttgtgtaaatgtacaaatactgtaaagctgttgccataagtattttgcaggagggtctgtacttgagtgttttaggactggagctggaatttcaccaaggggaaattgcctgttgtgtcccagggtggggaggctcgggcatctgtgagagacagggagggtggctaaggtccagttgcttttgagtgccccgtggaacttgatgggaatggggttggaacaccttgattgcctcctctgtcacatgccactcttggagctggagcttagtgatatgtcaatgagagatactcttgtcttttttttttttcttttcttttttttttggagttgaaattaggtaaaatctcaactcaaaaatcaaactcagggaagaggcccactgaggagaacaagtcttctgcattttcttcctgccctgctcccaccttctcgcctctggctgcttggatagctgtggtgactccttcctcaccctcctgcttctctgtctctccaagaagccagagctgcctctttccttccctggaagagattttatggggatcgcttcctgatagaagatgggaaggagagggcagaactttgcctgctgtcatatctgaagaatcacgggttctttctgcatcccaggggcgtaactgatctgactcctggggcttttcctgtatggtggaatatagaggggaccattgcaggctgggtgtgggtgagggcttcggtaactgatgccggcagcagcgcctcatggagtggcaggggagctctgtctgtggaggggtagtagtttccgcttcctggaggtttgcagtgaggtgaggagagtaactttggtcagggattctcactagcagcgtcatggccaggatgctttacttatttgcaataccacctagtggatatggcaactgcagagcataaaaggggctcggaaaagcagtttttacaaagtatttaaaaggagagtatttaaatcataggtacctaagttggagcctgaggttgaaatatttggggtggagatttctagctttcctgagagctgctgcttggtggtagtgttttctctggaagtacagattcctgacattctgggtggaggggagcccaagtgagcctgaaggagttctgattatagagtcccgagcctcagtttctgactgcagaagagccagagatgttcatttcattgttgaccaccctagtgcttggtggactgtgcccttagctatcccactgtggctgccattgccagaaacattttggagaaccttttcttcccattgctctcagagcctgttcgagccattcaggtaaattggtctccattattacctggtcacaccagattttcccccagactcagcaccatccagtctgattccccgtttctgggctcagtttgactctaaatctgttttgctattttaaaaagtcaaacctggtccccagcagagcttgccacccggagactttcaggagaccgtgcaggctctgaagggagctcccagtcacagcagccgcctacttggagcaagggaaggctcccaagatgcctcctttgaaagccggtgctcaccaagatcagttcaggatcaatcattatccttgtagtcatgccttgatcagttctgagatgaagcagggaatgcaggcctgggttagcatcctgaggacacagggcccctggccttgatggcactgggccgtgctcaggtgaagcccacccgtgtctgggagagccttggcttttcagtgggcagcatgctcaactttacttgaagctcccaggtgccaaaccatttagtgccttggctgtttatcccactgccttggaagatggactcctctcatctctgagcctttacctagctgcttcctcatctacctgtggtgttgggaccaagcctccaatatctctgaatagcccactcctagcttggaaacagctataagggctgccctgccccttgtcaaatgatcaccaattcttggtggcttggctggggacaatgaacagtgtctgctggggtctgtgacacactgtttctggaacaaggaagggatggaaggctctacccctccgtggcagcccagcatttggccaactctgtatctgaacttgagctttctatggaacaaacaatggtcttagttttttaagagcctctgggtctctgattccatggagagtcaggagtagaattagtggaccagaaaccatgacatttgccatctaggtactctgctgttcagggtggaggcacagatgagcagagtggggtgatgttggttgtatgtgcatagaagtcccctggctccagagccatccagtggtgcttggttctctcttcctgcccaggtattgtgtgtggaccaagtgtttaggaaacaagcatagaagcattatgtcacaggaaggcctggcctctcactccttcacactaatgagccttctactgacccaagtttctttttctcgggcagcctgggaccactatgagcagagagatgggagtctgtgtaagaaggatgcaagtatcctttgatttggagtggacagagcaggtccttgcaaaggcagtgggttaaacaacgggatgtctgtgggacaggccagggaaggagggcagagacagggtctccagttcaccttgccgcagaactagcctaatcgtccctgcttctggtcttggccacttggcaatcatggggaagttgactccccgcctcacttgggcttggagctggatactcgtggccacgcccaggataggttgccagagtttcattaggccgctgggtcgggctggaggcttgtgtacacctcggagcagtcgggcagcaggagggccggaagcctggttggtttgtatatgacctctcttgcccttgtgcactttccttgatttagcaaccttgacctgcactggccctcacagctgttggagggaagtagcctcttgcagggaaatattttcccctgccctggaatctcctatgtgcctgttaaagattccagggccaagaactcggcaggctgaggagcagctaggtaggtgggttatgcggttcaggactgcttctggaagggactgcctgtacttctgtaccaccgttgccctttacactttgctcagggcggggtgggggaagcattcaaacaaaacaaggaagggaactgtctggcaaagcataagtggatgcatccagagctcagtcccctttaatcttttgtctctgggcgttctgctgccttcctcataccggggactggcattccaggtcagcttggctgtggtcttagaggcagggagtgcctacccagtcctgcctcaggagcagggtgagtagctaaatacagacttaggcttttttttccccccttttaagatgcttgctcctctcccttttctttttaccaccctacctttattgttagtggttacaaagtgaccacatattatgtactttgctgtaaataaagacagacaaaaaggcaaaaaaaaaaaaaaaaaaaaaaaaaactgggggggaccaagagggggggggggaaaaagggcgatcgaacggggccacggcccaacagcggtcccggacccagtttccgggtccaagggggaaaaccggggggctcccccaataggggggagaggggaaaaaattgcgaaaagcgcgggcttaccgctagatgtgttcacacaaacacacacngacaacacaaaacgacggaccagaaagaacgaggggggacaacaactccaaaaacagaggggcgaaaacagataga

SEQ ID NO: 446547 - DNA, 5140 bp, Homo sapiens
  misc_feature (5064)..(5064): n is a, c, g, or t
tgtggccactttgttggtttggggtagagccagaccagacagacgtcgggattctgtacttcctcacaaatgctttctcgtctgtatcctctttcccaaaacttttctttattttccctccttcccttccccttctgtcctttcctccctcctttcaattgcctcaggactggcggggaggggatggagttgttgagagaaaactgtgagtttctgtttttaaagttcagagtgttaggttccataaatgccaggccatgagagcattcctggagacgccttcagagaaaaaaagaaatcacatctgtttttgtctgcctttattcttcattcaacagcaggtttttttaattccaaggagaaggatgtctgccgtgtatttctgtttcatggtgaaagctcagaagtggtcaaaggagacctttgtcccggccgtgatcacccttggctctttggtggtggtccgagggctctgtaagaccatattagccaagtctttagcccccgcttgaagtctgtgggggcaaggaacccagaacccagcccagccagatgttctggcccttgttctctgtcccttgctagcccctgcctggcttggcccattatctgctctgtgctttgcaggaaggaggagacagttactgtctatcccgcagacgtggtgctctttgaagggatcctggccttctactcccaggaggtacgagacctgttccagatgaagctttttgtggatacagatgcggacacccggctctcacgcagagtattaagggacatcagcgagagaggcagggatcttgagcagattttatctcagtacattacgttcgtcaagcctgcctttgaggaattctgcttgccaacaaagaagtatgctgatgtgatcatccctagaggtgcagataatctggtggccatcaacctcatcgtgcagcacatccaggacatcctgaatggagggccctccaaacggcagaccaatggctgtctcaacggctacaccccttcacgcaagaggcaggcatcggagtccagcagcaggccgcattgacccgtctccatcggaccccagcccctatctccaagagacagaggaggggtcaggaggcactgctcatctgtacatactgtttcctatgacattactgtatttaagaaaacaccatggagatgaaatgcctttgattttttttttctttttgtactttggaacgacaaaatgaaacagaacttgaccctgagcttaaataacaaaactgtgccaactactactggtgatgcctaattatgaatccaacgtgtaaccagttataaatacatatatatataaaaaaggatctatttttgtgtaaatgtacaaatactgtaaagctgttgccataagtattttgcaggagggtctgtacttgagtgttttaggactggagctggaatttcaccaaggggaaattgcctgttgtgtcccagggtggggaggctcgggcatctgtgagagacagggagggtggctaaggtccagttgcttttgagtgccccgtggaacttgatgggaatggggttggaacaccttgattgcctcctctgtcacatgccactcttggagctggagcttagtgatatgtcaatgagagatactcttgtcttttttttttttcttttcttttttttttggagttgaaattaggtaaaatctcaactcaaaaatcaaactcagggaagaggcccactgaggagaacaagtcttctgcattttcttcctgccctgctcccaccttctcgcctctggctgcttggatagctgtggtgactccttcctcaccctcctgcttctctgtctctccaagaagccagagctgcctctttccttccctggaagagattttatggggatcgcttcctgatagaagatgggaaggagagggcagaactttgcctgctgtcatatctgaagaatcacgggttctttctgcatcccaggggcgtaactgatctgactcctggggcttttcctgtatggtggaatatagaggggaccattgcaggctgggtgtgggtgagggcttcggtaactgatgccggcagcagcgcctcatggagtggcaggggagctctgtctgtggaggggtagtagtttccgcttcctggaggtttgcagtgaggtgaggagagtaactttggtcagggattctcactagcagcgtcatggccaggatgctttacttatttgcaataccacctagtggatatggcaactgcagagcataaaaggggctcggaaaagcagtttttacaaagtatttaaaaggagagtatttaaatcataggtacctaagttggagcctgaggttgaaatatttggggtggagatttctagctttcctgagagctgctgcttggtggtagtgttttctctggaagtacagattcctgacattctgggtggaggggagcccaagtgagcctgaaggagttctgattatagagtcccgagcctcagtttctgactgcagaagagccagagatgttcatttcattgttgaccaccctagtgcttggtggactgtgcccttagctatcccactgtggctgccattgccagaaacattttggagaaccttttcttcccattgctctcagagcctgttcgagccattcaggtaaattggtctccattattacctggtcacaccagattttcccccagactcagcaccatccagtctgattccccgtttctgggctcagtttgactctaaatctgttttgctattttaaaaagtcaaacctggtccccagcagagcttgccacccggagactttcaggagaccgtgcaggctctgaagggagctcccagtcacagcagccgcctacttggagcaagggaaggctcccaagatgcctcctttgaaagccggtgctcaccaagatcagttcaggatcaatcattatccttgtagtcatgccttgatcagttctgagatgaagcagggaatgcaggcctgggttagcatcctgaggacacagggcccctggccttgatggcactgggccgtgctcaggtgaagcccacccgtgtctgggagagccttggcttttcagtgggcagcatgctcaactttacttgaagctcccaggtgccaaaccatttagtgccttggctgtttatcccactgccttggaagatggactcctctcatctctgagcctttacctagctgcttcctcatctacctgtggtgttgggaccaagcctccaatatctctgaatagcccactcctagcttggaaacagctataagggctgccctgccccttgtcaaatgatcaccaattcttggtggcttggctggggacaatgaacagtgtctgctggggtctgtgacacactgtttctggaacaaggaagggatggaaggctctacccctccgtggcagcccagcatttggccaactctgtatctgaacttgagctttctatggaacaaacaatggtcttagttttttaagagcctctgggtctctgattccatggagagtcaggagtagaattagtggaccagaaaccatgacatttgccatctaggtactctgctgttcagggtggaggcacagatgagcagagtggggtgatgttggttgtatgtgcatagaagtcccctggctccagagccatccagtggtgcttggttctctcttcctgcccaggtattgtgtgtggaccaagtgtttaggaaacaagcatagaagcattatgtcacaggaaggcctggcctctcactccttcacactaatgagccttctactgacccaagtttctttttctcgggcagcctgggaccactatgagcagagagatgggagtctgtgtaagaaggatgcaagtatcctttgatttggagtggacagagcaggtccttgcaaaggcagtgggttaaacaacgggatgtctgtgggacaggccagggaaggagggcagagacagggtctccagttcaccttgccgcagaactagcctaatcgtccctgcttctggtcttggccacttggcaatcatggggaagttgactccccgcctcacttgggcttggagctggatactcgtggccacgcccaggataggttgccagagtttcattaggccgctgggtcgggctggaggcttgtgtacacctcggagcagtcgggcagcaggagggccggaagcctggttggtttgtatatgacctctcttgcccttgtgcactttccttgatttagcaaccttgacctgcactggccctcacagctgttggagggaagtagcctcttgcagggaaatattttcccctgccctggaatctcctatgtgcctgttaaagattccagggccaagaactcggcaggctgaggagcagctaggtaggtgggttatgcggttcaggactgcttctggaagggactgcctgtacttctgtaccaccgttgccctttacactttgctcagggcggggtgggggaagcattcaaacaaaacaaggaagggaactgtctggcaaagcataagtggatgcatccagagctcagtcccctttaatcttttgtctctgggcgttctgctgccttcctcataccggggactggcattccaggtcagcttggctgtggtcttagaggcagggagtgcctacccagtcctgcctcaggagcagggtgagtagctaaatacagacttaggcttttttttccccccttttaagatgcttgctcctctcccttttctttttaccaccctacctttattgttagtggttacaaagtgaccacatattatgtactttgctgtaaataaagacagacaaaaaggcaaaaaaaaaaaaaaaaaaaaaaaaaactgggggggaccaagagggggggggggaaaaagggcgatcgaacggggccacggcccaacagcggtcccggacccagtttccgggtccaagggggaaaaccggggggctcccccaataggggggagaggggaaaaaattgcgaaaagcgcgggcttaccgctagatgtgttcacacaaacacacacngacaacacaaaacgacggaccagaaagaacgaggggggacaacaactccaaaaacagaggggcgaaaacagataga

SEQ ID NO: 446548 - DNA, 3881 bp, Homo sapiens
ctcgccgcctccgcctcggcgaatagcagcgcgctgcccgcccggattggagcagcagcatcacgctgacctctgcctgggatgtaaaccggaccagccgctgcgggcaaaggaaggctcttggctccttcgggaaacccagccccgtcaccgggctccgagcggctcgcaggcgagcgacagcggcctcagccccggcagcgcccagcggcggctgcggaaagcggagggagtccgacgcgggcgcgggcggggagcgtgcgtccgttcgcacaggcagcgggaggaggggcggcgcgaaccatggccggggacagcgagcagaccctgcagaaccaccagcagcccaacggcggcgagcccttccttataggcgtcagcgggggaacagctagcggcaagtcttccgtgtgtgctaagatcgtgcagctcctggggcagaatgaggtggactatcgccagaagcaggtggtcatcctgagccaggatagcttctaccgtgtccttacctcggagcagaaggccaaagccctgaagggccagttcaactttgaccacccggatgcctttgacaatgaactcattctcaaaacactcaaagaaatcactgaagggaaaacagtccagatccccgtgtatgactttgtctcccattcccggaaggaggagacagttactgtctatcccgcagacgtggtgctctttgaagggatcctggccttctactcccaggaggtacgagacctgttccagatgaagctttttgtggatacagatgcggacacccggctctcacgcagagtattaagggacatcagcgagagaggcagggatcttgagcagattttatctcagtacattacgttcgtcaagcctgcctttgaggaattctgcttgccaacaaagaagtatgctgatgtgatcatccctagaggtgcagataatctggtggccatcaacctcatcgtgcagcacatccaggacatcctgaatggagggccctccaaacggcagaccaatggctgtctcaacggctacaccccttcacgcaagaggcaggcatcggagtccagcagcaggccgcattgacccgtctccatcggaccccagcccctatctccaagagacagaggaggggtcaggaggcactgctcatctgtacatactgtttcctatgacattactgtatttaagaaaacaccatggagatgaaatgcctttgattttttttttctttttgtactttggaacgacaaaatgaaacagaacttgaccctgagcttaaataacaaaactgtgccaactactactggtgatgcctaattatgaatccaacgtgtaaccagttataaatacatatatatataaaaaaggatctatttttgtgtaaatgtacaaatactgtaaagctgttgccataagtattttgcaggagggtctgtacttgagtgttttaggactggagctggaatttcaccaaggggaaattgcctgttgtgtcccagggtggggaggctcgggcatctgtgagagacagggagggtggctaaggtccagttgcttttgagtgccccgtggaacttgatgggaatggggttggaacaccttgattgcctcctctgtcacatgccactcttggagctggagcttagtgatatgtcaatgagagatactcttgtcttttttttttttcttttcttttttttttggagttgaaattaggtaaaatctcaactcaaaaatcaaactcagggaagaggcccactgaggagaacaagtcttctgcattttcttcctgccctgctcccaccttctcgcctctggctgcttggatagctgtggtgactccttcctcaccctcctgcttctctgtctctccaagaagccagagctgcctctttccttccctggaagagattttatggggatcgcttcctgatagaagatgggaaggagagggcagaactttgcctgctgtcatatctgaagaatcacgggttctttctgcatcccaggggcgtaactgatctgactcctggggcttttcctgtatggtggaatatagaggggaccattgcaggctgggtgtgggtgagggcttcggtaactgatgccggcagcagcgcctcatggagtggcaggggagctctgtctgtggaggggtagtagtttccgcttcctggaggtttgcagtgaggtgaggagagtaactttggtcagggattctcactagcagcgtcatggccaggatgctttacttatttgcaataccacctagtggatatggcaactgcagagcataaaaggggctcggaaaagcagtttttacaaagtatttaaaaggagagtatttaaatcataggtacctaagttggagcctgaggttgaaatatttggggtggagatttctagctttcctgagagctgctgcttggtggtagtgttttctctggaagtacagattcctgacattctgggtggaggggagcccaagtgagcctgaaggagttctgattatagagtcccgagcctcagtttctgactgcagaagagccagagatgttcatttcattgttgaccaccctagtgcttggtggactgtgcccttagctatcccactgtggctgccattgccagaaacattttggagaaccttttcttcccattgctctcagagcctgttcgagccattcaggtaaattggtctccattattacctggtcacaccagattttcccccagactcagcaccatccagtctgattccccgtttctgggctcagtttgactctaaatctgttttgctattttaaaaagtcaaacctggtccccagcagagcttgccacccggagactttcaggagaccgtgcaggctctgaagggagctcccagtcacagcagccgcctacttggagcaagggaaggctcccaagatgcctcctttgaaagccggtgctcaccaagatcagttcaggatcaatcattatccttgtagtcatgccttgatcagttctgagatgaagcagggaatgcaggcctgggttagcatcctgaggacacagggcccctggccttgatggcactgggccgtgctcaggtgaagcccacccgtgtctgggagagccttggcttttcagtgggcagcatgctcaactttacttgaagctcccaggtgccaaaccatttagtgccttggctgtttatcccactgccttggaagatggactcctctcatctctgagcctttacctagctgcttcctcatctacctgtggtgttgggaccaagcctccaatatctctgaatagcccactcctagcttggaaacagctataagggctgccctgccccttgtcaaatgatcaccaattcttggtggcttggctggggacaatgaacagtgtctgctggggtctgtgacacactgtttctggaacaaggaagggatggaaggctctacccctccgtggcagcccagcatttggccaactctgtatctgaacttgagctttctatggaacaaacaatggtcttagttttttaagagcctctgggtctctgattccatggagagtcaggagtagaattagtggaccagaaaccatgacatttgccatctaggtactctgctgttcagggtggaggcacagatgagcagagtggggtgatgttggttgtatgtgcatagaagtcccctggctccagagccatccagtggtgcttggttctctcttcctgcccaggtattgtgtgtggaccaagtgtttaggaaacaagcatttgggagaaccttttcttcccattgctctcagagcctgttcgagccattcaggtaaatgggtctccattattacctggtcacaccagattttcccccaga

SEQ ID NO: 446549 - DNA, 1695 bp, Homo sapiens
ctcgccgcctccgcctcggcgaatagcagcgcgctgcccgcccggattggagcagcagcatcacgctgacctctgcctgggatgtaaaccggaccagccgctgcgggcaaaggaaggctcttggctccttcgggaaacccagccccgtcaccgggctccgagcggctcgcaggcgagcgacagcggcctcagccccggcagcgcccagcggcggctgcggaaagcggagggagtccgacgcgggcgcgggcggggagcgtgcgtccgttcgcacaggcagcgggaggaggggcggcgcgaaccatggccggggacagcgagcagaccctgcagaaccaccagcagcccaacggcggcgagcccttccttataggcgtcagcgggggaacagctagcggcaagtcttccgtgtgtgctaagatcgtgcagctcctggggcagaatgaggtggactatcgccagaagcaggtggtcatcctgagccaggatagcttctaccgtgtccttacctcggagcagaaggccaaagccctgaagggccagttcaactttgaccacccggatgcctttgacaatgaactcattctcaaaacactcaaagaaatcactgaagggaaaacagtccagatccccgtgtatgactttgtctcccattcccggaaggaggagacagttactgtctatcccgcagacgtggtgctctttgaagggatcctggccttctactcccaggaggtacgagacctgttccagatgaagctttttgtggatacagatgcggacacccggctctcacgcagagtattaagggacatcagcgagagaggcagggatcttgagcagattttatctcagtacattacgttcgtcaagcctgcctttgaggaattctgcttgccaacaaagaagtatgctgatgtgatcatccctagaggtgcagataatctggtggccatcaacctcatcgtgcagcacatccaggacatcctgaatggagggccctccaaacggcagaccaatggctgtctcaacggctacaccccttcacgcaagaggcaggcatcggagtccagcagcaggccgcattgacccgtctccatcggaccccagcccctatctccaagagacagaggaggggtcaggaggcactgctcatctgtacatactgtttcctatgacattactgtatttaagaaaacaccatggagatgaaatgcctttgattttttttttctttttgtactttggaacgacaaaatgaaacagaacttgaccctgagcttaaataacaaaactgtgccaactaaaaaaccatccaaagccagtgttgcactatggtttcatcagaacaacgattcagcaggacctcacacagaaactatcagtaacatcaacagaacttcccacgggcaccacaccttgacacttccatcacaattgtagcccaggcacttgcttcagacaaactcgcacaccgaaacattatacacgcttattgcaggaacttcacaagagggttccctccttcccaagcaaggaccccaacaacgtcttgaaatgggaaccaagaccacatagcacatagggcgaccctgcaatccacaaccccaatctggcttccaccatgtactaccggctccgaccccctgcacccgcggacatcacctcacagcatcacctgtcgccatacttaca

SEQ ID NO: 446550 - DNA, 449 bp, Homo sapiens
acttttctttattttccctccttcccttccccttctgtcctttcctccctcctttcaattgcctcaggactggcggggaggggatggagttgttgagagaaaactgtgagtttctgtttttaaagttcagagtgttaggttccataaatgccaggccatgagagcattcctggagacgccttcagagaaaaaaagaaatcacatctgtttttgtctgcctttattcttcattcaacagcaggtttttttaattccaaggagaaggatgtctgccgtgtatttctgtttcatggtgaaagctcagaagtggtcaaaggagacctttgtcccggccgtgatcacccttggctctttggtggtggtccgagggctctgtaagaccatattagccaagtctttagcccccgcttgaagtctgtgggggcaaggaacccagaacccagcccagc

SEQ ID NO: 446551 - DNA, 513 bp, Homo sapiens
aagctcagaagtggtcaaaggagacctttgtcccggccgtgatcacccttggctctttggtggtggtccgagggctctgtaagaccatattagccaagtctttagcccccgcttgaagtctgtgggggcaaggaacccagaacccagcccagccagatgttctggcccttgttctctgtcccttgctagcccctgcctggcttggcccattatctgctctgtgctttgcaggaaggaggagacagttactgtctatcccgcagacgtggtgctctttgaagggatcctggccttctactcccaggaggtacgagacctgttccagatgaagctttttgtggatacagatgcggacacccggctctcacgcagaggtgcgttctaaaagcctcaggtggccctgttggtggccaccttgagggcgggggagctgggagcctgtgacaggaccccacccgcctgagtctgaagcccatgccttccctgaggcagctgtgtgtcgcatggtccagc

SEQ ID NO: 446552 - DNA, 1366 bp, Homo sapiens
ctcgccgcctccgcctcggcgaatagcagcgcgctgcccgcccggattggagcagcagcatcacgctgacctctgcctgggatgtaaaccggaccagccgctgcgggcaaaggaaggctcttggctccttcgggaaacccagccccgtcaccgggctccgagcggctcgcaggcgagcgacagcggcctcagccccggcagcgcccagcggcggctgcggaaagcggagggagtccgacgcgggcgcgggcggggagcgtgcgtccgttcgcacaggcagcgggaggaggggcggcgcgaaccatggccggggacagcgagcagaccctgcagaaccaccagcagcccaacggcggcgagcccttccttataggcgtcagcgggggaacagctagcggcaagtcttccgtgtgtgctaagatcgtgcagctcctggggcagaatgaggtggactatcgccagaagcaggtggtcatcctgagccaggatagcttctaccgtgtccttacctcggagcagaaggccaaagccctgaagggccagttcaactttgaccacccggatgcctttgacaatgaactcattctcaaaacactcaaagaaatcactgaagggaaaacagtccagatccccgtgtatgactttgtctcccattcccggaaggaggagacagttactgtctatcccgcagacgtggtgctctttgaagggatcctggccttctactcccaggaggtacgagacctgttccagatgaagctttttgtggatacagatgcggacacccggctctcacgcagagtattaagggacatcagcgagagaggcagggatcttgagcagattttatctcagtacattacgttcgtcaagcctgcctttgaggaattctgcttgccaacaaagaagtatgctgatgtgatcatccctagaggtgcagataatctggtggccatcaacctcatcgtgcagcacatccaggacatcctgaatggagggccctccaaacggcagaccaatggctgtctcaacggctacaccccttcacgcaagaggcaggcatcggagtccagcagcaggccgcattgacccgtctccatcggaccccagcccctatctccaagagacagaggaggggtcaggaggcactgctcatctgtacatactgtttcctatgacattactgtatttaagaaaacaccatggagatgaaatgcctttgattttttttttctttttgtactttggaacgacaaaatgaaacagaacttgaccctgagcttaaataacaaaactgtgccaactactactggtgatgcctaattatgaatccaacgtgtaaccagttataaatacatatatatat

SEQ ID NO: 446553 - DNA, 437 bp, Homo sapiens
cttgcagattccttccttcaaacaaggcttgtctgtgtgactccgcattcagcctcacctcctgtgttcactccagctccctgcctgggtctgggcaagtccctacctgagcatcctgtcatgctttgctacctggcgtgtcactgactttgaggaattctgcttgccaacaaagaagtatgctgatgtgatcatccctagaggtgcagataatctggtggccatcaacctcatcgtgcagcacatccaggacatcctgaatggagggccctccgggccattcaacgcctccgggccattcaacgcctccgggccattcaacgcctccgggccattcaacgcctccgggccattcaacgcctccgggccattcaacgcctccgggccattcaacgcctccggccattcaaggggatcctgctagagcgaccggcagc

SEQ ID NO: 446554 - DNA, 4312 bp, Homo sapiens
  misc_feature (4236)..(4236): n is a, c, g, or t
ctcgccgcctccgcctcggcgaatagcagcgcgctgcccgcccggattggagcagcagcatcacgctgacctctgcctgggatgtaaaccggaccagccgctgcgggcaaaggaaggctcttggctccttcgggaaacccagccccgtcaccgggctccgagcggctcgcaggcgagcgacagcggcctcagccccggcagcgcccagcggcggctgcggaaagcggagggagtccgacgcgggcgcgggcggggagcgtgcgtccgttcgcacaggcagcgggaggaggggcggcgcgaaccatggccggggacagcgagcagaccctgcagaaccaccagcagcccaacggcggcgagcccttccttataggcgtcagcgggggaacagctagcggcaagtcttccgtgtgtgctaagatcgtgcagctcctggggcagaatgaggtggactatcgccagaagcaggtggtcatcctgagccaggatagcttctaccgtgtccttacctcggagcagaaggccaaagccctgaagggccagttcaactttgaccacccggatgcctttgacaatgaactcattctcaaaacactcaaagaaatcactgaagggaaaacagtccagatccccgtgtatgactttgtctcccattcccggaaggaggagacagttactgtctatcccgcagacgtggtgctctttgaagggatcctggccttctactcccaggaggtacgagacctgttccagatgaagctttttgtggatacagatgcggacacccggctctcacgcagagtattaagggacatcagcgagagaggcagggatcttgagcagattttatctcagtacattacgttcgtcaagcctgcctttgaggaattctgcttgccaacaaagaagtatgctgatgtgatcatccctagaggtgcagataatctggtggccatcaacctcatcgtgcagcacatccaggacatcctgaatggagggccctccaaacggcagaccaatggctgtctcaacggctacaccccttcacgcaagaggcaggcatcggagtccagcagcaggccgcattgacccgtctccatcggaccccagcccctatctccaagagacagaggaggggtcaggaggcactgctcatctgtacatactgtttcctatgacattactgtatttaagaaaacaccatggagatgaaatgcctttgattttttttttctttttgtactttggaacgacaaaatgaaacagaacttgaccctgagcttaaataacaaaactgtgccaactactactggtgatgcctaattatgaatccaacgtgtaaccagttataaatacatatatatataaaaaaggatctatttttgtgtaaatgtacaaatactgtaaagctgttgccataagtattttgcaggagggtctgtacttgagtgttttaggactggagctggaatttcaccaaggggaaattgcctgttgtgtcccagggtggggaggctcgggcatctgtgagagacagggagggtggctaaggtccagttgcttttgagtgccccgtggaacttgatgggaatggggttggaacaccttgattgcctcctctgtcacatgccactcttggagctggagcttagtgatatgtcaatgagagatactcttgtcttttttttttttcttttcttttttttttggagttgaaattaggtaaaatctcaactcaaaaatcaaactcagggaagaggcccactgaggagaacaagtcttctgcattttcttcctgccctgctcccaccttctcgcctctggctgcttggatagctgtggtgactccttcctcaccctcctgcttctctgtctctccaagaagccagagctgcctctttccttccctggaagagattttatggggatcgcttcctgatagaagatgggaaggagagggcagaactttgcctgctgtcatatctgaagaatcacgggttctttctgcatcccaggggcgtaactgatctgactcctggggcttttcctgtatggtggaatatagaggggaccattgcaggctgggtgtgggtgagggcttcggtaactgatgccggcagcagcgcctcatggagtggcaggggagctctgtctgtggaggggtagtagtttccgcttcctggaggtttgcagtgaggtgaggagagtaactttggtcagggattctcactagcagcgtcatggccaggatgctttacttatttgcaataccacctagtggatatggcaactgcagagcataaaaggggctcggaaaagcagtttttacaaagtatttaaaaggagagtatttaaatcataggtacctaagttggagcctgaggttgaaatatttggggtggagatttctagctttcctgagagctgctgcttggtggtagtgttttctctggaagtacagattcctgacattctgggtggaggggagcccaagtgagcctgaaggagttctgattatagagtcccgagcctcagtttctgactgcagaagagccagagatgttcatttcattgttgaccaccctagtgcttggtggactgtgcccttagctatcccaccatttggccaactctgtatctgaacttgagctttctatggaacaaacaatggtcttagttttttaagagcctctgggtctctgattccatggagagtcaggagtagaattagtggaccagaaaccatgacatttgccatctaggtactctgctgttcagggtggaggcacagatgagcagagtggggtgatgttggttgtatgtgcatagaagtcccctggctccagagccatccagtggtgcttggttctctcttcctgcccaggtattgtgtgtggaccaagtgtttaggaaacaagcatagaagcattatgtcacaggaaggcctggcctctcactccttcacactaatgagccttctactgacccaagtttctttttctcgggcagcctgggaccactatgagcagagagatgggagtctgtgtaagaaggatgcaagtatcctttgatttggagtggacagagcaggtccttgcaaaggcagtgggttaaacaacgggatgtctgtgggacaggccagggaaggagggcagagacagggtctccagttcaccttgccgcagaactagcctaatcgtccctgcttctggtcttggccacttggcaatcatggggaagttgactccccgcctcacttgggcttggagctggatactcgtggccacgcccaggataggttgccagagtttcattaggccgctgggtcgggctggaggcttgtgtacacctcggagcagtcgggcagcaggagggccggaagcctggttggtttgtatatgacctctcttgcccttgtgcactttccttgatttagcaaccttgacctgcactggccctcacagctgttggagggaagtagcctcttgcagggaaatattttcccctgccctggaatctcctatgtgcctgttaaagattccagggccaagaactcggcaggctgaggagcagctaggtaggtgggttatgcggttcaggactgcttctggaagggactgcctgtacttctgtaccaccgttgccctttacactttgctcagggcggggtgggggaagcattcaaacaaaacaaggaagggaactgtctggcaaagcataagtggatgcatccagagctcagtcccctttaatcttttgtctctgggcgttctgctgccttcctcataccggggactggcattccaggtcagcttggctgtggtcttagaggcagggagtgcctacccagtcctgcctcaggagcagggtgagtagctaaatacagacttaggcttttttttccccccttttaagatgcttgctcctctcccttttctttttaccaccctacctttattgttagtggttacaaagtgaccacatattatgtactttgctgtaaataaagacagacaaaaaggcaaaaaaaaaaaaaaaaaaaaaaaaaactgggggggaccaagagggggggggggaaaaagggcgatcgaacggggccacggcccaacagcggtcccggacccagtttccgggtccaagggggaaaaccggggggctcccccaataggggggagaggggaaaaaattgcgaaaagcgcgggcttaccgctagatgtgttcacacaaacacacacngacaacacaaaacgacggaccagaaagaacgaggggggacaacaactccaaaaacagaggggcgaaaacagataga

SEQ ID NO: 446555 - DNA, 4608 bp, Homo sapiens
  misc_feature (4532)..(4532): n is a, c, g, or t
ctcgccgcctccgcctcggcgaatagcagcgcgctgcccgcccggattggagcagcagcatcacgctgacctctgcctgggatgtaaaccggaccagccgctgcgggcaaaggaaggctcttggctccttcgggaaacccagccccgtcaccgggctccgagcggctcgcaggcgagcgacagcggcctcagccccggcagcgcccagcggcggctgcggaaagcggagggagtccgacgcgggcgcgggcggggagcgtgcgtccgttcgcacaggcagcgggaggaggggcggcgcgaaccatggccggggacagcgagcagaccctgcagaaccaccagcagcccaacggcggcgagcccttccttataggcgtcagcgggggaacagctagcggcaagtcttccgtgtgtgctaagatcgtgcagctcctggggcagaatgaggtggactatcgccagaagcaggtggtcatcctgagccaggatagcttctaccgtgtccttacctcggagcagaaggccaaagccctgaagggccagttcaactttgaccacccggatgcctttgacaatgaactcattctcaaaacactcaaagaaatcactgaagggaaaacagtccagatccccgtgtatgactttgtctcccattcccggaaggaggagacagttactgtctatcccgcagacgtggtgctctttgaagggatcctggccttctactcccaggaggtacgagacctgttccagatgaagctttttgtggatacagatgcggacacccggctctcacgcagagtattaagggacatcagcgagagaggcagggatcttgagcagattttatctcagtacattacgttcgtcaagcctgcctttgaggaattctgcttgccaacaaagaagtatgctgatgtgatcatccctagaggtgcagataatctggtggccatcaacctcatcgtgcagcacatccaggacatcctgaatggagggccctccaaacggcagaccaatggctgtctcaacggctacaccccttcacgcaagaggcaggcatcggagtccagcagcaggccgcattgacccgtctccatcggaccccagcccctatctccaagagacagaggaggggtcaggaggcactgctcatctgtacatactgtttcctatgacattactgtatttaagaaaacaccatggagatgaaatgcctttgattttttttttctttttgtactttggaacgacaaaatgaaacagaacttgaccctgagcttaaataacaaaactgtgccaactactactggtgatgcctaattatgaatccaacgtgtaaccagttataaatacatatatatataaaaaaggatctatttttgtgtaaatgtacaaatactgtaaagctgttgccataagtattttgcaggagggtctgtacttgagtgttttaggactggagctggaatttcaccaaggggaaattgcctgttgtgtcccagggtggggaggctcgggcatctgtgagagacagggagggtggctaaggtccagttgcttttgagtgccccgtggaacttgatgggaatggggttggaacaccttgattgcctcctctgtcacatgccactcttggagctggagcttagtgatatgtcaatgagagatactcttgtcttttttttttttcttttcttttttttttggagttgaaattaggtaaaatctcaactcaaaaatcaaactcagggaagaggcccactgaggagaacaagtcttctgcattttcttcctgccctgctcccaccttctcgcctctggctgcttggatagctgtggtgactccttcctcaccctcctgcttctctgtctctccaagaagccagagctgcctctttccttccctggaagagattttatggggatcgcttcctgatagaagatgggaaggagagggcagaactttgcctgctgtcatatctgaagaatcacgggttctttctgcatcccaggggcgtaactgatctgactcctggggcttttcctgtatggtggaatatagaggggaccattgcaggctgggtgtgggtgagggcttcggtaactgatgccggcagcagcgcctcatggagtggcaggggagctctgtctgtggaggggtagtagtttccgcttcctggaggtttgcagtgaggtgaggagagtaactttggtcagggattctcactagcagcgtcatggccaggatgctttacttatttgcaataccacctagtggatatggcaactgcagagcataaaaggggctcggaaaagcagtttttacaaagtatttaaaaggagagtatttaaatcataggtacctaagttggagcctgaggttgaaatatttggggtggagatttctagctttcctgagagctgctgcttggtggtagtgttttctctggaagtacagattcctgacattctgggtggaggggagcccaagtgagcctgaaggagttctgattatagagtcccgagcctcagtttctgactgcagaagagccagagatgttcatttcattgttgaccaccctagtgcttggtggactgtgcccttagctatcccactgtggctgccattgccagaaacattttggagaaccttttcttcccattgctctcagagcctgttcgagccattcaggtaaattggtctccattattacctggtcacaccagattttcccccagactcagcaccatccagtctgattccccgtttctgggctcagtttgactctaaatctgttttgctattttaaaaagtcaaacctggtccccagcagagcttgccacccggagactttcaggagaccgtgcaggctctgaagggagctcccagtcacagcagccgcctacttggagcaagggaaggctcccaagatgcctcctttgaaagccggtgctcaccaagatcagttcaggatcaatcattatccttgtagtcatgccttgatcagttctgagatgaagcagggaatgcaggcctgggttagcatcctgaggacacagggcccctggccttgatggcactgggccgtgctcaggtgaagcccacccgtgtctgggagagccttggcttttcagtgggcagcatgctcaactttacttgaagctcccaggtgccaaaccatttagtgccttggctgtttatcccactgccttggaagatggactcctctcatctctgagcctttacctagctgcttcctcatctacctgtggtgttgggaccaagcctccaatatctctgaatagcccactcctagcttggaaacagctataagggctgccctgccccttgtcaaatgatcaccaattcttggtggcttggctggggacaatgaacagtgtctgctggggtctgtgacacactgtttctggaacaaggaagggatggaaggctctacccctccgtggcagcccagcatttggccaactctgtatctgaacttgagctttctatggaacaaacaatggtcttagttttttaagagcctctgggtctctgattccatggagagtcaggagtagaattagtggaccagaaaccatgacatttgccatctaggtactctgctgttcagggtggaggcacagatgagcagagtggggtgatgttggttgtatgtgcatagaagtcccctggctccagagccatccagtggtgcttggttctctcttcctgcccaggtattgtgtgtggaccaagtgtttaggaaacaagcatagaagcattatgtcacaggaaggcctggcctctcactccttcacactaatgagccttctactgacccaagtttctttttctcgggcagctaggtaggtgggttatgcggttcaggactgcttctggaagggactgcctgtacttctgtaccaccgttgccctttacactttgctcagggcggggtgggggaagcattcaaacaaaacaaggaagggaactgtctggcaaagcataagtggatgcatccagagctcagtcccctttaatcttttgtctctgggcgttctgctgccttcctcataccggggactggcattccaggtcagcttggctgtggtcttagaggcagggagtgcctacccagtcctgcctcaggagcagggtgagtagctaaatacagacttaggcttttttttccccccttttaagatgcttgctcctctcccttttctttttaccaccctacctttattgttagtggttacaaagtgaccacatattatgtactttgctgtaaataaagacagacaaaaaggcaaaaaaaaaaaaaaaaaaaaaaaaaactgggggggaccaagagggggggggggaaaaagggcgatcgaacggggccacggcccaacagcggtcccggacccagtttccgggtccaagggggaaaaccggggggctcccccaataggggggagaggggaaaaaattgcgaaaagcgcgggcttaccgctagatgtgttcacacaaacacacacngacaacacaaaacgacggaccagaaagaacgaggggggacaacaactccaaaaacagaggggcgaaaacagataga

SEQ ID NO: 446556 - DNA, 4592 bp, Homo sapiens
  misc_feature (4516)..(4516): n is a, c, g, or t
tgtggccactttgttggtttggggtagagccagaccagacagacgtcgggattctgtacttcctcacaaatgctttctcgaaggaggagacagttactgtctatcccgcagacgtggtgctctttgaagggatcctggccttctactcccaggaggtacgagacctgttccagatgaagctttttgtggatacagatgcggacacccggctctcacgcagagtattaagggacatcagcgagagaggcagggatcttgagcagattttatctcagtacattacgttcgtcaagcctgcctttgaggaattctgcttgccaacaaagaagtatgctgatgtgatcatccctagaggtgcagataatctggtggccatcaacctcatcgtgcagcacatccaggacatcctgaatggagggccctccaaacggcagaccaatggctgtctcaacggctacaccccttcacgcaagaggcaggcatcggagtccagcagcaggccgcattgacccgtctccatcggaccccagcccctatctccaagagacagaggaggggtcaggaggcactgctcatctgtacatactgtttcctatgacattactgtatttaagaaaacaccatggagatgaaatgcctttgattttttttttctttttgtactttggaacgacaaaatgaaacagaacttgaccctgagcttaaataacaaaactgtgccaactactactggtgatgcctaattatgaatccaacgtgtaaccagttataaatacatatatatataaaaaaggatctatttttgtgtaaatgtacaaatactgtaaagctgttgccataagtattttgcaggagggtctgtacttgagtgttttaggactggagctggaatttcaccaaggggaaattgcctgttgtgtcccagggtggggaggctcgggcatctgtgagagacagggagggtggctaaggtccagttgcttttgagtgccccgtggaacttgatgggaatggggttggaacaccttgattgcctcctctgtcacatgccactcttggagctggagcttagtgatatgtcaatgagagatactcttgtcttttttttttttcttttcttttttttttggagttgaaattaggtaaaatctcaactcaaaaatcaaactcagggaagaggcccactgaggagaacaagtcttctgcattttcttcctgccctgctcccaccttctcgcctctggctgcttggatagctgtggtgactccttcctcaccctcctgcttctctgtctctccaagaagccagagctgcctctttccttccctggaagagattttatggggatcgcttcctgatagaagatgggaaggagagggcagaactttgcctgctgtcatatctgaagaatcacgggttctttctgcatcccaggggcgtaactgatctgactcctggggcttttcctgtatggtggaatatagaggggaccattgcaggctgggtgtgggtgagggcttcggtaactgatgccggcagcagcgcctcatggagtggcaggggagctctgtctgtggaggggtagtagtttccgcttcctggaggtttgcagtgaggtgaggagagtaactttggtcagggattctcactagcagcgtcatggccaggatgctttacttatttgcaataccacctagtggatatggcaactgcagagcataaaaggggctcggaaaagcagtttttacaaagtatttaaaaggagagtatttaaatcataggtacctaagttggagcctgaggttgaaatatttggggtggagatttctagctttcctgagagctgctgcttggtggtagtgttttctctggaagtacagattcctgacattctgggtggaggggagcccaagtgagcctgaaggagttctgattatagagtcccgagcctcagtttctgactgcagaagagccagagatgttcatttcattgttgaccaccctagtgcttggtggactgtgcccttagctatcccactgtggctgccattgccagaaacattttggagaaccttttcttcccattgctctcagagcctgttcgagccattcaggtaaattggtctccattattacctggtcacaccagattttcccccagactcagcaccatccagtctgattccccgtttctgggctcagtttgactctaaatctgttttgctattttaaaaagtcaaacctggtccccagcagagcttgccacccggagactttcaggagaccgtgcaggctctgaagggagctcccagtcacagcagccgcctacttggagcaagggaaggctcccaagatgcctcctttgaaagccggtgctcaccaagatcagttcaggatcaatcattatccttgtagtcatgccttgatcagttctgagatgaagcagggaatgcaggcctgggttagcatcctgaggacacagggcccctggccttgatggcactgggccgtgctcaggtgaagcccacccgtgtctgggagagccttggcttttcagtgggcagcatgctcaactttacttgaagctcccaggtgccaaaccatttagtgccttggctgtttatcccactgccttggaagatggactcctctcatctctgagcctttacctagctgcttcctcatctacctgtggtgttgggaccaagcctccaatatctctgaatagcccactcctagcttggaaacagctataagggctgccctgccccttgtcaaatgatcaccaattcttggtggcttggctggggacaatgaacagtgtctgctggggtctgtgacacactgtttctggaacaaggaagggatggaaggctctacccctccgtggcagcccagcatttggccaactctgtatctgaacttgagctttctatggaacaaacaatggtcttagttttttaagagcctctgggtctctgattccatggagagtcaggagtagaattagtggaccagaaaccatgacatttgccatctaggtactctgctgttcagggtggaggcacagatgagcagagtggggtgatgttggttgtatgtgcatagaagtcccctggctccagagccatccagtggtgcttggttctctcttcctgcccaggtattgtgtgtggaccaagtgtttaggaaacaagcatagaagcattatgtcacaggaaggcctggcctctcactccttcacactaatgagccttctactgacccaagtttctttttctcgggcagcctgggaccactatgagcagagagatgggagtctgtgtaagaaggatgcaagtatcctttgatttggagtggacagagcaggtccttgcaaaggcagtgggttaaacaacgggatgtctgtgggacaggccagggaaggagggcagagacagggtctccagttcaccttgccgcagaactagcctaatcgtccctgcttctggtcttggccacttggcaatcatggggaagttgactccccgcctcacttgggcttggagctggatactcgtggccacgcccaggataggttgccagagtttcattaggccgctgggtcgggctggaggcttgtgtacacctcggagcagtcgggcagcaggagggccggaagcctggttggtttgtatatgacctctcttgcccttgtgcactttccttgatttagcaaccttgacctgcactggccctcacagctgttggagggaagtagcctcttgcagggaaatattttcccctgccctggaatctcctatgtgcctgttaaagattccagggccaagaactcggcaggctgaggagcagctaggtaggtgggttatgcggttcaggactgcttctggaagggactgcctgtacttctgtaccaccgttgccctttacactttgctcagggcggggtgggggaagcattcaaacaaaacaaggaagggaactgtctggcaaagcataagtggatgcatccagagctcagtcccctttaatcttttgtctctgggcgttctgctgccttcctcataccggggactggcattccaggtcagcttggctgtggtcttagaggcagggagtgcctacccagtcctgcctcaggagcagggtgagtagctaaatacagacttaggcttttttttccccccttttaagatgcttgctcctctcccttttctttttaccaccctacctttattgttagtggttacaaagtgaccacatattatgtactttgctgtaaataaagacagacaaaaaggcaaaaaaaaaaaaaaaaaaaaaaaaaactgggggggaccaagagggggggggggaaaaagggcgatcgaacggggccacggcccaacagcggtcccggacccagtttccgggtccaagggggaaaaccggggggctcccccaataggggggagaggggaaaaaattgcgaaaagcgcgggcttaccgctagatgtgttcacacaaacacacacngacaacacaaaacgacggaccagaaagaacgaggggggacaacaactccaaaaacagaggggcgaaaacagataga

SEQ ID NO: 446557 - DNA, 4374 bp, Homo sapiens
  misc_feature (4298)..(4298): n is a, c, g, or t
tctgagaccgggaggaagggaaggaagagcttgggacttaacctggtcttggttgagatacactgggaaggctggaatctctgaagacattgaagatttagaacaaagaagtatgctgatgtgatcatccctagaggtgcagataatctggtggccatcaacctcatcgtgcagcacatccaggacatcctgaatggagggccctccaaacggcagaccaatggctgtctcaacggctacaccccttcacgcaagaggcaggcatcggagtccagcagcaggccgcattgacccgtctccatcggaccccagcccctatctccaagagacagaggaggggtcaggaggcactgctcatctgtacatactgtttcctatgacattactgtatttaagaaaacaccatggagatgaaatgcctttgattttttttttctttttgtactttggaacgacaaaatgaaacagaacttgaccctgagcttaaataacaaaactgtgccaactactactggtgatgcctaattatgaatccaacgtgtaaccagttataaatacatatatatataaaaaaggatctatttttgtgtaaatgtacaaatactgtaaagctgttgccataagtattttgcaggagggtctgtacttgagtgttttaggactggagctggaatttcaccaaggggaaattgcctgttgtgtcccagggtggggaggctcgggcatctgtgagagacagggagggtggctaaggtccagttgcttttgagtgccccgtggaacttgatgggaatggggttggaacaccttgattgcctcctctgtcacatgccactcttggagctggagcttagtgatatgtcaatgagagatactcttgtcttttttttttttcttttcttttttttttggagttgaaattaggtaaaatctcaactcaaaaatcaaactcagggaagaggcccactgaggagaacaagtcttctgcattttcttcctgccctgctcccaccttctcgcctctggctgcttggatagctgtggtgactccttcctcaccctcctgcttctctgtctctccaagaagccagagctgcctctttccttccctggaagagattttatggggatcgcttcctgatagaagatgggaaggagagggcagaactttgcctgctgtcatatctgaagaatcacgggttctttctgcatcccaggggcgtaactgatctgactcctggggcttttcctgtatggtggaatatagaggggaccattgcaggctgggtgtgggtgagggcttcggtaactgatgccggcagcagcgcctcatggagtggcaggggagctctgtctgtggaggggtagtagtttccgcttcctggaggtttgcagtgaggtgaggagagtaactttggtcagggattctcactagcagcgtcatggccaggatgctttacttatttgcaataccacctagtggatatggcaactgcagagcataaaaggggctcggaaaagcagtttttacaaagtatttaaaaggagagtatttaaatcataggtacctaagttggagcctgaggttgaaatatttggggtggagatttctagctttcctgagagctgctgcttggtggtagtgttttctctggaagtacagattcctgacattctgggtggaggggagcccaagtgagcctgaaggagttctgattatagagtcccgagcctcagtttctgactgcagaagagccagagatgttcatttcattgttgaccaccctagtgcttggtggactgtgcccttagctatcccactgtggctgccattgccagaaacattttggagaaccttttcttcccattgctctcagagcctgttcgagccattcaggtaaattggtctccattattacctggtcacaccagattttcccccagactcagcaccatccagtctgattccccgtttctgggctcagtttgactctaaatctgttttgctattttaaaaagtcaaacctggtccccagcagagcttgccacccggagactttcaggagaccgtgcaggctctgaagggagctcccagtcacagcagccgcctacttggagcaagggaaggctcccaagatgcctcctttgaaagccggtgctcaccaagatcagttcaggatcaatcattatccttgtagtcatgccttgatcagttctgagatgaagcagggaatgcaggcctgggttagcatcctgaggacacagggcccctggccttgatggcactgggccgtgctcaggtgaagcccacccgtgtctgggagagccttggcttttcagtgggcagcatgctcaactttacttgaagctcccaggtgccaaaccatttagtgccttggctgtttatcccactgccttggaagatggactcctctcatctctgagcctttacctagctgcttcctcatctacctgtggtgttgggaccaagcctccaatatctctgaatagcccactcctagcttggaaacagctataagggctgccctgccccttgtcaaatgatcaccaattcttggtggcttggctggggacaatgaacagtgtctgctggggtctgtgacacactgtttctggaacaaggaagggatggaaggctctacccctccgtggcagcccagcatttggccaactctgtatctgaacttgagctttctatggaacaaacaatggtcttagttttttaagagcctctgggtctctgattccatggagagtcaggagtagaattagtggaccagaaaccatgacatttgccatctaggtactctgctgttcagggtggaggcacagatgagcagagtggggtgatgttggttgtatgtgcatagaagtcccctggctccagagccatccagtggtgcttggttctctcttcctgcccaggtattgtgtgtggaccaagtgtttaggaaacaagcatagaagcattatgtcacaggaaggcctggcctctcactccttcacactaatgagccttctactgacccaagtttctttttctcgggcagcctgggaccactatgagcagagagatgggagtctgtgtaagaaggatgcaagtatcctttgatttggagtggacagagcaggtccttgcaaaggcagtgggttaaacaacgggatgtctgtgggacaggccagggaaggagggcagagacagggtctccagttcaccttgccgcagaactagcctaatcgtccctgcttctggtcttggccacttggcaatcatggggaagttgactccccgcctcacttgggcttggagctggatactcgtggccacgcccaggataggttgccagagtttcattaggccgctgggtcgggctggaggcttgtgtacacctcggagcagtcgggcagcaggagggccggaagcctggttggtttgtatatgacctctcttgcccttgtgcactttccttgatttagcaaccttgacctgcactggccctcacagctgttggagggaagtagcctcttgcagggaaatattttcccctgccctggaatctcctatgtgcctgttaaagattccagggccaagaactcggcaggctgaggagcagctaggtaggtgggttatgcggttcaggactgcttctggaagggactgcctgtacttctgtaccaccgttgccctttacactttgctcagggcggggtgggggaagcattcaaacaaaacaaggaagggaactgtctggcaaagcataagtggatgcatccagagctcagtcccctttaatcttttgtctctgggcgttctgctgccttcctcataccggggactggcattccaggtcagcttggctgtggtcttagaggcagggagtgcctacccagtcctgcctcaggagcagggtgagtagctaaatacagacttaggcttttttttccccccttttaagatgcttgctcctctcccttttctttttaccaccctacctttattgttagtggttacaaagtgaccacatattatgtactttgctgtaaataaagacagacaaaaaggcaaaaaaaaaaaaaaaaaaaaaaaaaactgggggggaccaagagggggggggggaaaaagggcgatcgaacggggccacggcccaacagcggtcccggacccagtttccgggtccaagggggaaaaccggggggctcccccaataggggggagaggggaaaaaattgcgaaaagcgcgggcttaccgctagatgtgttcacacaaacacacacngacaacacaaaacgacggaccagaaagaacgaggggggacaacaactccaaaaacagaggggcgaaaacagataga

SEQ ID NO: 446558 - DNA, 666 bp, Homo sapiens
tgtggccactttgttggtttggggtagagccagaccagacagacgtcgggattctgtacttcctcacaaatgctttctcgtctgtatcctctttcccaaaacttttctttattttccctccttcccttccccttctgtcctttcctccctcctttcaattgcctcaggactggcggggaggggatggagttgttgagagaaaactgtgagtttctgtttttaaagttcagagtgttaggttccataaatgccaggccatgagagcattcctggagacgccttcagagaaaaaaagaaatcacatctgtttttgtctgcctttattcttcattcaacagcaggtttttttaattccaaggagaaggatgtctgccgtgtatttctgtttcatggtgaaagctcagaagtggtcaaaggagacctttgtcccggccgtgatcacccttggctctttggtggtggtccgagggctctgaattcgaggttcccgcgctcccacggtgttgagctgctctgtcagggaggcactgccctcccaacgcgtcctcaggttctgttgtggtcgtaatcatcatagaacacatgcttattgaacatgtgctaaggtgccagctatggtgctgaagagttttatgcacatctctgtattcctgaatagtaactgta

SEQ ID NO: 446559 - DNA, 3520 bp, Homo sapiens
  misc_feature (1314)..(1314): n is a, c, g, or t
  misc_feature (1319)..(1319): n is a, c, g, or t
  misc_feature (1561)..(1561): n is a, c, g, or t
  misc_feature (1588)..(1588): n is a, c, g, or t
  misc_feature (1602)..(1602): n is a, c, g, or t
  misc_feature (1649)..(1649): n is a, c, g, or t
  misc_feature (1678)..(1678): n is a, c, g, or t
  misc_feature (1768)..(1768): n is a, c, g, or t
  misc_feature (2340)..(2340): n is a, c, g, or t
  misc_feature (2423)..(2423): n is a, c, g, or t
  misc_feature (2479)..(2479): n is a, c, g, or t
  misc_feature (2506)..(2506): n is a, c, g, or t
  misc_feature (2576)..(2576): n is a, c, g, or t
ggtcgacggggtcctggagccgcgctcggggagggcgcggcggagggcgagcggcggcgttaggacccggaggcgcgggcggactgtgggcggcggggctaggacccagcggctccggcagagcggaagcggcggcgggagcttccgggagggcggctcgcaggcaccatgactcctgtgaggatgcagcactccctggcaggtcagacctatgccgtgcccctcatccagccagacctgcggcgagaggaggccgtccagcagatggcggatgccctgcagtacctgcagaaggtctctggagacatcttcagcaggatctcccagcgggtagagcagagccggagccaggtgcaggccattggagagaaggtctccttggcccaggccaagattgagaagatcaagggcagcaagaaggccatcaaggtgttctccagtgccaagtaccctgctccagagcgcctgcaggaatatggctccatcttcacgggcgcccaggaccctggcctgcagagacgcccccgccacaggatccagagcaagcaccgccccctggacgagcgggccctgcaggagaagctgaaggactttcctgtgtgcgtgagcaccaagccggagcccgaggacgatgcagaagagggacttgggggtcttcccagcaacatcagctctgtcagctccttgctgctcttcaacaccaccgagaacctgtatggccagaaggcagggccgaggggtgtgggcgggaggcccggcctggcttagtggggacccagggcatcagacacaggtacagcacataggccaggagccagggggtgactggggtggctcggctcgggaggcctgggaccccacagtgcacgctgtgcccctgatgatgtgggagaggaacatgggctcaggacagcgggtgtcagcttgcctgacccccatgtcgcctccgtaggtacaagaagtatgtcttcctggaccccctggctggtgctgtaacaaagacccatgtgatgctgggggcagagacagaggagaagctgtttgatgcccccttgtccatcagcaagagagagcagctggaacagcaggtcccagagaactacttctatgtgccagacctgggccaggtgcctgagattgatgttccgtcctacctgcctgacctgcccggcattgccaacgacctcatgtacagtgccgacctgggccccggcattgccccctctgcccctggcaccattccggaactgcccaccttccacactgaggtagccgagcctctcaaggcagacctacaagatggggtactaacancaccnccaccgcccccaccaccacccccagctcctgaggtgctggccagtgcatccccactcccaccctcaaccgcggcccctgtaggccaaggcgccaggcaggacgacagcagcagcagcgcgtctccttcaggtgggagcagctctttgaggccacctgatttctggcgtgctcagtgcactcgggtggattttctgtgggtttgttaagtggtcagaaattctcaattttttgaatagtttcnatttcaaatatcttgttctacttggtncataaaatagtggntttcaaactgtagagctctggacttctcacttctagggcagagggancctgaacaagtgaggctctgggttccccnttcctaattaaaccaatggaaagaaggggtctaataacaaactacagcaacacatttttcatttcagcttcactgctgtatctcccagtntaaccctagcatccagaagtggcacaaaacccctctgctggctcatgtgtgcaactgagactgtcagagcatggctagctctggggtccagctctgcagggtgggggctagagaggaagcagggagtatctgcacacaggatgcccgcgctcaggtggttgcagaagtcagtgcccaggcccccccacacagtctccaaaggtccggcctccccagcgcggggctcctcgtttgaggggaggtgacttccctcccagcaggctcttggacacagtaagcttccccagccctgcctgagcagcctttcctccttgccctgttccccacctcccggctccagtccagggagctcccagggaagtggtcgacccctccggtggctgggccactctgctagagtccatccgccaagctgggggcatcggcaaggccaagctgcgcagcatgaaggagcgaaagctggagaagaagaagcagaaggagcaggagcaaggtgagcgggccctggagcctgcggtcggagggccttgggcaagatcgcctcctcccctccagccctgagtccactgggngctttctgcccaccccctgctcttgccagctggcccctgcttcccctagggcacatgctggaagccctgggccgccaccagangtcctcagccctcctgcctgggctatggctccttcctggtttgggagccatagtgnagctttcctctctaagctcacccagcncaaactgtgacaggagaatcttcttcgactgccaagagcggtccaaggcaatggtcagccactgcagccncctgagatatttttagagactggacctgaggcctctggaggctactgatgatgcctgctgtgaacgcagacactggtgtgatgcgatgcctgcgcctgcagcggcagtgccctgggcactatggttttgagcttgtacccagcgctgcttttgccttgctctgtgaccccaggcaagctgcctcacctctctgggccagtttccccatcgtacagtggtgctgcacaccctggccctggcccccgaggtggctgggaggtggctcctcaaacagccgctttctcatcagtgcccggtgctgggtcagggatcgactgaggctctgagctaactaggaaacacagtggccttggagggctggggagtgtcatgggggtggggacagggagccaccggtcgcatgtgactgaactcttcaccccagtctgtggctttcccgttgcagtgagagccacgagccaaggtgggcacttgatgtcggatctcttcaacaagctggtcatgaggcgcaagggcatctctgggaaaggacctggggctggtgaggggcccggaggagcctttgcccgcgtgtcagactccatccctcctgtgcccccaccgcagcagccacaggcagaggaggacgaggacgactgggaatcctagggggctccatgacaccttcccccccagacccagacttgggccgttgctctgacatggacacagccaggacaagctgctcagacctgcttccctgggagggggtgacggaaccagcactgtgtggagaccagcttcaaggagcggaaggctggcttgaggccacacagctggggcggggacttctgtctgcctgtgctccatggggggacggctccacccagcctgcgccactgtgttcttaagaggcttccagagaaaacggcacaccaatcaataaagaactgagcagaaaccaa

SEQ ID NO: 446560 - DNA, 1289 bp, Homo sapiens
  misc_feature (1085)..(1085): n is a, c, g, or t
  misc_feature (1092)..(1092): n is a, c, g, or t
  misc_feature (1099)..(1099): n is a, c, g, or t
ggtcgacggggtcctggagccgcgctcggggagggcgcggcggagggcgagcggcggcgttaggacccggaggcgcgggcggactgtgggcggcggggctaggacccagcggctccggcagagcggaagcggcggcgggagcttccgggagggcggctcgcaggcaccatgactcctgtgaggatgcagcactccctggcaggtcagacctatgccgtgcccctcatccagccagacctgcggcgagaggaggccgtccagcagatggcggatgccctgcagtacctgcagaaggtctctggagacatcttcagcaggatctcccagcgggtagagcagagccggagccaggtgcaggccattggagagaaggtctccttggcccaggccaagattgagaagatcaagggcagcaagaaggccatcaaggtgttctccagtgccaagtaccctgctccagagcgcctgcaggaatatggctccatcttcacgggcgcccaggaccctggcctgcagagacgcccccgccacaggatccagagcaagcaccgccccctggacgagcgggccctgcaggagaagctgaaggactttcctgtgtgcgtgagcaccaagccggagcccgaggacgatgcagaagagggacttgggggtcttcccagcaacatcagctctgtcagctccttgctgctcttcaacaccaccgagaacctgtacaagaagtatgtcttcctggaccccctggctggtgctgtaacaaagacccatgtgatgctgggggcagagacagaggagaagctgtttgatgcccccttgtccatcagcaagagagagcagctggaacagcaggtcccagagaactacttctatgtgccagacctgggccaggtgcctgagattgatgttccgtcctacctgcctgacctgcccggcattgccaacgacctcatgtacagtgccgacctgggccccggcattgccccctctgcccctggcaccattccggaactgcccaccttccacactgaggtagccgagcctctcaaggcagacctacaagatggggtactaacagcaccagcaancgaccancaacggnacgggaggaagacaaggtgcacgcagccatggagaactgccaaggagccaaggacacagtacaggaaacgtcgcgagaccacacaccagagacagcggcagaaagtgacaaaaagctgccggaagaccagaaggcacacacacgaggggagaggcgaacacaaatagaggcaacaggcaaagcgcagcag

SEQ ID NO: 446561 - DNA, 542 bp, Homo sapiens
  misc_feature (44)..(44): n is a, c, g, or t
gtttgtatttttattagagccagggtttccccatgttgctcagnctggtcatgaggcgcaagggcatctctgggaaaggacctggggctggtgaggggcccggaggagcctttgcccgcgtgtcagactccatccctcctgtgcccccaccgcagcagccacaggcagaggaggacgaggacgactgggaatcctagggggctccatgacaccttcccccccagacccagacttgggccgttgctctgacatggacacagccaggacaagctgctcagacctgcttccctgggagggggtgacggaaccagcactgtgtggagaccagcttcaaggagcggaaggctggcttgaggccacacagctggggcggggacttctgtctgcctgtgctccatggggggacggctccacccagcctgcgccactgtgttcttaagaggcttccagagaaaacggcacaccaatcaataaagaactgagcagaaaccaaaacagtgtgcttttaataaaggacctctagctgtgcaggatgcaaacgt

SEQ ID NO: 446562 - DNA, 1862 bp, Homo sapiens
  misc_feature (1075)..(1075): n is a, c, g, or t
  misc_feature (1080)..(1080): n is a, c, g, or t
ggtcgacggggtcctggagccgcgctcggggagggcgcggcggagggcgagcggcggcgttaggacccggaggcgcgggcggactgtgggcggcggggctaggacccagcggctccggcagagcggaagcggcggcgggagcttccgggagggcggctcgcaggcaccatgactcctgtgaggatgcagcactccctggcaggtcagacctatgccgtgcccctcatccagccagacctgcggcgagaggaggccgtccagcagatggcggatgccctgcagtacctgcagaaggtctctggagacatcttcagcaggatctcccagcgggtagagcagagccggagccaggtgcaggccattggagagaaggtctccttggcccaggccaagattgagaagatcaagggcagcaagaaggccatcaaggtgttctccagtgccaagtaccctgctccagagcgcctgcaggaatatggctccatcttcacgggcgcccaggaccctggcctgcagagacgcccccgccacaggatccagagcaagcaccgccccctggacgagcgggccctgcaggagaagctgaaggactttcctgtgtgcgtgagcaccaagccggagcccgaggacgatgcagaagagggacttgggggtcttcccagcaacatcagctctgtcagctccttgctgctcttcaacaccaccgagaacctgtacaagaagtatgtcttcctggaccccctggctggtgctgtaacaaagacccatgtgatgctgggggcagagacagaggagaagctgtttgatgcccccttgtccatcagcaagagagagcagctggaacagcaggtcccagagaactacttctatgtgccagacctgggccaggtgcctgagattgatgttccgtcctacctgcctgacctgcccggcattgccaacgacctcatgtacagtgccgacctgggccccggcattgccccctctgcccctggcaccattccggaactgcccaccttccacactgaggtagccgagcctctcaaggcagacctacaagatggggtactaacancaccnccaccgcccccaccaccacccccagctcctgaggtgctggccagtgcatccccactcccaccctcaaccgcggcccctgtaggccaaggcgccaggcaggacgacagcagcagcagcgcgtctccttcagtccagggagctcccagggaagtggtcgacccctccggtggctgggccactctgctagagtccatccgccaagctgggggcatcggcaaggccaagctgcgcagcatgaaggagcgaaagctggagaagaagaagcagaaggagcaggagcaagtgagagccacgagccaaggtgggcacttgatgtcggatctcttcaacaagctggtcatgaggcgcaagggcatctctgggaaaggacctggggctggtgaggggcccggaggagcctttgcccgcgtgtcagactccatccctcctgtgcccccaccgcagcagccacaggcagaggaggacgaggacgactgggaatcctagggggctccatgacaccttcccccccagacccagacttgggccgttgctctgacatggacacagccaggacaagctgctcagacctgcttccctgggagggggtgacggaaccagcactgtgtggagaccagcttcaaggagcggaaggctggcttgaggccacacagctggggcggggacttctgtctgcctgtgctccatggggggacggctccacccagcctgcgccactgtgttcttaagaggcttccagagaaaacggcacaccaatcaataaagaactgagcagaaaccaa

SEQ ID NO: 446563 - DNA, 2470 bp, Homo sapiens
  misc_feature (1075)..(1075): n is a, c, g, or t
  misc_feature (1080)..(1080): n is a, c, g, or t
  misc_feature (1322)..(1322): n is a, c, g, or t
  misc_feature (1349)..(1349): n is a, c, g, or t
  misc_feature (1363)..(1363): n is a, c, g, or t
  misc_feature (1410)..(1410): n is a, c, g, or t
  misc_feature (1439)..(1439): n is a, c, g, or t
  misc_feature (1529)..(1529): n is a, c, g, or t
ggtcgacggggtcctggagccgcgctcggggagggcgcggcggagggcgagcggcggcgttaggacccggaggcgcgggcggactgtgggcggcggggctaggacccagcggctccggcagagcggaagcggcggcgggagcttccgggagggcggctcgcaggcaccatgactcctgtgaggatgcagcactccctggcaggtcagacctatgccgtgcccctcatccagccagacctgcggcgagaggaggccgtccagcagatggcggatgccctgcagtacctgcagaaggtctctggagacatcttcagcaggatctcccagcgggtagagcagagccggagccaggtgcaggccattggagagaaggtctccttggcccaggccaagattgagaagatcaagggcagcaagaaggccatcaaggtgttctccagtgccaagtaccctgctccagagcgcctgcaggaatatggctccatcttcacgggcgcccaggaccctggcctgcagagacgcccccgccacaggatccagagcaagcaccgccccctggacgagcgggccctgcaggagaagctgaaggactttcctgtgtgcgtgagcaccaagccggagcccgaggacgatgcagaagagggacttgggggtcttcccagcaacatcagctctgtcagctccttgctgctcttcaacaccaccgagaacctgtacaagaagtatgtcttcctggaccccctggctggtgctgtaacaaagacccatgtgatgctgggggcagagacagaggagaagctgtttgatgcccccttgtccatcagcaagagagagcagctggaacagcaggtcccagagaactacttctatgtgccagacctgggccaggtgcctgagattgatgttccgtcctacctgcctgacctgcccggcattgccaacgacctcatgtacagtgccgacctgggccccggcattgccccctctgcccctggcaccattccggaactgcccaccttccacactgaggtagccgagcctctcaaggcagacctacaagatggggtactaacancaccnccaccgcccccaccaccacccccagctcctgaggtgctggccagtgcatccccactcccaccctcaaccgcggcccctgtaggccaaggcgccaggcaggacgacagcagcagcagcgcgtctccttcaggtgggagcagctctttgaggccacctgatttctggcgtgctcagtgcactcgggtggattttctgtgggtttgttaagtggtcagaaattctcaattttttgaatagtttcnatttcaaatatcttgttctacttggtncataaaatagtggntttcaaactgtagagctctggacttctcacttctagggcagagggancctgaacaagtgaggctctgggttccccnttcctaattaaaccaatggaaagaaggggtctaataacaaactacagcaacacatttttcatttcagcttcactgctgtatctcccagtntaaccctagcatccagaagtggcacaaaacccctctgctggctcatgtgtgcaactgagactgtcagagcatggctagctctggggtccagctctgcagggtgggggctagagaggaagcagggagtatctgcacacaggatgcccgcgctcaggtggttgcagaagtcagtgcccaggcccccccacacagtctccaaaggtccggcctccccagcgcggggctcctcgtttgaggggaggtgacttccctcccagcaggctcttggacacagtaagcttccccagccctgcctgagcagcctttcctccttgccctgttccccacctcccggctccagtccagggagctcccagggaagtggtcgacccctccggtggctgggccactctgctagagtccatccgccaagctgggggcatcggcaaggccaagctgcgcagcatgaaggagcgaaagctggagaagaagaagcagaaggagcaggagcaaggtgagcgggccctggagcgcatctctgggaaaggacctggggctggtgaggggcccggaggagcctttgcccgcgtgtcagactccatccctcctgtgcccccaccgcagcagccacaggcagaggaggacgaggacgactgggaatcctagggggctccatgacaccttcccccccagacccagacttgggccgttgctctgacatggacacagccaggacaagctgctcagacctgcttccctgggagggggtgacggaaccagcactgtgtggagaccagcttcaaggagcggaaggctggcttgaggccacacagctggggcggggacttctgtctgcctgtgctccatggggggacggctccacccagcctgcgccactgtgttcttaagaggcttccagagaaaacggcacaccaatcaataaagaactgagcagaaaccaa

SEQ ID NO: 446564 - DNA, 1983 bp, Homo sapiens
  misc_feature (537)..(537): n is a, c, g, or t
  misc_feature (542)..(542): n is a, c, g, or t
  misc_feature (784)..(784): n is a, c, g, or t
  misc_feature (811)..(811): n is a, c, g, or t
  misc_feature (825)..(825): n is a, c, g, or t
  misc_feature (872)..(872): n is a, c, g, or t
  misc_feature (901)..(901): n is a, c, g, or t
  misc_feature (991)..(991): n is a, c, g, or t
accaaatattcaccatcccttggccatcctggccctctgagaagctgaaggactttcctgtgtgcgtgagcaccaagccggagcccgaggacgatgcagaagagggacttgggggtcttcccagcaacatcagctctgtcagctccttgctgctcttcaacaccaccgagaacctgtacaagaagtatgtcttcctggaccccctggctggtgctgtaacaaagacccatgtgatgctgggggcagagacagaggagaagctgtttgatgcccccttgtccatcagcaagagagagcagctggaacagcaggtcccagagaactacttctatgtgccagacctgggccaggtgcctgagattgatgttccgtcctacctgcctgacctgcccggcattgccaacgacctcatgtacagtgccgacctgggccccggcattgccccctctgcccctggcaccattccggaactgcccaccttccacactgaggtagccgagcctctcaaggcagacctacaagatggggtactaacancaccnccaccgcccccaccaccacccccagctcctgaggtgctggccagtgcatccccactcccaccctcaaccgcggcccctgtaggccaaggcgccaggcaggacgacagcagcagcagcgcgtctccttcaggtgggagcagctctttgaggccacctgatttctggcgtgctcagtgcactcgggtggattttctgtgggtttgttaagtggtcagaaattctcaattttttgaatagtttcnatttcaaatatcttgttctacttggtncataaaatagtggntttcaaactgtagagctctggacttctcacttctagggcagagggancctgaacaagtgaggctctgggttccccnttcctaattaaaccaatggaaagaaggggtctaataacaaactacagcaacacatttttcatttcagcttcactgctgtatctcccagtntaaccctagcatccagaagtggcacaaaacccctctgctggctcatgtgtgcaactgagactgtcagagcatggctagctctggggtccagctctgcagggtgggggctagagaggaagcagggagtatctgcacacaggatgcccgcgctcaggtggttgcagaagtcagtgcccaggcccccccacacagtctccaaaggtccggcctccccagcgcggggctcctcgtttgaggggaggtgacttccctcccagcaggctcttggacacagtaagcttccccagccctgcctgagcagcctttcctccttgccctgttccccacctcccggctccagtccagggagctcccagggaagtggtcgacccctccggtggctgggccactctgctagagtccatccgccaagctgggggcatcggcaaggccaagctgcgcagcatgaaggagcgaaagctggagaagaagaagcagaaggagcaggagcaagtgagagccacgagccaaggtgggcacttgatgtcggatctcttcaacaagctggtcatgaggcgcaagggcatctctgggaaaggacctggggctggtgaggggcccggaggagcctttgcccgcgtgtcagactccatccctcctgtgcccccaccgcagcagccacaggcagaggaggacgaggacgactgggaatcctagggggctccatgacaccttcccccccagacccagacttgggccgttgctctgacatggacacagccaggacaagctgctcagacctgcttccctgggagggggtgacggaaccagcactgtgtggagaccagcttcaaggagcggaaggctggcttgaggccacacagctggggcggggacttctgtctgcctgtgctccatggggggacggctccacccagcctgcgccactgtgttcttaagaggcttccagagaaaacggcacaccaatcaataaagaactgagcagaaaccaa

SEQ ID NO: 446565 - DNA, 2248 bp, Homo sapiens
  misc_feature (802)..(802): n is a, c, g, or t
  misc_feature (807)..(807): n is a, c, g, or t
  misc_feature (1049)..(1049): n is a, c, g, or t
  misc_feature (1076)..(1076): n is a, c, g, or t
  misc_feature (1090)..(1090): n is a, c, g, or t
  misc_feature (1137)..(1137): n is a, c, g, or t
  misc_feature (1166)..(1166): n is a, c, g, or t
  misc_feature (1256)..(1256): n is a, c, g, or t
ggtcgacggggtcctggagccgcgctcggggagggcgcggcggagggcgagcggcggcgttaggacccggaggcgcgggcggactgtgggcggcggggctaggacccagcggctccggcagagcggaagcggcggcgggagcttccgggagggcggctcgcaggcaccatgactcctgtgaggatgcagcactccctggcaggtcagacctatgccgtgcccctcatccagccagacctgcggcgagaggaggccgtccagcagatggcggatgccctgcagtacctgcagaaggtctctggagacatcttcagcaggatctcccagcgggtagagcagagccggagccaggtgcaggccattggagagaaggtctccttggcccaggccaagattgagaagatcaagggcagcaagaaggccatcaaggtgttctccagtgccaagtaccctgctccagagcgcctgcaggaatatggctccatcttcacgggcgcccaggaccctggcctgcagagacgcccccgccacaggatccagagcaagcaccgccccctggacgagcgggccctgcaggtcccagagaactacttctatgtgccagacctgggccaggtgcctgagattgatgttccgtcctacctgcctgacctgcccggcattgccaacgacctcatgtacagtgccgacctgggccccggcattgccccctctgcccctggcaccattccggaactgcccaccttccacactgaggtagccgagcctctcaaggcagacctacaagatggggtactaacancaccnccaccgcccccaccaccacccccagctcctgaggtgctggccagtgcatccccactcccaccctcaaccgcggcccctgtaggccaaggcgccaggcaggacgacagcagcagcagcgcgtctccttcaggtgggagcagctctttgaggccacctgatttctggcgtgctcagtgcactcgggtggattttctgtgggtttgttaagtggtcagaaattctcaattttttgaatagtttcnatttcaaatatcttgttctacttggtncataaaatagtggntttcaaactgtagagctctggacttctcacttctagggcagagggancctgaacaagtgaggctctgggttccccnttcctaattaaaccaatggaaagaaggggtctaataacaaactacagcaacacatttttcatttcagcttcactgctgtatctcccagtntaaccctagcatccagaagtggcacaaaacccctctgctggctcatgtgtgcaactgagactgtcagagcatggctagctctggggtccagctctgcagggtgggggctagagaggaagcagggagtatctgcacacaggatgcccgcgctcaggtggttgcagaagtcagtgcccaggcccccccacacagtctccaaaggtccggcctccccagcgcggggctcctcgtttgaggggaggtgacttccctcccagcaggctcttggacacagtaagcttccccagccctgcctgagcagcctttcctccttgccctgttccccacctcccggctccagtccagggagctcccagggaagtggtcgacccctccggtggctgggccactctgctagagtccatccgccaagctgggggcatcggcaaggccaagctgcgcagcatgaaggagcgaaagctggagaagaagaagcagaaggagcaggagcaagtgagagccacgagccaaggtgggcacttgatgtcggatctcttcaacaagctggtcatgaggcgcaagggcatctctgggaaaggacctggggctggtgaggggcccggaggagcctttgcccgcgtgtcagactccatccctcctgtgcccccaccgcagcagccacaggcagaggaggacgaggacgactgggaatcctagggggctccatgacaccttcccccccagacccagacttgggccgttgctctgacatggacacagccaggacaagctgctcagacctgcttccctgggagggggtgacggaaccagcactgtgtggagaccagcttcaaggagcggaaggctggcttgaggccacacagctggggcggggacttctgtctgcctgtgctccatggggggacggctccacccagcctgcgccactgtgttcttaagaggcttccagagaaaacggcacaccaatcaataaagaactgagcagaaaccaa

SEQ ID NO: 446566 - DNA, 2570 bp, Homo sapiens
  misc_feature (1075)..(1075): n is a, c, g, or t
  misc_feature (1080)..(1080): n is a, c, g, or t
  misc_feature (1322)..(1322): n is a, c, g, or t
  misc_feature (1349)..(1349): n is a, c, g, or t
  misc_feature (1363)..(1363): n is a, c, g, or t
  misc_feature (1410)..(1410): n is a, c, g, or t
  misc_feature (1439)..(1439): n is a, c, g, or t
  misc_feature (1529)..(1529): n is a, c, g, or t
ggtcgacggggtcctggagccgcgctcggggagggcgcggcggagggcgagcggcggcgttaggacccggaggcgcgggcggactgtgggcggcggggctaggacccagcggctccggcagagcggaagcggcggcgggagcttccgggagggcggctcgcaggcaccatgactcctgtgaggatgcagcactccctggcaggtcagacctatgccgtgcccctcatccagccagacctgcggcgagaggaggccgtccagcagatggcggatgccctgcagtacctgcagaaggtctctggagacatcttcagcaggatctcccagcgggtagagcagagccggagccaggtgcaggccattggagagaaggtctccttggcccaggccaagattgagaagatcaagggcagcaagaaggccatcaaggtgttctccagtgccaagtaccctgctccagagcgcctgcaggaatatggctccatcttcacgggcgcccaggaccctggcctgcagagacgcccccgccacaggatccagagcaagcaccgccccctggacgagcgggccctgcaggagaagctgaaggactttcctgtgtgcgtgagcaccaagccggagcccgaggacgatgcagaagagggacttgggggtcttcccagcaacatcagctctgtcagctccttgctgctcttcaacaccaccgagaacctgtacaagaagtatgtcttcctggaccccctggctggtgctgtaacaaagacccatgtgatgctgggggcagagacagaggagaagctgtttgatgcccccttgtccatcagcaagagagagcagctggaacagcaggtcccagagaactacttctatgtgccagacctgggccaggtgcctgagattgatgttccgtcctacctgcctgacctgcccggcattgccaacgacctcatgtacagtgccgacctgggccccggcattgccccctctgcccctggcaccattccggaactgcccaccttccacactgaggtagccgagcctctcaaggcagacctacaagatggggtactaacancaccnccaccgcccccaccaccacccccagctcctgaggtgctggccagtgcatccccactcccaccctcaaccgcggcccctgtaggccaaggcgccaggcaggacgacagcagcagcagcgcgtctccttcaggtgggagcagctctttgaggccacctgatttctggcgtgctcagtgcactcgggtggattttctgtgggtttgttaagtggtcagaaattctcaattttttgaatagtttcnatttcaaatatcttgttctacttggtncataaaatagtggntttcaaactgtagagctctggacttctcacttctagggcagagggancctgaacaagtgaggctctgggttccccnttcctaattaaaccaatggaaagaaggggtctaataacaaactacagcaacacatttttcatttcagcttcactgctgtatctcccagtntaaccctagcatccagaagtggcacaaaacccctctgctggctcatgtgtgcaactgagactgtcagagcatggctagctctggggtccagctctgcagggtgggggctagagaggaagcagggagtatctgcacacaggatgcccgcgctcaggtggttgcagaagtcagtgcccaggcccccccacacagtctccaaaggtccggcctccccagcgcggggctcctcgtttgaggggaggtgacttccctcccagcaggctcttggacacagtaagcttccccagccctgcctgagcagcctttcctccttgccctgttccccacctcccggctccagtccagggagctcccagggaagtggtcgacccctccggtggctgggccactctgctagagtccatccgccaagctgggggcatcggcaaggccaagctgcgcagcatgaaggagcgaaagctggagaagaagaagcagaaggagcaggagcaagtgagagccacgagccaaggtgggcacttgatgtcggatctcttcaacaagctggtcatgaggcgcaagggcatctctgggaaaggacctggggctggtgaggggcccggaggagcctttgcccgcgtgtcagactccatccctcctgtgcccccaccgcagcagccacaggcagaggaggacgaggacgactgggaatcctagggggctccatgacaccttcccccccagacccagacttgggccgttgctctgacatggacacagccaggacaagctgctcagacctgcttccctgggagggggtgacggaaccagcactgtgtggagaccagcttcaaggagcggaaggctggcttgaggccacacagctggggcggggacttctgtctgcctgtgctccatggggggacggctccacccagcctgcgccactgtgttcttaagaggcttccagagaaaacggcacaccaatcaataaagaactgagcagaaaccaaaacagtgtgcttttaataaaggacctctagctgtgcaggatgcaaacgt

SEQ ID NO: 446567 - DNA, 1344 bp, Homo sapiens
ggtcgacggggtcctggagccgcgctcggggagggcgcggcggagggcgagcggcggcgttaggacccggaggcgcgggcggactgtgggcggcggggctaggacccagcggctccggcagagcggaagcggcggcgggagcttccgggagggcggctcgcaggcaccatgactcctgtgaggatgcagcactccctggcaggtcagacctatgccgtgcccctcatccagccagacctgcggcgagaggaggccgtccagcagatggcggatgccctgcagtacctgcagaaggtctctggagacatcttcagcaggatctcccagcgggtagagcagagccggagccaggtgcaggccattggagagaaggtctccttggcccaggccaagattgagaagatcaagggcagcaagaaggccatcaaggtgttctccagtgccaagtaccctgctccagagcgcctgcaggaatatggctccatcttcacgggcgcccaggaccctggcctgcagagacgcccccgccacaggatccagagcaagcaccgccccctggacgagcgggccctgcaggagaagctgaaggactttcctgtgtgcgtgagcaccaagccggagcccgaggacgatgcagaagagggacttgggggtcttcccagcaacatcagctctgtcagctccttgctgctcttcaacaccaccgagaacctgtatggccagaaggcagggccgaggggtgtgggcgggaggcccggcctggcttagtggggacccagggcatcagacacaggtacagcacataggccaggagccagggggtgactggggtggctcggctcgggaggcctgggaccccacagtgcacgctgtgcccctgatgatgtgggagaggaacatgggctcaggacagcgggtgtcagcttgcctgacccccatgtcgcctccgtaggtacaagaagtatgtcttcctggaccccctggctggtgctgtaacaaagacccatgtgatgctgggggcagagacagaggagaagctgtttgatgcccccttgtccatcagcaagagagagcagctggaacagcaggtcccagagaactacttctatgtgccagacctgggccaggtgcctgagattgatgttccgtcctacctgcctgacctgcccggcattgccaacgacctcatgtacagtgccgacctgggccccggcattgccccctctgcccctggcaccattccggaactgcccaccttccacactgaggtagccgagcctctcaaggcagacaagatggggtactaagaagcagccgcaaggcaaagggaggagaggggggagt

SEQ ID NO: 446568 - DNA, 515 bp, Homo sapiens
tctgtgaccccaggcaagctgcctcacctctctgggccagtttccccatcgtacagtggtgctgcacaccctggccctggcccccgaggtggctgggaggtggctcctcaaacagccgctttctcatcagtgcccggtgctgggtcagggatcgactgaggctctgagctaactaggaaacacagtggccttggagggctggggagtgtcatgggggtggggacagggagccaccggtcgcatgtgactgaactcttcaccccagtctgtggctttcccgttgcagtgagagccacgagccaaggtgggcacttgatgtcggatctcttcaacaagctggtcatgaggcgcaagggtaggaggcagggccgctgcccgccctgggtcggcaccttgtaattctgtcctgcctttttcttcctgtatttaagtctccgggggctgggggaatcagggtttcccaccaaccaccctcactcagccttttccctccagcatctctgggaaaggacctg

SEQ ID NO: 446569 - DNA, 2521 bp, Homo sapiens
  misc_feature (1075)..(1075): n is a, c, g, or t
  misc_feature (1080)..(1080): n is a, c, g, or t
  misc_feature (1322)..(1322): n is a, c, g, or t
  misc_feature (1349)..(1349): n is a, c, g, or t
  misc_feature (1363)..(1363): n is a, c, g, or t
  misc_feature (1410)..(1410): n is a, c, g, or t
  misc_feature (1439)..(1439): n is a, c, g, or t
  misc_feature (1529)..(1529): n is a, c, g, or t
ggtcgacggggtcctggagccgcgctcggggagggcgcggcggagggcgagcggcggcgttaggacccggaggcgcgggcggactgtgggcggcggggctaggacccagcggctccggcagagcggaagcggcggcgggagcttccgggagggcggctcgcaggcaccatgactcctgtgaggatgcagcactccctggcaggtcagacctatgccgtgcccctcatccagccagacctgcggcgagaggaggccgtccagcagatggcggatgccctgcagtacctgcagaaggtctctggagacatcttcagcaggatctcccagcgggtagagcagagccggagccaggtgcaggccattggagagaaggtctccttggcccaggccaagattgagaagatcaagggcagcaagaaggccatcaaggtgttctccagtgccaagtaccctgctccagagcgcctgcaggaatatggctccatcttcacgggcgcccaggaccctggcctgcagagacgcccccgccacaggatccagagcaagcaccgccccctggacgagcgggccctgcaggagaagctgaaggactttcctgtgtgcgtgagcaccaagccggagcccgaggacgatgcagaagagggacttgggggtcttcccagcaacatcagctctgtcagctccttgctgctcttcaacaccaccgagaacctgtacaagaagtatgtcttcctggaccccctggctggtgctgtaacaaagacccatgtgatgctgggggcagagacagaggagaagctgtttgatgcccccttgtccatcagcaagagagagcagctggaacagcaggtcccagagaactacttctatgtgccagacctgggccaggtgcctgagattgatgttccgtcctacctgcctgacctgcccggcattgccaacgacctcatgtacagtgccgacctgggccccggcattgccccctctgcccctggcaccattccggaactgcccaccttccacactgaggtagccgagcctctcaaggcagacctacaagatggggtactaacancaccnccaccgcccccaccaccacccccagctcctgaggtgctggccagtgcatccccactcccaccctcaaccgcggcccctgtaggccaaggcgccaggcaggacgacagcagcagcagcgcgtctccttcaggtgggagcagctctttgaggccacctgatttctggcgtgctcagtgcactcgggtggattttctgtgggtttgttaagtggtcagaaattctcaattttttgaatagtttcnatttcaaatatcttgttctacttggtncataaaatagtggntttcaaactgtagagctctggacttctcacttctagggcagagggancctgaacaagtgaggctctgggttccccnttcctaattaaaccaatggaaagaaggggtctaataacaaactacagcaacacatttttcatttcagcttcactgctgtatctcccagtntaaccctagcatccagaagtggcacaaaacccctctgctggctcatgtgtgcaactgagactgtcagagcatggctagctctggggtccagctctgcagggtgggggctagagaggaagcagggagtatctgcacacaggatgcccgcgctcaggtggttgcagaagtcagtgcccaggcccccccacacagtctccaaaggtccggcctccccagcgcggggctcctcgtttgaggggaggtgacttccctcccagcaggctcttggacacagtaagcttccccagccctgcctgagcagcctttcctccttgccctgttccccacctcccggctccagtccagggagctcccagggaagtggtcgacccctccggtggctgggccactctgctagagtccatccgccaagctgggggcatcggcaaggccaagctgcgcagcatgaaggagcgaaagctggagaagaagaagcagaaggagcaggagcaagtgagagccacgagccaaggtgggcacttgatgtcggatctcttcaacaagctggtcatgaggcgcaagggcatctctgggaaaggacctggggctggtgaggggcccggaggagcctttgcccgcgtgtcagactccatccctcctgtgcccccaccgcagcagccacaggcagaggaggacgaggacgactgggaatcctagggggctccatgacaccttcccccccagacccagacttgggccgttgctctgacatggacacagccaggacaagctgctcagacctgcttccctgggagggggtgacggaaccagcactgtgtggagaccagcttcaaggagcggaaggctggcttgaggccacacagctggggcggggacttctgtctgcctgtgctccatggggggacggctccacccagcctgcgccactgtgttcttaagaggcttccagagaaaacggcacaccaatcaataaagaactgagcagaaaccaa

SEQ ID NO: 446570 - DNA, 2601 bp, Homo sapiens
  misc_feature (1155)..(1155): n is a, c, g, or t
  misc_feature (1160)..(1160): n is a, c, g, or t
  misc_feature (1402)..(1402): n is a, c, g, or t
  misc_feature (1429)..(1429): n is a, c, g, or t
  misc_feature (1443)..(1443): n is a, c, g, or t
  misc_feature (1490)..(1490): n is a, c, g, or t
  misc_feature (1519)..(1519): n is a, c, g, or t
  misc_feature (1609)..(1609): n is a, c, g, or t
ggtcgacggggtcctggagccgcgctcggggagggcgcggcggagggcgagcggcggcgttaggacccggaggcgcgggcggactgtgggcggcggggctaggacccagcggctccggcagagcggaagcggcggcgggagcttccgggagggcggctcgcaggcaccatgactcctgtgaggatgcagcactccctggcaggtcagacctatgccgtgcccctcatccagccagacctgcggcgagaggaggccgtccagcagatggcggatgccctgcagtacctgcagaaggtctctggagacatcttcagcaggatctcccagcgggtagagcagagccggagccaggtgcaggccattggagagaaggtctccttggcccaggccaagattgagaagatcaagggcagcaagaaggccatcaaggtgttctccagtgccaagtaccctgctccagagcgcctgcaggaatatggctccatcttcacgggcgcccaggaccctggcctgcagagacgcccccgccacaggatccagagcaagcaccgccccctggacgagcgggccctgcaggagaagctgaaggactttcctgtgtgcgtgagcaccaagccggagcccgaggacgatgcagaagagggacttgggggtcttcccagcaacatcagctctgtcagctccttgctgctcttcaacaccaccgagaacctgtatggccagaaggcagggccgaggggtgtgggcgggaggcccggcctggcttagtggggacccagggcatcagacacaggtacaagaagtatgtcttcctggaccccctggctggtgctgtaacaaagacccatgtgatgctgggggcagagacagaggagaagctgtttgatgcccccttgtccatcagcaagagagagcagctggaacagcaggtcccagagaactacttctatgtgccagacctgggccaggtgcctgagattgatgttccgtcctacctgcctgacctgcccggcattgccaacgacctcatgtacagtgccgacctgggccccggcattgccccctctgcccctggcaccattccggaactgcccaccttccacactgaggtagccgagcctctcaaggcagacctacaagatggggtactaacancaccnccaccgcccccaccaccacccccagctcctgaggtgctggccagtgcatccccactcccaccctcaaccgcggcccctgtaggccaaggcgccaggcaggacgacagcagcagcagcgcgtctccttcaggtgggagcagctctttgaggccacctgatttctggcgtgctcagtgcactcgggtggattttctgtgggtttgttaagtggtcagaaattctcaattttttgaatagtttcnatttcaaatatcttgttctacttggtncataaaatagtggntttcaaactgtagagctctggacttctcacttctagggcagagggancctgaacaagtgaggctctgggttccccnttcctaattaaaccaatggaaagaaggggtctaataacaaactacagcaacacatttttcatttcagcttcactgctgtatctcccagtntaaccctagcatccagaagtggcacaaaacccctctgctggctcatgtgtgcaactgagactgtcagagcatggctagctctggggtccagctctgcagggtgggggctagagaggaagcagggagtatctgcacacaggatgcccgcgctcaggtggttgcagaagtcagtgcccaggcccccccacacagtctccaaaggtccggcctccccagcgcggggctcctcgtttgaggggaggtgacttccctcccagcaggctcttggacacagtaagcttccccagccctgcctgagcagcctttcctccttgccctgttccccacctcccggctccagtccagggagctcccagggaagtggtcgacccctccggtggctgggccactctgctagagtccatccgccaagctgggggcatcggcaaggccaagctgcgcagcatgaaggagcgaaagctggagaagaagaagcagaaggagcaggagcaagtgagagccacgagccaaggtgggcacttgatgtcggatctcttcaacaagctggtcatgaggcgcaagggcatctctgggaaaggacctggggctggtgaggggcccggaggagcctttgcccgcgtgtcagactccatccctcctgtgcccccaccgcagcagccacaggcagaggaggacgaggacgactgggaatcctagggggctccatgacaccttcccccccagacccagacttgggccgttgctctgacatggacacagccaggacaagctgctcagacctgcttccctgggagggggtgacggaaccagcactgtgtggagaccagcttcaaggagcggaaggctggcttgaggccacacagctggggcggggacttctgtctgcctgtgctccatggggggacggctccacccagcctgcgccactgtgttcttaagaggcttccagagaaaacggcacaccaatcaataaagaactgagcagaaaccaa

SEQ ID NO: 446571 - DNA, 2648 bp, Homo sapiens
  misc_feature (1202)..(1202): n is a, c, g, or t
  misc_feature (1207)..(1207): n is a, c, g, or t
  misc_feature (1449)..(1449): n is a, c, g, or t
  misc_feature (1476)..(1476): n is a, c, g, or t
  misc_feature (1490)..(1490): n is a, c, g, or t
  misc_feature (1537)..(1537): n is a, c, g, or t
  misc_feature (1566)..(1566): n is a, c, g, or t
  misc_feature (1656)..(1656): n is a, c, g, or t
ggtcgacggggtcctggagccgcgctcggggagggcgcggcggagggcgagcggcggcgttaggacccggaggcgcgggcggactgtgggcggcggggctaggacccagcggctccggcagagcggaagcggcggcgggagcttccgggagggcggctcgcaggcaccatgactcctgtgaggatgcagcactccctggcaggtcagacctatgccgtgcccctcatccagccagacctgcggcgagaggaggccgtccagcagatggcggatgccctgcagtacctgcagaaggtctctggagacatcttcagcaggtgttctccagtgccaagtaccctgctccagagcgcctgcaggaatatggctccatcttcacgggcgcccaggaccctggcctgcagagacgcccccgccacaggatccagagcaagcaccgccccctggacgagcgggccctgcaggagaagctgaaggactttcctgtgtgcgtgagcaccaagccggagcccgaggacgatgcagaagagggacttgggggtcttcccagcaacatcagctctgtcagctccttgctgctcttcaacaccaccgagaacctgtatggccagaaggcagggccgaggggtgtgggcgggaggcccggcctggcttagtggggacccagggcatcagacacaggtacagcacataggccaggagccagggggtgactggggtggctcggctcgggaggcctgggaccccacagtgcacgctgtgcccctgatgatgtgggagaggaacatgggctcaggacagcgggtgtcagcttgcctgacccccatgtcgcctccgtaggtacaagaagtatgtcttcctggaccccctggctggtgctgtaacaaagacccatgtgatgctgggggcagagacagaggagaagctgtttgatgcccccttgtccatcagcaagagagagcagctggaacagcaggtcccagagaactacttctatgtgccagacctgggccaggtgcctgagattgatgttccgtcctacctgcctgacctgcccggcattgccaacgacctcatgtacagtgccgacctgggccccggcattgccccctctgcccctggcaccattccggaactgcccaccttccacactgaggtagccgagcctctcaaggcagacctacaagatggggtactaacancaccnccaccgcccccaccaccacccccagctcctgaggtgctggccagtgcatccccactcccaccctcaaccgcggcccctgtaggccaaggcgccaggcaggacgacagcagcagcagcgcgtctccttcaggtgggagcagctctttgaggccacctgatttctggcgtgctcagtgcactcgggtggattttctgtgggtttgttaagtggtcagaaattctcaattttttgaatagtttcnatttcaaatatcttgttctacttggtncataaaatagtggntttcaaactgtagagctctggacttctcacttctagggcagagggancctgaacaagtgaggctctgggttccccnttcctaattaaaccaatggaaagaaggggtctaataacaaactacagcaacacatttttcatttcagcttcactgctgtatctcccagtntaaccctagcatccagaagtggcacaaaacccctctgctggctcatgtgtgcaactgagactgtcagagcatggctagctctggggtccagctctgcagggtgggggctagagaggaagcagggagtatctgcacacaggatgcccgcgctcaggtggttgcagaagtcagtgcccaggcccccccacacagtctccaaaggtccggcctccccagcgcggggctcctcgtttgaggggaggtgacttccctcccagcaggctcttggacacagtaagcttccccagccctgcctgagcagcctttcctccttgccctgttccccacctcccggctccagtccagggagctcccagggaagtggtcgacccctccggtggctgggccactctgctagagtccatccgccaagctgggggcatcggcaaggccaagctgcgcagcatgaaggagcgaaagctggagaagaagaagcagaaggagcaggagcaagtgagagccacgagccaaggtgggcacttgatgtcggatctcttcaacaagctggtcatgaggcgcaagggcatctctgggaaaggacctggggctggtgaggggcccggaggagcctttgcccgcgtgtcagactccatccctcctgtgcccccaccgcagcagccacaggcagaggaggacgaggacgactgggaatcctagggggctccatgacaccttcccccccagacccagacttgggccgttgctctgacatggacacagccaggacaagctgctcagacctgcttccctgggagggggtgacggaaccagcactgtgtggagaccagcttcaaggagcggaaggctggcttgaggccacacagctggggcggggacttctgtctgcctgtgctccatggggggacggctccacccagcctgcgccactgtgttcttaagaggcttccagagaaaacggcacaccaatcaataaagaactgagcagaaaccaa

SEQ ID NO: 446572 - DNA, 2546 bp, Homo sapiens
  misc_feature (1075)..(1075): n is a, c, g, or t
  misc_feature (1080)..(1080): n is a, c, g, or t
  misc_feature (1322)..(1322): n is a, c, g, or t
  misc_feature (1349)..(1349): n is a, c, g, or t
  misc_feature (1363)..(1363): n is a, c, g, or t
  misc_feature (1410)..(1410): n is a, c, g, or t
  misc_feature (1439)..(1439): n is a, c, g, or t
  misc_feature (1529)..(1529): n is a, c, g, or t
  misc_feature (2534)..(2534): n is a, c, g, or t
ggtcgacggggtcctggagccgcgctcggggagggcgcggcggagggcgagcggcggcgttaggacccggaggcgcgggcggactgtgggcggcggggctaggacccagcggctccggcagagcggaagcggcggcgggagcttccgggagggcggctcgcaggcaccatgactcctgtgaggatgcagcactccctggcaggtcagacctatgccgtgcccctcatccagccagacctgcggcgagaggaggccgtccagcagatggcggatgccctgcagtacctgcagaaggtctctggagacatcttcagcaggatctcccagcgggtagagcagagccggagccaggtgcaggccattggagagaaggtctccttggcccaggccaagattgagaagatcaagggcagcaagaaggccatcaaggtgttctccagtgccaagtaccctgctccagagcgcctgcaggaatatggctccatcttcacgggcgcccaggaccctggcctgcagagacgcccccgccacaggatccagagcaagcaccgccccctggacgagcgggccctgcaggagaagctgaaggactttcctgtgtgcgtgagcaccaagccggagcccgaggacgatgcagaagagggacttgggggtcttcccagcaacatcagctctgtcagctccttgctgctcttcaacaccaccgagaacctgtacaagaagtatgtcttcctggaccccctggctggtgctgtaacaaagacccatgtgatgctgggggcagagacagaggagaagctgtttgatgcccccttgtccatcagcaagagagagcagctggaacagcaggtcccagagaactacttctatgtgccagacctgggccaggtgcctgagattgatgttccgtcctacctgcctgacctgcccggcattgccaacgacctcatgtacagtgccgacctgggccccggcattgccccctctgcccctggcaccattccggaactgcccaccttccacactgaggtagccgagcctctcaaggcagacctacaagatggggtactaacancaccnccaccgcccccaccaccacccccagctcctgaggtgctggccagtgcatccccactcccaccctcaaccgcggcccctgtaggccaaggcgccaggcaggacgacagcagcagcagcgcgtctccttcaggtgggagcagctctttgaggccacctgatttctggcgtgctcagtgcactcgggtggattttctgtgggtttgttaagtggtcagaaattctcaattttttgaatagtttcnatttcaaatatcttgttctacttggtncataaaatagtggntttcaaactgtagagctctggacttctcacttctagggcagagggancctgaacaagtgaggctctgggttccccnttcctaattaaaccaatggaaagaaggggtctaataacaaactacagcaacacatttttcatttcagcttcactgctgtatctcccagtntaaccctagcatccagaagtggcacaaaacccctctgctggctcatgtgtgcaactgagactgtcagagcatggctagctctggggtccagctctgcagggtgggggctagagaggaagcagggagtatctgcacacaggatgcccgcgctcaggtggttgcagaagtcagtgcccaggcccccccacacagtctccaaaggtccggcctccccagcgcggggctcctcgtttgaggggaggtgacttccctcccagcaggctcttggacacagtaagcttccccagccctgcctgagcagcctttcctccttgccctgttccccacctcccggctccagtccagggagctcccagggaagtggtcgacccctccggtggctgggccactctgctagagtccatccgccaagctgggggcatcggcaaggccaagctgcgcagcatgaaggagcgaaagctggagaagaagaagcagaaggagcaggagcaagtgagagccacgagccaaggtgggcacttgatgtcggatctcttcaacaagctggtcatgaggcgcaagggcatctctgggaaaggacctggggctggtgaggggcccggaggagcctttgcccgcgtgtcagactccatccctcctgtgcccccaccgcagcagccacaggcagaggaggacgaggacgactgggaatcctagggggctccatgacaccttcccccccagacccagacttgggccgttgctctgacatggacacagccaggacaagctgctcagacctgcttccctgggagggggtgacggaaccagcactgtgtggagaccagcttcaaggagcggaaggctggcttgaggccacacagctggggcggggacttctgtctgcctgtgctccatggggggacggctccacccagcctgcgccactgtgttcttaagaggcttccagagaaaacggcacaccaatcaataaagaactgagcagaaaccaaaaaaaaaaaaaangaaaaaaaaaaa

SEQ ID NO: 446573 - DNA, 1374 bp, Homo sapiens
  misc_feature (1075)..(1075): n is a, c, g, or t
  misc_feature (1080)..(1080): n is a, c, g, or t
ggtcgacggggtcctggagccgcgctcggggagggcgcggcggagggcgagcggcggcgttaggacccggaggcgcgggcggactgtgggcggcggggctaggacccagcggctccggcagagcggaagcggcggcgggagcttccgggagggcggctcgcaggcaccatgactcctgtgaggatgcagcactccctggcaggtcagacctatgccgtgcccctcatccagccagacctgcggcgagaggaggccgtccagcagatggcggatgccctgcagtacctgcagaaggtctctggagacatcttcagcaggatctcccagcgggtagagcagagccggagccaggtgcaggccattggagagaaggtctccttggcccaggccaagattgagaagatcaagggcagcaagaaggccatcaaggtgttctccagtgccaagtaccctgctccagagcgcctgcaggaatatggctccatcttcacgggcgcccaggaccctggcctgcagagacgcccccgccacaggatccagagcaagcaccgccccctggacgagcgggccctgcaggagaagctgaaggactttcctgtgtgcgtgagcaccaagccggagcccgaggacgatgcagaagagggacttgggggtcttcccagcaacatcagctctgtcagctccttgctgctcttcaacaccaccgagaacctgtacaagaagtatgtcttcctggaccccctggctggtgctgtaacaaagacccatgtgatgctgggggcagagacagaggagaagctgtttgatgcccccttgtccatcagcaagagagagcagctggaacagcaggtcccagagaactacttctatgtgccagacctgggccaggtgcctgagattgatgttccgtcctacctgcctgacctgcccggcattgccaacgacctcatgtacagtgccgacctgggccccggcattgccccctctgcccctggcaccattccggaactgcccaccttccacactgaggtagccgagcctctcaaggcagacctacaagatggggtactaacancaccnccaccgcccccaccttcccccccagacccagacttgggccgttgctctgacatggacacagccaggacaagctgctcagacctgcttccctgggagggggtgacggaaccagcactgtgtggagaccagcttcaaggagcggaaggctggcttgaggccacacagctggggcggggacttctgtctgcctgtgctccatggggggacggctccacccagcctgcgccactgtgttcttaagaggcttccagagaaaacggcacaccaatcaataaagaactgagcagaaaccaa

SEQ ID NO: 446574 - DNA, 253 bp, Homo sapiens
cccaggccaagattgagaagatcaagggcagcaagaaggccatcaaggtagtccccatacccctgtgtcctgaggctactgggcagtccctccatttccccatgcctctgaggccgcccattctctgccctgctgcccacctgtaccttgggctttcttctcgcccaggcttccaactccaccctctcctgccaagcaatcctagccctctgagcctcttagggccccctcagacttgtccctgtgtccacag

SEQ ID NO: 446575 - DNA, 8212 bp, Homo sapiens
aggcccgtctcgcaggcccccggatccggccgttggggcctcttccttctcagggagccccagcatggagctttgggccttggtttcgggaaactgggactggccctggctgctaggctgctccctgctgctgctttttggagatgagagttgctcttccatttatcctccagttaccgcgcgcttttgtgcccgggactcaaactgtggactccttttgcttagtttgaaatgagaagcctagactcttgccttccgataatacatgtaatttaatgaaccacttgtcgatacggctgaaagacacacagaagtcttcatggatatagttgatacatttaatcatttaattcctactgaacacttagatgatgccctatttctaggatccaacctggagaatgaagtctgtgaggattttagtgcaagtcaaaatgtcttagaggactcgctgaagaacatgctcagcgataaggatcctatgctaggatctgcaagtaaccagttctgtttgcctgttttggatagcaatgatcccaatttccagatgccttgttcaacagttgttggtcttgacgatattatggatgaaggagttgttaaagaaagtggcaatgataccattgatgaagaagaactgattttacctaacaggaacttaagggacaaggtagaagaaaattcagtgagatctccaagaaaatcacctcgtttaatggcacaagaacaagtaagaagtttgcgacagagcactattgccaagcgttcaaatgcagcaccattaagtaacacaaaaaaagcatctgggaagactgtatctactgctaaagcaggagtgaaacaaccagaaaggagtcaggttaaagaagaagtatgtatgtcactgaaacctgagtaccataaggagaatagaaggtgcagccgaaatagcggacaaattgaagtggtacctgaagtatcagtgtcttcaagtcattcttcagtgtcatcttgtcttgaaatgaaggatgaagatggattagattctaagcataagtgtaataatccgggagaaatagatgtgccatctcatgaattaaattgttcacttctttcagagacttgtgttactattggagaaaagaaaaatgaagctttgatggaatgtaaagccaagcctgttggtagtccattgtttaagttttcagataaagaagaacatgaacaaaatgattccatttcaggtaaaacgggtgagactgttgttgaagaaatgatagcaacaagaaaagttgaacaagattcaaaggagacagtaaaattatcccatgaagatgaccatattcttgaggacgctggatcttctgatatttctagtgatgctgcttgtacaaatccaaataagacagaaaacagccttgtaggtttgcctagttgtgtagatgaagtgactgaatgtaatttggaattgaaggataccatgggtattgctgataaaactgagaacacccttgaaagaaataaaattgaaccgttgggttattgtgaagatgcggagtctaataggcagttggagagcactgagtttaataaatcaaacttagaggtggttgatactagtacttttggaccggaaagtaatatcttggaaaatgctatttgtgatgtgcctgaccaaaattcaaaacagttgaatgctatagaaagtactaaaatagagtcccatgaaacagcaaaccttcaggatgacagaaacagccagtcaagtagcgtttcttacttagagtcaaaaagtgtaaaatccaaacatacaaaacctgtaattcattctaagcaaaacatgaccacagatgctccgaagaaaattgttgcagcaaagtatgaagtaatacatagcaaaactaaagttaatgtcaaaagtgtgaaacgaaatactgatgtaccagaatctcagcaaaattttcataggccagtcaaagtcagaaaaaaacaaattgataaggagccaaagattcagagttgcaattctggggttaaatctgtgaaaaaccaagctcattctgtactgaaaaaaacattacaggatcaaactttagtacaaattttcaagcccttaactcattctttgagtgataagtcacacgctcatcctggttgcttgaaagaacctcatcatcctgcacaaactggacatgtatcacattctagccagaaacagtgtcataagcctcagcaacaggccccagcaatgaaaaccaatagtcacgtgaaggaagagcttgaacacccaggcgttgagcattttaaggaagaggataaactgaaactgaaaaaacctgagaagaacctacaaccccgccaaagaagaagcagcaaaagtttttctttagatgagccaccattgttcattccagataacatagctaccataagaagagaaggctctgatcatagctcctcatttgaaagcaaatatatgtggactcccagcaagcagtgtgggttttgcaaaaaaccacatggcaacaggtttatggttggctgtgggagatgtgatgactggtttcatggtgattgtgttgggttaagtctttctcaagcacagcagatgggcgaggaagacaaagaatatgtctgtgtaaaatgttgtgctgaagaagacaaaaagactgaaatactagatccagatactttggaaaaccaagctacagttgaattccatagtggagataaaacaatggagtgtgaaaagcttggattatcaaaacacacaacaaatgatagaaccaaatatatagatgatacagtgaagcacaaggtcaaaattttaaaacgggagtctggtgaaggcagaaattcatcagactgtagagataatgaaattaaaaaatggcagctagctcctcttcgtaagatgggacaaccagttttacctcggagatcctcagaagaaaaaagtgaaaaaataccgaaagagtctacaactgttacttgcacaggagaaaaagcttcaaaaccaggtactcatgagaagcaagagatgaaaaagaagaaagttgaaaaaggagtgcttaatgtacatcctgctgcttctgcttccaagccttctgcagatcagatcaggcaaagtgtcagacattctctcaaagacattcttatgaagagacttacagactcaaatttgaaggtaccagaggaaaaggcagcaaaagttgccacaaaaattgagaaagagcttttctctttttttcgggacacagatgctaaatataagaacaaatatagaagtttgatgtttaatttgaaagatcctaaaaacaatatattatttaaaaaagtactgaaaggagaagtaactcctgatcatcttatcagaatgagtccagaagaactagcttctaaagagttagctgcttggagacgaagagaaaacagacataccatagaaatgattgagaaagagcagagagaagtggaacgacggccaatcaccaaaataactcataaaggtgaaatagaaattgagagtgatgccccaatgaaagaacaggaagcagccatggagattcaggaaccagccgccaataagtcattggagaagccagaaggatctgaaaaacaaaaagaggaggttgactctatgtctaaagataccactagtcaacacagacagcatctttttgatctcaactgcaaaatctgcataggtcgaatggcaccacctgtagatgatctttctccaaaaaaagtaaaagttgttgtaggagtagctcgcaaacattcagacaatgaagcagaaagtatagcagatgcattatcttcaacctcaaatattttggcttctgaattctttgaggaggagaaacaggagtctccaaagtcaacgttctctcctgctccacgtccagagatgcctggaactgttgaagttgagtctacctttctggctcgattgaacttcatctggaaaggttttatcaacatgccttctgtggcaaaatttgttaccaaagcctatccagtatctggctccccagaatacctgacagaggacctaccagatagtattcaagtaggtggcaggatatcacctcagacagtttgggattatgtggaaaaaataaaagcatcaggaaccaaggaaatttgtgtggttcgcttcacaccagtaactgaagaagatcaaatttcttatactttgctctttgcatacttcagtagcagaaagcgctatggagtagctgctaacaacatgaagcaggttaaagatatgtaccttattcctttgggtgccacagataaaattccacaccctcttgtgccttttgatggacctgggcttgaactgcatagacctaatctattgttgggcttaattattcgtcagaaactgaagcgacagcacagtgcctgtgctagtactagtcatatagctgagactcctgaaagtgcaccaccaatagcattgccacctgataaaaaaagtaaaatagaagtttctacagaagaagcaccagaggaagaaaatgacttttttaattcttttacaactgtattacacaagcagagaaataaacctcagcagaatcttcaggaagaccttccaacagcagttgaacctttaatggaagtcaccaaacaggagccaccaaaacctttaagatttcttcctggcgtgttgattggctgggagaatcaacctactactctggaattagcaaataaacctcttcctgtggatgatatacttcaaagccttttgggcaccactggtcaagtatatgaccaggcccagtcagtgatggaacaaaacactgttaaagaaattccatttttaaatgagcagaccaactcaaaaatagagaaaacagataatgtggaagtaactgatggtgaaaacaaggagataaaagttaaagtagataatatttcagaatctacagataagtcagcagaaatagaaacatcagtagtagggtcctcttccatttctgcagggtctttgacgagtcttagtctcagaggtaagccaccagatgtttctacagaagcatttttaacaaatttatcaattcagtcaaaacaagaggaaactgtggagagtaaagagaaaacattaaaaagacagcttcaggaagatcaagagaataatttgcaagataaccagacttcaaatagttctccatgcagatctaatgtaggaaaaggaaacatagatggtaatgtgagctgtagtgaaaaccttgttgctaatacagcgaggtctccacagtttatcaacctgaaaagggatcctaggcaagcagcaggacgaagtcagcctgtaactacttcagaaagcaaagatggagatagttgccggaatggagaaaaacacatgctgcctggcctgtcacacaacaaggagcacttaacagaacaaatcaatgtagaggaaaagttgtgttctgcagagaaaaactcgtgtgttcagcagagtgacaatttaaaagttgcacaaaactcaccatcagtagaaaacatacagacttctcaagcagaacaagcaaaacccttacaggaggatattttaatgcaaaatattgaaactgtgcacccatttcgaagaggatcagcagtagcgacatctcattttgaagttggaaacacatgtccatcagaatttccttctaaaagcatcacctttacttccagaagcaccagccccagaacaagtacaaacttttcacccatgaggccacagcagcccaaccttcagcatctcaagtctagcccacctggatttccatttccagggcctcctaattttcccccacaaagcatgtttggatttccaccacatttgccacctccattacttccccctccaggctttggctttgctcaaaatcccatggttccctggccacctgttgttcatctcccaggtcagccacagcgtatgatgggtcctctctcacaagcatcaaggtatataggcccgcagaatttttaccaggttaaagacattcggaggccagaaaggcgccatagtgacccttggggtaggcaagaccaacagcaactggataggccatttaataggggtaaaggggaccgccagagattttatagtgattcacaccatttgaaaagagagcgacatgaaaaggaatgggagcaagaatctgaaaggcatagacgcagagacagaagccaagacaaggacagagacagaaaaagcagggaggaagggcacaaagataaagagagggcacggttatcacatggtgatcgaggaacagatggaaaagcaagcagagatagtaggaatgtagacaagaagccagataaacctaaaagtgaagactatgagaaggacaaagaacgagagaaaagtaaacacagagaaggagaaaaggacagggataggtaccacaaagatagggaccacactgacagaactaaaagcaaaaggtaaaatttgcaggctgcttcaggattacatttaaataactgttaaaatgttgtatcttgtaaacaaaagaaagattgcctgctaggattgtgccatctttaaaatttttactattggtcatttgcagaacagtaaattctgtgtgttggtacagagtgctctgtaccagtgctcatcatcccttcttcataccaacggtccctagttataggaatttaatatttttaaaagttttacattgctgtatattcaaagatttgttttattaatatgcaataaaggcttagaaattttagttttattccttaattggtaaatatggttaactatggaatatatttacttcctctagtgaatgtcctttatataatgactaatttgggagtaatgtgtgctctgtaagtttgttttaaattgcactgtttttaaagaaactgtagaggagcaacaaaaatccaagcaacttcataatcagattatgctaatcatttagttgagcagtttttgaccaagaatcagaagcccaaggggtacatttattgctttaatctgcactcattgaagtcatttattaccatatactacagctttgtggtaggccattattttcattttcatttttggctcttcagaaacttgaatacttaagcttgtacatgatcttgtgttttgctatcctttttactgtaaaatgtaaatattttaagggatattttgattctaaatatgataaaataatttctcacctattttgtgtgtgtgacttgaaattcagtagtaaaagaatttcttctttaaagctttaattaccttcagacattgattttttgttactcagccaagaacatatagaaatagctatctatgtcaggcattagatgaggggaaaaacaatttttttaaaatcttaaattgtaggctgagatgaattgtgtagttctaaagaggctagaatttagaactacctgtgaaacactgtgcagctatagcccactttataggtaagtttctgaaaacttttacaccatcgcaatttggtactctgactcactaatcattaaaattaaagaccgcagaacttgaagagaaatatgttttgaatccttttataaaatgtgcgatttagcctaattcgtaaagtaactgtacagtttcatatgccagttttacttgaaaaaaaaatatgaaaactattgttaattcaaatctaaatttatttaaaccctaaaacacatggttttgatggctgtaatttaaagtaagagctatcaaatgatgctgacaaaagaaaaaccttccaaaatacaaaagaaagagaactctattatttacttacctgtattaatgaagaaaaatataaataattccacaaaattgattgttttcctaaagagcttaaagattagagttaaaaattggttttgaaacagaattatccttgttatttttgctggagagaagggaggaaattcagaaccaaacattctatttaatttgcaatgacttgcagtacttttttccctatccttatcctgtgaaacttactatcataaggttctaaaacagagaacttgtgtttaaataaagcccgtttaactttggtccacttttcttttggaaattaacttgttagaaaacaaagttagttcccaaacaaaacaaaatctaagttataatttgcaccattacaaagaaattgctgtcagggttttacacattttaaaaacatttcaatttcaaatgtgtatatcgtcaataaatctacctttactgata

SEQ ID NO: 446576 - DNA, 8050 bp, Homo sapiens
aggcccgtctcgcaggcccccggatccggccgttggggcctcttccttctcagggagccccagcatggagctttgggccttggtttcgggaaactgggactggccctggctgctaggctgctccctgctgctgctttttggagatgagagttgctcttccatttatcctccagttaccgcgcgcttttgtgcccgggactcaaactgtggactccttttgcttagtttgaaatgagaagcctagactcttgccttccgataatacatgtaatttaatgaaccacttgtcgatacggctgaaagacacacagaagtcttcatggatatagttgatacatttaatcatttaattcctactgaacacttagatgatgccctatttctaggatccaacctggagaatgaagtctgtgaggattttagtgcaagtcaaaatgtcttagaggactcgctgaagaacatgctcagcgataaggatcctatgctaggatctgcaagtaaccagttctgtttgcctgttttggatagcaatgatcccaatttccagatgccttgttcaacagaacaagtaagaagtttgcgacagagcactattgccaagcgttcaaatgcagcaccattaagtaacacaaaaaaagcatctgggaagactgtatctactgctaaagcaggagtgaaacaaccagaaaggagtcaggttaaagaagaagtatgtatgtcactgaaacctgagtaccataaggagaatagaaggtgcagccgaaatagcggacaaattgaagtggtacctgaagtatcagtgtcttcaagtcattcttcagtgtcatcttgtcttgaaatgaaggatgaagatggattagattctaagcataagtgtaataatccgggagaaatagatgtgccatctcatgaattaaattgttcacttctttcagagacttgtgttactattggagaaaagaaaaatgaagctttgatggaatgtaaagccaagcctgttggtagtccattgtttaagttttcagataaagaagaacatgaacaaaatgattccatttcaggtaaaacgggtgagactgttgttgaagaaatgatagcaacaagaaaagttgaacaagattcaaaggagacagtaaaattatcccatgaagatgaccatattcttgaggacgctggatcttctgatatttctagtgatgctgcttgtacaaatccaaataagacagaaaacagccttgtaggtttgcctagttgtgtagatgaagtgactgaatgtaatttggaattgaaggataccatgggtattgctgataaaactgagaacacccttgaaagaaataaaattgaaccgttgggttattgtgaagatgcggagtctaataggcagttggagagcactgagtttaataaatcaaacttagaggtggttgatactagtacttttggaccggaaagtaatatcttggaaaatgctatttgtgatgtgcctgaccaaaattcaaaacagttgaatgctatagaaagtactaaaatagagtcccatgaaacagcaaaccttcaggatgacagaaacagccagtcaagtagcgtttcttacttagagtcaaaaagtgtaaaatccaaacatacaaaacctgtaattcattctaagcaaaacatgaccacagatgctccgaagaaaattgttgcagcaaagtatgaagtaatacatagcaaaactaaagttaatgtcaaaagtgtgaaacgaaatactgatgtaccagaatctcagcaaaattttcataggccagtcaaagtcagaaaaaaacaaattgataaggagccaaagattcagagttgcaattctggggttaaatctgtgaaaaaccaagctcattctgtactgaaaaaaacattacaggatcaaactttagtacaaattttcaagcccttaactcattctttgagtgataagtcacacgctcatcctggttgcttgaaagaacctcatcatcctgcacaaactggacatgtatcacattctagccagaaacagtgtcataagcctcagcaacaggccccagcaatgaaaaccaatagtcacgtgaaggaagagcttgaacacccaggcgttgagcattttaaggaagaggataaactgaaactgaaaaaacctgagaagaacctacaaccccgccaaagaagaagcagcaaaagtttttctttagatgagccaccattgttcattccagataacatagctaccataagaagagaaggctctgatcatagctcctcatttgaaagcaaatatatgtggactcccagcaagcagtgtgggttttgcaaaaaaccacatggcaacaggtttatggttggctgtgggagatgtgatgactggtttcatggtgattgtgttgggttaagtctttctcaagcacagcagatgggcgaggaagacaaagaatatgtctgtgtaaaatgttgtgctgaagaagacaaaaagactgaaatactagatccagatactttggaaaaccaagctacagttgaattccatagtggagataaaacaatggagtgtgaaaagcttggattatcaaaacacacaacaaatgatagaaccaaatatatagatgatacagtgaagcacaaggtcaaaattttaaaacgggagtctggtgaaggcagaaattcatcagactgtagagataatgaaattaaaaaatggcagctagctcctcttcgtaagatgggacaaccagttttacctcggagatcctcagaagaaaaaagtgaaaaaataccgaaagagtctacaactgttacttgcacaggagaaaaagcttcaaaaccaggtactcatgagaagcaagagatgaaaaagaagaaagttgaaaaaggagtgcttaatgtacatcctgctgcttctgcttccaagccttctgcagatcagatcaggcaaagtgtcagacattctctcaaagacattcttatgaagagacttacagactcaaatttgaaggtaccagaggaaaaggcagcaaaagttgccacaaaaattgagaaagagcttttctctttttttcgggacacagatgctaaatataagaacaaatatagaagtttgatgtttaatttgaaagatcctaaaaacaatatattatttaaaaaagtactgaaaggagaagtaactcctgatcatcttatcagaatgagtccagaagaactagcttctaaagagttagctgcttggagacgaagagaaaacagacataccatagaaatgattgagaaagagcagagagaagtggaacgacggccaatcaccaaaataactcataaaggtgaaatagaaattgagagtgatgccccaatgaaagaacaggaagcagccatggagattcaggaaccagccgccaataagtcattggagaagccagaaggatctgaaaaacaaaaagaggaggttgactctatgtctaaagataccactagtcaacacagacagcatctttttgatctcaactgcaaaatctgcataggtcgaatggcaccacctgtagatgatctttctccaaaaaaagtaaaagttgttgtaggagtagctcgcaaacattcagacaatgaagcagaaagtatagcagatgcattatcttcaacctcaaatattttggcttctgaattctttgaggaggagaaacaggagtctccaaagtcaacgttctctcctgctccacgtccagagatgcctggaactgttgaagttgagtctacctttctggctcgattgaacttcatctggaaaggttttatcaacatgccttctgtggcaaaatttgttaccaaagcctatccagtatctggctccccagaatacctgacagaggacctaccagatagtattcaagtaggtggcaggatatcacctcagacagtttgggattatgtggaaaaaataaaagcatcaggaaccaaggaaatttgtgtggttcgcttcacaccagtaactgaagaagatcaaatttcttatactttgctctttgcatacttcagtagcagaaagcgctatggagtagctgctaacaacatgaagcaggttaaagatatgtaccttattcctttgggtgccacagataaaattccacaccctcttgtgccttttgatggacctgggcttgaactgcatagacctaatctattgttgggcttaattattcgtcagaaactgaagcgacagcacagtgcctgtgctagtactagtcatatagctgagactcctgaaagtgcaccaccaatagcattgccacctgataaaaaaagtaaaatagaagtttctacagaagaagcaccagaggaagaaaatgacttttttaattcttttacaactgtattacacaagcagagaaataaacctcagcagaatcttcaggaagaccttccaacagcagttgaacctttaatggaagtcaccaaacaggagccaccaaaacctttaagatttcttcctggcgtgttgattggctgggagaatcaacctactactctggaattagcaaataaacctcttcctgtggatgatatacttcaaagccttttgggcaccactggtcaagtatatgaccaggcccagtcagtgatggaacaaaacactgttaaagaaattccatttttaaatgagcagaccaactcaaaaatagagaaaacagataatgtggaagtaactgatggtgaaaacaaggagataaaagttaaagtagataatatttcagaatctacagataagtcagcagaaatagaaacatcagtagtagggtcctcttccatttctgcagggtctttgacgagtcttagtctcagaggtaagccaccagatgtttctacagaagcatttttaacaaatttatcaattcagtcaaaacaagaggaaactgtggagagtaaagagaaaacattaaaaagacagcttcaggaagatcaagagaataatttgcaagataaccagacttcaaatagttctccatgcagatctaatgtaggaaaaggaaacatagatggtaatgtgagctgtagtgaaaaccttgttgctaatacagcgaggtctccacagtttatcaacctgaaaagggatcctaggcaagcagcaggacgaagtcagcctgtaactacttcagaaagcaaagatggagatagttgccggaatggagaaaaacacatgctgcctggcctgtcacacaacaaggagcacttaacagaacaaatcaatgtagaggaaaagttgtgttctgcagagaaaaactcgtgtgttcagcagagtgacaatttaaaagttgcacaaaactcaccatcagtagaaaacatacagacttctcaagcagaacaagcaaaacccttacaggaggatattttaatgcaaaatattgaaactgtgcacccatttcgaagaggatcagcagtagcgacatctcattttgaagttggaaacacatgtccatcagaatttccttctaaaagcatcacctttacttccagaagcaccagccccagaacaagtacaaacttttcacccatgaggccacagcagcccaaccttcagcatctcaagtctagcccacctggatttccatttccagggcctcctaattttcccccacaaagcatgtttggatttccaccacatttgccacctccattacttccccctccaggctttggctttgctcaaaatcccatggttccctggccacctgttgttcatctcccaggtcagccacagcgtatgatgggtcctctctcacaagcatcaaggtatataggcccgcagaatttttaccaggttaaagacattcggaggccagaaaggcgccatagtgacccttggggtaggcaagaccaacagcaactggataggccatttaataggggtaaaggggaccgccagagattttatagtgattcacaccatttgaaaagagagcgacatgaaaaggaatgggagcaagaatctgaaaggcatagacgcagagacagaagccaagacaaggacagagacagaaaaagcagggaggaagggcacaaagataaagagagggcacggttatcacatggtgatcgaggaacagatggaaaagcaagcagagatagtaggaatgtagacaagaagccagataaacctaaaagtgaagactatgagaaggacaaagaacgagagaaaagtaaacacagagaaggagaaaaggacagggataggtaccacaaagatagggaccacactgacagaactaaaagcaaaaggtaaaatttgcaggctgcttcaggattacatttaaataactgttaaaatgttgtatcttgtaaacaaaagaaagattgcctgctaggattgtgccatctttaaaatttttactattggtcatttgcagaacagtaaattctgtgtgttggtacagagtgctctgtaccagtgctcatcatcccttcttcataccaacggtccctagttataggaatttaatatttttaaaagttttacattgctgtatattcaaagatttgttttattaatatgcaataaaggcttagaaattttagttttattccttaattggtaaatatggttaactatggaatatatttacttcctctagtgaatgtcctttatataatgactaatttgggagtaatgtgtgctctgtaagtttgttttaaattgcactgtttttaaagaaactgtagaggagcaacaaaaatccaagcaacttcataatcagattatgctaatcatttagttgagcagtttttgaccaagaatcagaagcccaaggggtacatttattgctttaatctgcactcattgaagtcatttattaccatatactacagctttgtggtaggccattattttcattttcatttttggctcttcagaaacttgaatacttaagcttgtacatgatcttgtgttttgctatcctttttactgtaaaatgtaaatattttaagggatattttgattctaaatatgataaaataatttctcacctattttgtgtgtgtgacttgaaattcagtagtaaaagaatttcttctttaaagctttaattaccttcagacattgattttttgttactcagccaagaacatatagaaatagctatctatgtcaggcattagatgaggggaaaaacaatttttttaaaatcttaaattgtaggctgagatgaattgtgtagttctaaagaggctagaatttagaactacctgtgaaacactgtgcagctatagcccactttataggtaagtttctgaaaacttttacaccatcgcaatttggtactctgactcactaatcattaaaattaaagaccgcagaacttgaagagaaatatgttttgaatccttttataaaatgtgcgatttagcctaattcgtaaagtaactgtacagtttcatatgccagttttacttgaaaaaaaaatatgaaaactattgttaattcaaatctaaatttatttaaaccctaaaacacatggttttgatggctgtaatttaaagtaagagctatcaaatgatgctgacaaaagaaaaaccttccaaaatacaaaagaaagagaactctattatttacttacctgtattaatgaagaaaaatataaataattccacaaaattgattgttttcctaaagagcttaaagattagagttaaaaattggttttgaaacagaattatccttgttatttttgctggagagaagggaggaaattcagaaccaaacattctatttaatttgcaatgacttgcagtacttttttccctatccttatcctgtgaaacttactatcataaggttctaaaacagagaacttgtgtttaaataaagcccgtttaactttggtccacttttcttttggaaattaacttgttagaaaacaaagttagttcccaaacaaaacaaaatctaagttataatttgcaccattacaaagaaattgctgtcagggttttacacattttaaaaacatttcaatttcaaatgtgtatatcgtcaataaatctacctttactgata

SEQ ID NO: 446577 - DNA, 3361 bp, Homo sapiens
  misc_feature (5)..(5): n is a, c, g, or t
gcggncgctccaacatcagaaaggtagactcaacttcaacagttccaggcatctctggacgtggagcaggagagaacgttgactttgagtctacctttctggctcgattgaacttcatctggaaaggttttatcaacatgccttctgtggcaaaatttgttaccaaagcctatccagtatctggctccccagaatacctgacagaggacctaccagatagtattcaagtaggtggcaggatatcacctcagacagtttgggattatgtggaaaaaataaaagcatcaggaaccaaggaaatttgtgtggttcgcttcacaccagtaactgaagaagatcaaatttcttatactttgctctttgcatacttcagtagcagaaagcgctatggagtagctgctaacaacatgaagcaggttaaagatatgtaccttattcctttgggtgccacagataaaattccacaccctcttgtgccttttgatggacctgggcttgaactgcatagacctaatctattgttgggcttaattattcgtcagaaactgaagcgacagcacagtgcctgtgctagtactagtcatatagctgagactcctgaaagtgcaccaccaatagcattgccacctgataaaaaaagtaaaatagaagtttctacagaagaagcaccagaggaagaaaatgacttttttaattcttttacaactgtattacacaagcagagaaataaacctcagcagaatcttcaggaagaccttccaacagcagttgaacctttaatggaagtcaccaaacaggagccaccaaaacctttaagatttcttcctggcgtgttgattggctgggagaatcaacctactactctggaattagcaaataaacctcttcctgtggatgatatacttcaaagccttttgggcaccactggtcaagtatatgaccaggcccagtcagtgatggaacaaaacactgttaaagaaattccatttttaaatgagcagaccaactcaaaaatagagaaaacagataatgtggaagtaactgatggtgaaaacaaggagataaaagttaaagtagataatatttcagaatctacagataagtcagcagaaatagaaacatcagtagtagggtcctcttccatttctgcagggtctttgacgagtcttagtctcagaggtaagccaccagatgtttctacagaagcatttttaacaaatttatcaattcagtcaaaacaagaggaaactgtggagagtaaagagaaaacattaaaaagacagcttcaggaagatcaagagaataatttgcaagataaccagacttcaaatagttctccatgcagatctaatgtaggaaaaggaaacatagatggtaatgtgagctgtagtgaaaaccttgttgctaatacagcgaggtctccacagtttatcaacctgaaaagggatcctaggcaagcagcaggacgaagtcagcctgtaactacttcagaaagcaaagatggagatagttgccggaatggagaaaaacacatgctgcctggcctgtcacacaacaaggagcacttaacagaacaaatcaatgtagaggaaaagttgtgttctgcagagaaaaactcgtgtgttcagcagagtgacaatttaaaagttgcacaaaactcaccatcagtagaaaacatacagacttctcaagcagaacaagcaaaacccttacaggaggatattttaatgcaaaatattgaaactgtgcacccatttcgaagaggatcagcagtagcgacatctcattttgaagttggaaacacatgtccatcagaatttccttctaaaagcatcacctttacttccagaagcaccagccccagaacaagtacaaacttttcacccatgaggccacagcagcccaaccttcagcatctcaagtctagcccacctggatttccatttccagggcctcctaattttcccccacaaagcatgtttggatttccaccacatttgccacctccattacttccccctccaggctttggctttgctcaaaatcccatggttccctggccacctgttgttcatctcccaggtcagccacagcgtatgatgggtcctctctcacaagcatcaaggtatataggcccgcagaatttttaccaggttaaagacattcggaggccagaaaggcgccatagtgacccttggggtaggcaagaccaacagcaactggataggccatttaataggggtaaaggggaccgccagagattttatagtgattcacaccatttgaaaagagagcgacatgaaaaggaatgggagcaagaatctgaaaggcatagacgcagagacagaagccaagacaaggacagagacagaaaaagcagggaggaagggcacaaagataaagagagggcacggttatcacatggtgatcgaggaacagatggaaaagcaagcagagatagtaggaatgtagacaagaagccagataaacctaaaagtgaagactatgagaaggacaaagaacgagagaaaagtaaacacagagaaggagaaaaggacagggataggtaccacaaagatagggaccacactgacagaactaaaagcaaaaggtaaaatttgcaggctgcttcaggattacatttaaataactgttaaaatgttgtatcttgtaaacaaaagaaagattgcctgctaggattgtgccatctttaaaatttttactattggtcatttgcagaacagtaaattctgtgtgttggtacagagtgctctgtaccagtgctcatcatcccttcttcataccaacggtccctagttataggaatttaatatttttaaaagttttacattgctgtatattcaaagatttgttttattaatatgcaataaaggcttagaaattttagttttattccttaattggtaaatatggttaactatggaatatatttacttcctctagtgaatgtcctttatataatgactaatttgggagtaatgtgtgctctgtaagtttgttttaaattgcactgtttttaaagaaactgtagaggagcaacaaaaatccaagcaacttcataatcagattatgctaatcatttagttgagcagtttttgaccaagaatcagaagcccaaggggtacatttattgctttaatctgcactcattgaagtcatttattaccatatactacagctttgtggtaggccattattttcattttcatttttggctcttcagaaacttgaatacttaagcttgtacatgatcttgtgttttgctatcctttttactgtaaaatgtaaatattttaagggatattttgattctaaatatgataaaataatttctcaccta

SEQ ID NO: 446578 - DNA, 4219 bp, Homo sapiens
aggcccgtctcgcaggcccccggatccggccgttggggcctcttccttctcagggagccccagcatggagctttgggccttggtttcgggaaactgggactggccctggctgctaggctgctccctgctgctgctttttggagatgagagttgctcttccatttatcctccagttaccgcgcgcttttgtgcccgggactcaaactgtggactccttttgcttagtttgaaatgagaagcctagactcttgccttccgataatacatgtaatttaatgaaccacttgtcgatacggctgaaagacacacagaagtcttcatggatatagttgatacatttaatcatttaattcctactgaacacttagatgatgccctatttctaggatccaacctggagaatgaagtctgtgaggattttagtgcaagtcaaaatgtcttagaggactcgctgaagaacatgctcagcgataaggatcctatgctaggatctgcaagtaaccagttctgtttgcctgttttggatagcaatgatcccaatttccagatgccttgttcaacagaacaagtaagaagtttgcgacagagcactattgccaagcgttcaaatgcagcaccattaagtaacacaaaaaaagcatctgggaagactgtatctactgctaaagcaggagtgaaacaaccagaaaggagtcaggttaaagaagaagtatgtatgtcactgaaacctgagtaccataaggagaatagaaggtgcagccgaaatagcggacaaattgaagtggtacctgaagtatcagtgtcttcaagtcattcttcagtgtcatcttgtcttgaaatgaaggatgaagatggattagattctaagcataagtgtaataatccgggagaaatagatgtgccatctcatgaattaaattgttcacttctttcagagacttgtgttactattggagaaaagaaaaatgaagctttgatggaatgtaaagccaagcctgttggtagtccattgtttaagttttcagataaagaagaacatgaacaaaatgattccatttcaggtaaaacgggtgagactgttgttgaagaaatgatagcaacaagaaaagttgaacaagattcaaaggagacagtaaaattatcccatgaagatgaccatattcttgaggacgctggatcttctgatatttctagtgatgctgcttgtacaaatccaaataagacagaaaacagccttgtaggtttgcctagttgtgtagatgaagtgactgaatgtaatttggaattgaaggataccatgggtattgctgataaaactgagaacacccttgaaagaaataaaattgaaccgttgggttattgtgaagatgcggagtctaataggcagttggagagcactgagtttaataaatcaaacttagaggtggttgatactagtacttttggaccggaaagtaatatcttggaaaatgctatttgtgatgtgcctgaccaaaattcaaaacagttgaatgctatagaaagtactaaaatagagtcccatgaaacagcaaaccttcaggatgacagaaacagccagtcaagtagcgtttcttacttagagtcaaaaagtgtaaaatccaaacatacaaaacctgtaattcattctaagcaaaacatgaccacagatgctccgaagaaaattgttgcagcaaagtatgaagtaatacatagcaaaactaaagttaatgtcaaaagtgtgaaacgaaatactgatgtaccagaatctcagcaaaattttcataggccagtcaaagtcagaaaaaaacaaattgataaggagccaaagattcagagttgcaattctggggttaaatctgtgaaaaaccaagctcattctgtactgaaaaaaacattacaggatcaaactttagtacaaattttcaagcccttaactcattctttgagtgataagtcacacgctcatcctggttgcttgaaagaacctcatcatcctgcacaaactggacatgtatcacattctagccagaaacagtgtcataagcctcagcaacaggccccagcaatgaaaaccaatagtcacgtgaaggaagagcttgaacacccaggcgttgagcattttaaggaagaggataaactgaaactgaaaaaacctgagagaatcaacctactactctggaattagcaaataaacctcttcctgtggatgatatacttcaaagccttttgggcaccactggtcaagtatatgaccaggcccagtcagtgatggaacaaaacactgttaaagaaattccatttttaaatgagcagaccaactcaaaaatagagaaaacagataatgtggaagtaactgatggtgaaaacaaggagataaaagttaaagtagataatatttcagaatctacagataagtcagcagaaatagaaacatcagtagtagggtcctcttccatttctgcagggtctttgacgagtcttagtctcagaggtaagccaccagatgtttctacagaagcatttttaacaaatttatcaattcagtcaaaacaagaggaaactgtggagagtaaagagaaaacattaaaaagacagcttcaggaagatcaagagaataatttgcaagataaccagacttcaaatagttctccatgcagatctaatgtaggaaaaggaaacatagatggtaatgtgagctgtagtgaaaaccttgttgctaatacagcgaggtctccacagtttatcaacctgaaaagggatcctaggcaagcagcaggacgaagtcagcctgtaactacttcagaaagcaaagatggagatagttgccggaatggagaaaaacacatgctgcctggcctgtcacacaacaaggagcacttaacagaacaaatcaatgtagaggaaaagttgtgttctgcagagaaaaactcgtgtgttcagcagagtgacaatttaaaagttgcacaaaactcaccatcagtagaaaacatacagacttctcaagcagaacaagcaaaacccttacaggaggatattttaatgcaaaatattgaaactgtgcacccatttcgaagaggatcagcagtagcgacatctcattttgaagttggaaacacatgtccatcagaatttccttctaaaagcatcacctttacttccagaagcaccagccccagaacaagtacaaacttttcacccatgaggccacagcagcccaaccttcagcatctcaagtctagcccacctggatttccatttccagggcctcctaattttcccccacaaagcatgtttggatttccaccacatttgccacctccattacttccccctccaggctttggctttgctcaaaatcccatggttccctggccacctgttgttcatctcccaggtcagccacagcgtatgatgggtcctctctcacaagcatcaaggtatataggcccgcagaatttttaccaggttaaagacattcggaggccagaaaggcgccatagtgacccttggggtaggcaagaccaacagcaactggataggccatttaataggggtaaaggggaccgccagagattttatagtgattcacaccatttgaaaagagagcgacatgaaaaggaatgggagcaagaatctgaaaggcatagacgcagagacagaagccaagacaaggacagagacagaaaaagcagggaggaagggcacaaagataaagagagggcacggttatcacatggtgatcgaggaacagatggaaaagcaagcagagatagtaggaatgtagacaagaagccagataaacctaaaagtgaagactatgagaaggacaaagaacgagagaaaagtaaacacagagaaggagaaaaggacagggataggtaccacaaagatagggaccacactgacagaactaaaagcaaaaggtaaaatttgcaggctgcttcaggattacatttaaataactgttaaaatgttgtatcttgtaaacaaaagaaagattgcctgctaggattgtgccatctttaaaatttttactattggtcatttgcagaacagtaaattctgtgtgttggtacagagtgctctgtaccagtgctcatcatcccttcttcataccaacggtccctagttataggaatttaatatttttaaaagttttacattgctgtatattcaaagatttgttttattaatatgcaataaaggcttagaaatttta

SEQ ID NO: 446579 - DNA, 6192 bp, Homo sapiens
aggcccgtctcgcaggcccccggatccggccgttggggcctcttccttctcagggagccccagcatggagctttgggccttggtttcgggaaactgggactggccctggctgctaggctgctccctgctgctgctttttggagatgagagttgctcttccatttatcctccagttaccgcgcgcttttgtgcccgggactcaaactgtggactccttttgcttagtttgaaatgagaagcctagactcttgccttccgataatacatgtaatttaatgaaccacttgtcgatacggctgaaagacacacagaagtcttcatggatatagttgatacatttaatcatttaattcctactgaacacttagatgatgccctatttctaggatccaacctggagaatgaagtctgtgaggattttagtgcaagtcaaaatgtcttagaggactcgctgaagaacatgctcagcgataaggatcctatgctaggatctgcaagtaaccagttctgtttgcctgttttggatagcaatgatcccaatttccagatgccttgttcaacagaacaagtaagaagtttgcgacagagcactattgccaagcgttcaaatgcagcaccattaagtaacacaaaaaaagcatctgggaagactgtatctactgctaaagcaggagtgaaacaaccagaaaggagtcaggttaaagaagaagtatgtatgtcactgaaacctgagtaccataaggagaatagaaggtgcagccgaaatagcggacaaattgaagtggtacctgaagtatcagtgtcttcaagtcattcttcagtgtcatcttgtcttgaaatgaaggatgaagatggattagattctaagcataagtgtaataatccgggagaaatagatgtgccatctcatgaattaaattgttcacttctttcagagacttgtgttactattggagaaaagaaaaatgaagctttgatggaatgtaaagccaagcctgttggtagtccattgtttaagttttcagataaagaagaacatgaacaaaatgattccatttcaggtaaaacgggtgagactgttgttgaagaaatgatagcaacaagaaaagttgaacaagattcaaaggagacagtaaaattatcccatgaagatgaccatattcttgaggacgctggatcttctgatatttctagtgatgctgcttgtacaaatccaaataagacagaaaacagccttgtaggtttgcctagttgtgtagatgaagtgactgaatgtaatttggaattgaaggataccatgggtattgctgataaaactgagaacacccttgaaagaaataaaattgaaccgttgggttattgtgaagatgcggagtctaataggcagttggagagcactgagtttaataaatcaaacttagaggtggttgatactagtacttttggaccggaaagtaatatcttggaaaatgctatttgtgatgtgcctgaccaaaattcaaaacagttgaatgctatagaaagtactaaaatagagtcccatgaaacagcaaaccttcaggatgacagaaacagccagtcaagtagcgtttcttacttagagtcaaaaagtgtaaaatccaaacatacaaaacctgtaattcattctaagcaaaacatgaccacagatgctccgaagaaaattgttgcagcaaagtatgaagtaatacatagcaaaactaaagttaatgtcaaaagtgtgaaacgaaatactgatgtaccagaatctcagcaaaattttcataggccagtcaaagtcagaaaaaaacaaattgataaggagccaaagattcagagttgcaattctggggttaaatctgtgaaaaaccaagctcattctgtactgaaaaaaacattacaggatcaaactttagtacaaattttcaagcccttaactcattctttgagtgataagtcacacgctcatcctggttgcttgaaagaacctcatcatcctgcacaaactggacatgtatcacattctagccagaaacagtgtcataagcctcagcaacaggccccagcaatgaaaaccaatagtcacgtgaaggaagagcttgaacacccaggcgttgagcattttaaggaagaggataaactgaaactgaaaaaacctgagaagaacctacaaccccgccaaagaagaagcagcaaaagtttttctttagatgagccaccattgttcattccagataacatagctaccataagaagagaaggctctgatcatagctcctcatttgaaagcaaatatatgtggactcccagcaagcagtgtgggttttgcaaaaaaccacatggcaacaggtttatggttggctgtgggagatgtgatgactggtttcatggtgattgtgttgggttaagtctttctcaagcacagcagatgggcgaggaagacaaagaatatgtctgtgtaaaatgttgtgctgaagaagacaaaaagactgaaatactagatccagatactttggaaaaccaagctacagttgaattccatagtggagataaaacaatggagtgtgaaaagcttggattatcaaaacacacaacaaatgatagaaccaaatatatagatgatacagtgaagcacaaggtcaaaattttaaaacgggagtctggtgaaggcagaaattcatcagactgtagagataatgaaattaaaaaatggcagctagctcctcttcgtaagatgggacaaccagttttacctcggagatcctcagaagaaaaaagtgaaaaaataccgaaagagtctacaactgttacttgcacaggagaaaaagcttcaaaaccaggtactcatgagaagcaagagatgaaaaagaagaaagttgaaaaaggagtgcttaatgtacatcctgctgcttctgcttccaagccttctgcagatcagatcaggcaaagtgtcagacattctctcaaagacattcttatgaagagacttacagactcaaatttgaaggtaccagaggaaaaggcagcaaaagttgccacaaaaattgagaaagagcttttctctttttttcgggacacagatgctaaatataagaacaaatatagaagtttgatgtttaatttgaaagatcctaaaaacaatatattatttaaaaaagtactgaaaggagaagtaactcctgatcatcttatcagaatgagtccagaagaactagcttctaaagagttagctgcttggagacgaagagaaaacagacataccatagaaatgattgagaaagagcagagagaagtggaacgacggccaatcaccaaaataactcataaaggtgaaatagaaattgagagtgatgccccaatgaaagaacaggaagcagccatggagattcaggaaccagccgccaataagtcattggagaagccagaaggatctgaaaaacaaaaagaggaggttgactctatgtctaaagataccactagtcaacacagacagcatctttttgatctcaactgcaaaatctgcataggtcgaatggcaccacctgtagatgatctttctccaaaaaaagtaaaagttgttgtaggagtagctcgcaaacattcagacaatgaagcagaaagtatagcagatgcattatcttcaacctcaaatattttggcttctgaattctttgaggaggagaaacaggagtctccaaagtcaacgttctctcctgctccacgtccagagatgcctggaactgttgaagttgagtctacctttctggctcgattgaacttcatctggaaaggttttatcaacatgccttctgtggcaaaatttgttaccaaagcctatccagtatctggctccccagaatacctgacagaggacctaccagatagtattcaagtaggtggcaggatatcacctcagacagtttgggattatgtggaaaaaataaaagcatcaggaaccaaggaaatttgtgtggttcgcttcacaccagtaactgaagaagatcaaatttcttatactttgctctttgcatacttcagtagcagaaagcgctatggagtagctgctaacaacatgaagcaggttaaagatatgtaccttattcctttgggtgccacagataaaattccacaccctcttgtgccttttgatggacctgggcttgaactgcatagacctaatctattgttgggcttaattattcgtcagaaactgaagcgacagcacagtgcctgtgctagtactagtcatatagctgagactcctgaaagtgcaccaccaatagcattgccacctgataaaaaaagtaaaatagaagtttctacagaagaagcaccagaggaagaaaatgacttttttaattcttttacaactgtattacacaagcagagaaataaacctcagcagaatcttcaggaagaccttccaacagcagttgaacctttaatggaagtcaccaaacaggagccaccaaaacctttaagatttcttcctggcgtgttgattggctgggagaatcaacctactactctggaattagcaaataaacctcttcctgtggatgatatacttcaaagccttttgggcaccactggtcaagtatatgaccaggcccagtcagtgatggaacaaaacactgttaaagaaattccatttttaaatgagcagaccaactcaaaaatagagaaaacagataatgtggaagtaactgatggtgaaaacaaggagataaaagttaaagtagataatatttcagaatctacagataagtcagcagaaatagaaacatcagtagtagggtcctcttccatttctgcagggtctttgacgagtcttagtctcagaggtaagccaccagatgtttctacagaagcatttttaacaaatttatcaattcagtcaaaacaagaggaaactgtggagagtaaagagaaaacattaaaaagacagcttcaggaagatcaagagaataatttgcaagataaccagacttcaaatagttctccatgcagatctaatgtaggaaaaggaaacatagatggtaatgtgagctgtagtgaaaaccttgttgctaatacagcgaggtctccacagtttatcaacctgaaaagggatcctaggcaagcagcaggacgaagtcagcctgtaactacttcagaaagcaaagatggagatagttgccggaatggagaaaaacacatgctgcctggcctgtcacacaacaaggagcacttaacagaacaaatcaatgtagaggaaaagttgtgttctgcagagaaaaactcgtgtgttcagcagagtgacaatttaaaagttgcacaaaactcaccatcagtagaaaacatacagacttctcaagcagaacaagcaaaacccttacaggaggatattttaatgcaaaatattgaaactgtgcacccatttcgaagaggatcagcagtagcgacatctcattttgaagttggaaacacatgtccatcagaatttccttctaaaagcatcacctttacttccagaagcaccagccccagaacaagtacaaacttttcacccatgaggccacagcagcccaaccttcagcatctcaagtctagcccacctggatttccatttccagggcctcctaattttcccccacaaagcatgtttggatttccaccacatttgccacctccattacttccccctccaggctttggctttgctcaaaatcccatggttccctggccacctgttgttcatctcccaggtcagccacagcgtatgatgggtcctctctcacaagcatcaaggtatataggcccgcagaatttttaccaggttaaagacattcggaggccagaaaggcgccatagtgacccttggggtaggcaagaccaacagcaactggataggccatttaataggggtaaaggggaccgccagagattttatagtgattcacaccatttgaaaagagagcgacatgaaaaggaatgggagcaagaatctgaaaggcatagacgcagagacagaagccaagacaaggacagagacagaaaaagcagggaggaagggcacaaagataaagagagggcacggttatcacatggtgatcgaggaacagatggaaaagcaagcagagatagtaggaatgtagacaagaagccagataaacctaaaagtgaagactttcaagactatcgagacctgctcgc

SEQ ID NO: 446580 - DNA, 2760 bp, Homo sapiens
aggcccgtctcgcaggcccccggatccggccgttggggcctcttccttctcagggagccccagcatggagctttgggccttggtttcgggaaactgggactggccctggctgctaggctgctccctgctgctgctttttggagatgagagttgctcttccatttatcctccagttaccgcgcgcttttgtgcccgggactcaaactgtggactccttttgcttagtttgaaatgagaagcctagactcttgccttccgataatacatgtaatttaatgaaccacttgtcgatacggctgaaagacacacagaagtcttcatggatatagttgatacatttaatcatttaattcctactgaacacttagatgatgccctatttctaggatccaacctggagaatgaagtctgtgaggattttagtgcaagtcaaaatgtcttagaggactcgctgaagaacatgctcagcgataaggatcctatgctaggatctgcaagtaaccagttctgtttgcctgttttggatagcaatgatcccaatttccagatgccttgttcaacagaacaagtaagaagtttgcgacagagcactattgccaagcgttcaaatgcagcaccattaagtaacacaaaaaaagcatctgggaagactgtatctactgctaaagcaggagtgaaacaaccagaaaggagtcaggttaaagaagaagtatgtatgtcactgaaacctgagtaccataaggagaatagaaggtgcagccgaaatagcggacaaattgaagtggtacctgaagtatcagtgtcttcaagtcattcttcagtgtcatcttgtcttgaaatgaaggatgaagatggattagattctaagcataagtgtaataatccgggagaaatagatgtgccatctcatgaattaaattgttcacttctttcagagacttgtgttactattggagaaaagaaaaatgaagctttgatggaatgtaaagccaagcctgttggtagtccattgtttaagttttcagataaagaagaacatgaacaaaatgattccatttcaggtaaaacgggtgagactgttgttgaagaaatgatagcaacaagaaaagttgaacaagattcaaaggagacagtaaaattatcccatgaagatgaccatattcttgaggacgctggatcttctgatatttctagtgatgctgcttgtacaaatccaaataagacagaaaacagccttgtaggtttgcctagttgtgtagatgaagtgactgaatgtaatttggaattgaaggataccatgggtattgctgataaaactgagaacacccttgaaagaaataaaattgaaccgttgggttattgtgaagatgcggagtctaataggcagttggagagcactgagtttaataaatcaaacttagaggtggttgatactagtacttttggaccggaaagtaatatcttggaaaatgctatttgtgatgtgcctgaccaaaattcaaaacagttgaatgctatagaaagtactaaaatagagtcccatgaaacagcaaaccttcaggatgacagaaacagccagtcaagtagcgtttcttacttagagtcaaaaagtgtaaaatccaaacatacaaaacctgtaattcattctaagcaaaacatgaccacagatgctccgaagaaaattgttgcagcaaagtatgaagtaatacatagcaaaactaaagttaatgtcaaaagtgtgaaacgaaatactgatgtaccagaatctcagcaaaattttcataggccagtcaaagtcagaaaaaaacaaattgataaggagccaaagattcagagttgcaattctggggttaaatctgtgaaaaaccaagctcattctgtactgaaaaaaacattacaggatcaaactttagtacaaattttcaagcccttaactcattctttgagtgataagtcacacgctcatcctggttgcttgaaagaacctcatcatcctgcacaaactggacatgtatcacattctagccagaaacagtgtcataagcctcagcaacaggccccagcaatgaaaaccaatagtcacgtgaaggaagagcttgaacacccaggcgttgagcattttaaggaagaggataaactgaaactgaaaaaacctgagaagaacctacaaccccgccaaagaagaagcagcaaaagtttttctttagatgagccaccattgttcattccagataacatagctaccataagaagagaaggctctgatcatagctcctcatttgaaagcaaatatatgtggactcccagcaagcagtgtgggttttgcaaaaaaccacatggcaacaggtgtgtgtgtatgtgtgtatgagtgatgtgtacattgaaaataaattgcttttttgggggtgggattaatgtgagaattgttttaaagacattatttgatacacagagacctgtgcaaaaacaaaaagcttcatcagtcttggataaatgatagaaagatggatctactgaatttacaaatatatcatcctagaacatttaaaaaagcatagtctggccaacagctgacatacatggaaatattttgtcattgtcacaggttagacagtgtaatttagccactgcatctgcaaaaaagccaaacacttcctggtaattggaaaattgttatactgctttgggtctgtaagttatatattaattcatttggtgtgagaagaactagtaataaagtatgaaggtcataatggaaat

SEQ ID NO: 446581 - DNA, 533 bp, Homo sapiens
atggatgaaggagttgttaaagaaagtggcaatgataccattgatgaagaagaactgattttacctaacaggaacttaagggacaaggtagaagaaaattcagtgagatctccaagaaaatcacctcgtttaatggcacaaggtaatcctttgagagaggtctagctagaaaattagaggtatagggacagatgtgttaggttataaacctgctgagcagaaatcatattttcttgatgttttgctaatccattcgttttgatggcaatcagttttgagatcatatcaatttgttgtataagttttcagtacccaccaccccacactacccatttctccttccccaggggaaaccactagtaactctgagctggtttaatttttttttttttttttttttttggtatttacctttatagctctaggtaacatgcatatgttgctgttttttgattattctgatttattattcatccatctattgacttcccactgtggatggttttcttcctgctacttgtccccatcatata

SEQ ID NO: 446582 - DNA, 7023 bp, Homo sapiens
aggcccgtctcgcaggcccccggatccggccgttggggcctcttccttctcagggagccccagcatggagctttgggccttggtttcgggaaactgggactggccctggctgctaggctgctccctgctgctgctttttggagatgagagttgctcttccatttatcctccagttaccgcgcgcttttgtgcccgggactcaaactgtggactccttttgcttagtttgaaatgagaagcctagactcttgccttccgataatacatgtaatttaatgaaccacttgtcgatacggctgaaagacacacagaagtcttcatggatatagttgatacatttaatcatttaattcctactgaacacttagatgatgccctatttctaggatccaacctggagaatgaagtctgtgaggattttagtgcaagtcaaaatgtcttagaggactcgctgaagaacatgctcagcgataaggatcctatgctaggatctgcaagtaaccagttctgtttgcctgttttggatagcaatgatcccaatttccagatgccttgttcaacagaacaagtaagaagtttgcgacagagcactattgccaagcgttcaaatgcagcaccattaagtaacacaaaaaaagcatctgggaagactgtatctactgctaaagcaggagtgaaacaaccagaaaggagtcaggttaaagaagaagtatgtatgtcactgaaacctgagtaccataaggagaatagaaggtgcagccgaaatagcggacaaattgaagtggtacctgaagtatcagtgtcttcaagtcattcttcagtgtcatcttgtcttgaaatgaaggatgaagatggattagattctaagcataagtgtaataatccgggagaaatagatgtgccatctcatgaattaaattgttcacttctttcagagacttgtgttactattggagaaaagaaaaatgaagctttgatggaatgtaaagccaagcctgttggtagtccattgtttaagttttcagataaagaagaacatgaacaaaatgattccatttcaggtaaaacgggtgagactgttgttgaagaaatgatagcaacaagaaaagttgaacaagattcaaaggagacagtaaaattatcccatgaagatgaccatattcttgaggacgctggatcttctgatatttctagtgatgctgcttgtacaaatccaaataagacagaaaacagccttgtaggtttgcctagttgtgtagatgaagtgactgaatgtaatttggaattgaaggataccatgggtattgctgataaaactgagaacacccttgaaagaaataaaattgaaccgttgggttattgtgaagatgcggagtctaataggcagttggagagcactgagtttaataaatcaaacttagaggtggttgatactagtacttttggaccggaaagtaatatcttggaaaatgctatttgtgatgtgcctgaccaaaattcaaaacagttgaatgctatagaaagtactaaaatagagtcccatgaaacagcaaaccttcaggatgacagaaacagccagtcaagtagcgtttcttacttagagtcaaaaagtgtaaaatccaaacatacaaaacctgtaattcattctaagcaaaacatgaccacagatgctccgaagaaaattgttgcagcaaagtatgaagtaatacatagcaaaactaaagttaatgtcaaaagtgtgaaacgaaatactgatgtaccagaatctcagcaaaattttcataggccagtcaaagtcagaaaaaaacaaattgataaggagccaaagattcagagttgcaattctggggttaaatctgtgaaaaaccaagctcattctgtactgaaaaaaacattacaggatcaaactttagtacaaattttcaagcccttaactcattctttgagtgataagtcacacgctcatcctggttgcttgaaagaacctcatcatcctgcacaaactggacatgtatcacattctagccagaaacagtgtcataagcctcagcaacaggccccagcaatgaaaaccaatagtcacgtgaaggaagagcttgaacacccaggcgttgagcattttaaggaagaggataaactgaaactgaaaaaacctgagaagaacctacaaccccgccaaagaagaagcagcaaaagtttttctttagatgagccaccattgttcattccagataacatagctaccataagaagagaaggctctgatcatagctcctcatttgaaagcaaatatatgtggactcccagcaagcagtgtgggttttgcaaaaaaccacatggcaacaggtttatggttggctgtgggagatgtgatgactggtttcatggtgattgtgttgggttaagtctttctcaagcacagcagatgggcgaggaagacaaagaatatgtctgtgtaaaatgttgtgctgaagaagacaaaaagactgaaatactagatccagatactttggaaaaccaagctacagttgaattccatagtggagataaaacaatggagtgtgaaaagcttggattatcaaaacacacaacaaatgatagaaccaaatatatagatgatacagtgaagcacaaggtcaaaattttaaaacgggagtctggtgaaggcagaaattcatcagactgtagagataatgaaattaaaaaatggcagctagctcctcttcgtaagatgggacaaccagttttacctcggagatcctcagaagaaaaaagtgaaaaaataccgaaagagtctacaactgttacttgcacaggagaaaaagcttcaaaaccaggtactcatgagaagcaagagatgaaaaagaagaaagttgaaaaaggagtgcttaatgtacatcctgctgcttctgcttccaagccttctgcagatcagatcaggcaaagtgtcagacattctctcaaagacattcttatgaagagacttacagactcaaatttgaaggtaccagaggaaaaggcagcaaaagttgccacaaaaattgagaaagagcttttctctttttttcgggacacagatgctaaatataagaacaaatatagaagtttgatgtttaatttgaaagatcctaaaaacaatatattatttaaaaaagtactgaaaggagaagtaactcctgatcatcttatcagaatgagtccagaagaactagcttctaaagagttagctgcttggagacgaagagaaaacagacataccatagaaatgattgagaaagagcagagagaagtggaacgacggccaatcaccaaaataactcataaaggtgaaatagaaattgagagtgatgccccaatgaaagaacaggaagcagccatggagattcaggaaccagccgccaataagtcattggagaagccagaaggatctgaaaaacaaaaagaggaggttgactctatgtctaaagataccactagtcaacacagacagcatctttttgatctcaactgcaaaatctgcataggtcgaatggcaccacctgtagatgatctttctccaaaaaaagtaaaagttgttgtaggagtagctcgcaaacattcagacaatgaagcagaaagtatagcagatgcattatcttcaacctcaaatattttggcttctgaattctttgaggaggagaaacaggagtctccaaagtcaacgttctctcctgctccacgtccagagatgcctggaactgttgaagttgagtctacctttctggctcgattgaacttcatctggaaaggttttatcaacatgccttctgtggcaaaatttgttaccaaagcctatccagtatctggctccccagaatacctgacagaggacctaccagatagtattcaagtaggtggcaggatatcacctcagacagtttgggattatgtggaaaaaataaaagcatcaggaaccaaggaaatttgtgtggttcgcttcacaccagtaactgaagaagatcaaatttcttatactttgctctttgcatacttcagtagcagaaagcgctatggagtagctgctaacaacatgaagcaggttaaagatatgtaccttattcctttgggtgccacagataaaattccacaccctcttgtgccttttgatggacctgggcttgaactgcatagacctaatctattgttgggcttaattattcgtcagaaactgaagcgacagcacagtgcctgtgctagtactagtcatatagctgagactcctgaaagtgcaccaccaatagcattgccacctgataaaaaaagtaaaatagaagtttctacagaagaagcaccagaggaagaaaatgacttttttaattcttttacaactgtattacacaagcagagaaataaacctcagcagaatcttcaggaagaccttccaacagcagttgaacctttaatggaagtcaccaaacaggagccaccaaaacctttaagatttcttcctggcgtgttgattggctgggagaatcaacctactactctggaattagcaaataaacctcttcctgtggatgatatacttcaaagccttttgggcaccactggtcaagtatatgaccaggcccagtcagtgatggaacaaaacactgttaaagaaattccatttttaaatgagcagaccaactcaaaaatagagaaaacagataatgtggaagtaactgatggtgaaaacaaggagataaaagttaaagtagataatatttcagaatctacagataagtcagcagaaatagaaacatcagtagtagggtcctcttccatttctgcagggtctttgacgagtcttagtctcagaggtaagccaccagatgtttctacagaagcatttttaacaaatttatcaattcagtcaaaacaagaggaaactgtggagagtaaagagaaaacattaaaaagacagcttcaggaagatcaagagaataatttgcaagataaccagacttcaaatagttctccatgcagatctaatgtaggaaaaggaaacatagatggtaatgtgagctgtagtgaaaaccttgttgctaatacagcgaggtctccacagtttatcaacctgaaaagggatcctaggcaagcagcaggacgaagtcagcctgtaactacttcagaaagcaaagatggagatagttgccggaatggagaaaaacacatgctgcctggcctgtcacacaacaaggagcacttaacagaacaaatcaatgtagaggaaaagttgtgttctgcagagaaaaactcgtgtgttcagcagagtgacaatttaaaagttgcacaaaactcaccatcagtagaaaacatacagacttctcaagcagaacaagcaaaacccttacaggaggatattttaatgcaaaatattgaaactgtgcacccatttcgaagaggatcagcagtagcgacatctcattttgaagttggaaacacatgtccatcagaatttccttctaaaagcatcacctttacttccagaagcaccagccccagaacaagtacaaacttttcacccatgaggccacagcagcccaaccttcagcatctcaagtctagcccacctggatttccatttccagggcctcctaattttcccccacaaagcatgtttggatttccaccacatttgccacctccattacttccccctccaggctttggctttgctcaaaatcccatggttccctggccacctgttgttcatctcccaggtcagccacagcgtatgatgggtcctctctcacaagcatcaaggtatataggcccgcagaatttttaccaggttaaagacattcggaggccagaaaggcgccatagtgacccttggggtaggcaagaccaacagcaactggataggccatttaataggggtaaaggggaccgccagagattttatagtgattcacaccatttgaaaagagagcgacatgaaaaggaatgggagcaagaatctgaaaggcatagacgcagagacagaagccaagacaaggacagagacagaaaaagcagggaggaagggcacaaagataaagagagggcacggttatcacatggtgatcgaggaacagatggaaaagcaagcagagatagtaggaatgtagacaagaagccagataaacctaaaagtgaagactatgagaaggacaaagaacgagagaaaagtaaacacagagaaggagaaaaggacagggataggtaccacaaagatagggaccacactgacagaactaaaagcaaaaggtaaaatttgcaggctgcttcaggattacatttaaataactgttaaaatgttgtatcttgtaaacaaaagaaagattgcctgctaggattgtgccatctttaaaatttttactattggtcatttgcagaacagtaaattctgtgtgttggtacagagtgctctgtaccagtgctcatcatcccttcttcataccaacggtccctagttataggaatttaatatttttaaaagttttacattgctgtatattcaaagatttgttttattaatatgcaataaaggcttagaaattttagttttattccttaattggtaaatatggttaactatggaatatatttacttcctctagtgaatgtcctttatataatgactaatttgggagtaatgtgtgctctgtaagtttgttttaaattgcactgtttttaaagaaactgtagaggagcaacaaaaatccaagcaacttcataatcagattatgctaatcatttagttgagcagtttttgaccaagaatcagaagcccaaggggtacatttattgctttaatctgcactcattgaagtcatttattaccatatactacagctttgtggtaggccattattttcattttcatttttggctcttcagaaacttgaatacttaagcttgtacatgatcttgtgttttgctatcctttttactgtaaaatgtaaatattttaagggatattttgattctaaatatgataaaataatttctcaccta

SEQ ID NO: 446583 - DNA, 6569 bp, Homo sapiens
aggcccgtctcgcaggcccccggatccggccgttggggcctcttccttctcagggagccccagcatggagctttgggccttggtttcgggaaactgggactggccctggctgctaggctgctccctgctgctgctttttggagatgagagttgctcttccatttatcctccagttaccgcgcgcttttgtgcccgggactcaaactgtggactccttttgcttagtttgaaatgagaagcctagactcttgccttccgataatacatgtaatttaatgaaccacttgtcgatacggctgaaagacacacagaagtcttcatggatatagttgatacatttaatcatttaattcctactgaacacttagatgatgccctatttctaggatccaacctggagaatgaagtctgtgaggattttagtgcaagtcaaaatgtcttagaggactcgctgaagaacatgctcagcgataaggatcctatgctaggatctgcaagtaaccagttctgtttgcctgttttggatagcaatgatcccaatttccagatgccttgttcaacagaacaagtaagaagtttgcgacagagcactattgccaagcgttcaaatgcagcaccattaagtaacacaaaaaaagcatctgggaagactgtatctactgctaaagcaggagtgaaacaaccagaaaggagtcaggttaaagaagaagtatgtatgtcactgaaacctgagtaccataaggagaatagaaggtgcagccgaaatagcggacaaattgaagtggtacctgaagtatcagtgtcttcaagtcattcttcagtgtcatcttgtcttgaaatgaaggatgaagatggattagattctaagcataagtgtaataatccgggagaaatagatgtgccatctcatgaattaaattgttcacttctttcagagacttgtgttactattggagaaaagaaaaatgaagctttgatggaatgtaaagccaagcctgttggtagtccattgtttaagttttcagataaagaagaacatgaacaaaatgattccatttcaggtaaaacgggtgagactgttgttgaagaaatgatagcaacaagaaaagttgaacaagattcaaaggagacagtaaaattatcccatgaagatgaccatattcttgaggacgctggatcttctgatatttctagtgatgctgcttgtacaaatccaaataagacagaaaacagccttgtaggtttgcctagttgtgtagatgaagtgactgaatgtaatttggaattgaaggataccatgggtattgctgataaaactgagaacacccttgaaagaaataaaattgaaccgttgggttattgtgaagatgcggagtctaataggcagttggagagcactgagtttaataaatcaaacttagaggtggttgatactagtacttttggaccggaaagtaatatcttggaaaatgctatttgtgatgtgcctgaccaaaattcaaaacagttgaatgctatagaaagtactaaaatagagtcccatgaaacagcaaaccttcaggatgacagaaacagccagtcaagtagcgtttcttacttagagtcaaaaagtgtaaaatccaaacatacaaaacctgtaattcattctaagcaaaacatgaccacagatgctccgaagaaaattgttgcagcaaagtatgaagtaatacatagcaaaactaaagttaatgtcaaaagtgtgaaacgaaatactgatgtaccagaatctcagcaaaattttcataggccagtcaaagtcagaaaaaaacaaattgataaggagccaaagattcagagttgcaattctggggttaaatctgtgaaaaaccaagctcattctgtactgaaaaaaacattacaggatcaaactttagtacaaattttcaagcccttaactcattctttgagtgataagtcacacgctcatcctggttgcttgaaagaacctcatcatcctgcacaaactggacatgtatcacattctagccagaaacagtgtcataagcctcagcaacaggccccagcaatgaaaaccaatagtcacgtgaaggaagagcttgaacacccaggcgttgagcattttaaggaagaggataaactgaaactgaaaaaacctgagaagaacctacaaccccgccaaagaagaagcagcaaaagtttttctttagatgagccaccattgttcattccagataacatagctaccataagaagagaaggctctgatcatagctcctcatttgaaagcaaatatatgtggactcccagcaagcagtgtgggttttgcaaaaaaccacatggcaacaggtttatggttggctgtgggagatgtgatgactggtttcatggtgattgtgttgggttaagtctttctcaagcacagcagatgggcgaggaagacaaagaatatgtctgtgtaaaatgttgtgctgaagaagacaaaaagactgaaatactagatccagatactttggaaaaccaagctacagttgaattccatagtggagataaaacaatggagtgtgaaaagcttggattatcaaaacacacaacaaatgatagaaccaaatatatagatgatacagtgaagcacaaggtcaaaattttaaaacgggagtctggtgaaggcagaaattcatcagactgtagagataatgaaattaaaaaatggcagctagctcctcttcgtaagatgggacaaccagttttacctcggagatcctcagaagaaaaaagtgaaaaaataccgaaagagtctacaactgttacttgcacaggagaaaaagcttcaaaaccaggtactcatgagaagcaagagatgaaaaagaagaaagttgaaaaaggagtgcttaatgtacatcctgctgcttctgcttccaagccttctgcagatcagatcaggcaaagtgtcagacattctctcaaagacattcttatgaagagacttacagactcaaatttgaaggtaccagaggaaaaggcagcaaaagttgccacaaaaattgagaaagagcttttctctttttttcgggacacagatgctaaatataagaacaaatatagaagtttgatgtttaatttgaaagatcctaaaaacaatatattatttaaaaaagtactgaaaggagaagtaactcctgatcatcttatcagaatgagtccagaagaactagcttctaaagagttagctgcttggagacgaagagaaaacagacataccatagaaatgattgagaaagagcagagagaagtggaacgacggccaatcaccaaaataactcataaaggtgaaatagaaattgagagtgatgccccaatgaaagaacaggaagcagccatggagattcaggaaccagccgccaataagtcattggagaagccagaaggatctgaaaaacaaaaagaggaggttgactctatgtctaaagataccactagtcaacacagacagcatctttttgatctcaactgcaaaatctgcataggtcgaatggcaccacctgtagatgatctttctccaaaaaaagtaaaagttgttgtaggagtagctcgcaaacattcagacaatgaagcagaaagtatagcagatgcattatcttcaacctcaaatattttggcttctgaattctttgaggaggagaaacaggagtctccaaagtcaacgttctctcctgctccacgtccagagatgcctggaactgttgaagttgagtctacctttctggctcgattgaacttcatctggaaaggttttatcaacatgccttctgtggcaaaatttgttaccaaagcctatccagtatctggctccccagaatacctgacagaggacctaccagatagtattcaagtaggtggcaggatatcacctcagacagtttgggattatgtggaaaaaataaaagcatcaggaaccaaggaaatttgtgtggttcgcttcacaccagtaactgaagaagatcaaatttcttatactttgctctttgcatacttcagtagcagaaagcgctatggagtagctgctaacaacatgaagcaggttaaagatatgtaccttattcctttgggtgccacagataaaattccacaccctcttgtgccttttgatggacctgggcttgaactgcatagacctaatctattgttgggcttaattattcgtcagaaactgaagcgacagcacagtgcctgtgctagtactagtcatatagctgagactcctgaaagtgcaccaccaatagcattgccacctgataaaaaaagtaaaatagaagtttctacagaagaagcaccagaggaagaaaatgacttttttaattcttttacaactgtattacacaagcagagaaataaacctcagcagaatcttcaggaagaccttccaacagcagttgaacctttaatggaagtcaccaaacaggagccaccaaaacctttaagatttcttcctggcgtgttgattggctgggagaatcaacctactactctggaattagcaaataaacctcttcctgtggatgatatacttcaaagccttttgggcaccactggtcaagtatatgaccaggcccagtcagtgatggaacaaaacactgttaaagaaattccatttttaaatgagcagaccaactcaaaaatagagaaaacagataatgtggaagtaactgatggtgaaaacaaggagataaaagttaaagtagataatatttcagaatctacagataagtcagcagaaatagaaacatcagtagtagggtcctcttccatttctgcagggtctttgacgagtcttagtctcagaggtaagccaccagatgtttctacagaagcatttttaacaaatttatcaattcagtcaaaacaagaggaaactgtggagagtaaagagaaaacattaaaaagacagcttcaggaagatcaagagaataatttgcaagataaccagacttcaaatagttctccatgcagatctaatgtaggaaaaggaaacatagatggtaatgtgagctgtagtgaaaaccttgttgctaatacagcgaggtctccacagtttatcaacctgaaaagggatcctaggcaagcagcaggacgaagtcagcctgtaactacttcagaaagcaaagatggagatagttgccggaatggagaaaaacacatgctgcctggcctgtcacacaacaaggagcacttaacagaacaaatcaatgtagaggaaaagttgtgttctgcagagaaaaactcgtgtgttcagcagagtgacaatttaaaagttgcacaaaactcaccatcagtagaaaacatacagacttctcaagcagaacaagcaaaacccttacaggaggatattttaatgcaaaatattgaaactgtgcacccatttcgaagaggatcagcagtagcgacatctcattttgaagttggaaacacatgtccatcagaatttccttctaaaagcatcacctttacttccagaagcaccagccccagaacaagtacaaacttttcacccatgaggccacagcagcccaaccttcagcatctcaagtctagcccacctggatttccatttccagggcctcctaattttcccccacaaagcatgtttggatttccaccacatttgccacctccattacttccccctccaggctttggctttgctcaaaatcccatggttccctggccacctgttgttcatctcccaggtcagccacagcgtatgatgggtcctctctcacaagcatcaaggtatataggcccgcagaatttttaccaggttaaagacattcggaggccagaaaggcgccatagtgacccttggggtaggcaagaccaacagcaactggataggccatttaataggggtaaaggggaccgccagagattttatagtgattcacaccatttgaaaagagagcgacatgaaaaggaatgggagcaagaatctgaaaggcatagacgcagagacagaagccaagacaaggacagagacagaaaaagcagggaggaagggcacaaagataaagagagggcacggttatcacatggtgatcgaggaacagatggaaaagcaagcagagatagtaggaatgtagacaagaagccagataaacctaaaagtgaagactatgagaaggacaaagaacgagagaaaagtaaacacagagaaggagaaaaggacagggataggtaccacaaagatagggaccacactgacagaactaaaagcaaaaggtaaaatttgcaggctgcttcaggattacatttaaataactgttaaaatgttgtatcttgtaaacaaaagaaagattgcctgctaggattgtgccatctttaaaatttttactattggtcatttgcagaacagtaaattctgtgtgttggtacagagtgctctgtaccagtgctcatcatcccttcttcataccaacggtccctagttataggaatttaatatttttaaaagttttacattgctgtatattcaaagatttgttttattaatatgcaataaaggcttagaaatttta

SEQ ID NO: 446584 - DNA, 7018 bp, Homo sapiens
aggcccgtctcgcaggcccccggatccggccgttggggcctcttccttctcagggagccccagcatggagctttgggccttggtttcgggaaactgggactggccctggctgctaggctgctccctgctgctgctttttggagatgagagttgctcttccatttatcctccagttaccgcgcgcttttgtgcccgggactcaaactgtggactccttttgcttagtttgaaatgagaagcctagactcttgccttccgataatacatgtaatttaatgaaccacttgtcgatacggctgaaagacacacagaagtcttcatggatatagttgatacatttaatcatttaattcctactgaacacttagatgatgccctatttctaggatccaacctggagaatgaagtctgtgaggattttagtgcaagtcaaaatgtcttagaggactcgctgaagaacatgctcagcgataaggatcctatgctaggatctgcaagtaaccagttctgtttgcctgttttggatagcaatgatcccaatttccagatgccttgttcaacagaacaagtaagaagtttgcgacagagcactattgccaagcgttcaaatgcagcaccattaagtaacacaaaaaaagcatctgggaagactgtatctactgctaaagcaggagtgaaacaaccagaaaggagtcaggttaaagaagaagtatgtatgtcactgaaacctgagtaccataaggagaatagaaggtgcagccgaaatagcggacaaattgaagtggtacctgaagtatcagtgtcttcaagtcattcttcagtgtcatcttgtcttgaaatgaaggatgaagatggattagattctaagcataagtgtaataatccgggagaaatagatgtgccatctcatgaattaaattgttcacttctttcagagacttgtgttactattggagaaaagaaaaatgaagctttgatggaatgtaaagccaagcctgttggtagtccattgtttaagttttcagataaagaagaacatgaacaaaatgattccatttcaggtaaaacgggtgagactgttgttgaagaaatgatagcaacaagaaaagttgaacaagattcaaaggagacagtaaaattatcccatgaagatgaccatattcttgaggacgctggatcttctgatatttctagtgatgctgcttgtacaaatccaaataagacagaaaacagccttgtaggtttgcctagttgtgtagatgaagtgactgaatgtaatttggaattgaaggataccatgggtattgctgataaaactgagaacacccttgaaagaaataaaattgaaccgttgggttattgtgaagatgcggagtctaataggcagttggagagcactgagtttaataaatcaaacttagaggtggttgatactagtacttttggaccggaaagtaatatcttggaaaatgctatttgtgatgtgcctgaccaaaattcaaaacagttgaatgctatagaaagtactaaaatagagtcccatgaaacagcaaaccttcaggatgacagaaacagccagtcaagtagcgtttcttacttagagtcaaaaagtgtaaaatccaaacatacaaaacctgtaattcattctaagcaaaacatgaccacagatgctccgaagaaaattgttgcagcaaagtatgaagtaatacatagcaaaactaaagttaatgtcaaaagtgtgaaacgaaatactgatgtaccagaatctcagcaaaattttcataggccagtcaaagtcagaaaaaaacaaattgataaggagccaaagattcagagttgcaattctggggttaaatctgtgaaaaaccaagctcattctgtactgaaaaaaacattacaggatcaaactttagtacaaattttcaagcccttaactcattctttgagtgataagtcacacgctcatcctggttgcttgaaagaacctcatcatcctgcacaaactggacatgtatcacattctagccagaaacagtgtcataagcctcagcaacaggccccagcaatgaaaaccaatagtcacgtgaaggaagagcttgaacacccaggcgttgagcattttaaggaagaggataaactgaaactgaaaaaacctgagaagaacctacaaccccgccaaagaagaagcagcaaaagtttttctttagatgagccaccattgttcattccagataacatagctaccataagaagagaaggctctgatcatagctcctcatttgaaagcaaatatatgtggactcccagcaagcagtgtgggttttgcaaaaaaccacatggcaacaggtttatggttggctgtgggagatgtgatgactggtttcatggtgattgtgttgggttaagtctttctcaagcacagcagatgggcgaggaagacaaagaatatgtctgtgtaaaatgttgtgctgaagaagacaaaaagactgaaatactagatccagatactttggaaaaccaagctacagttgaattccatagtggagataaaacaatggagtgtgaaaagcttggattatcaaaacacacaacaaatgatagaaccaaatatatagatgatacagtgaagcacaaggtcaaaattttaaaacgggagtctggtgaaggcagaaattcatcagactgtagagataatgaaattaaaaaatggcagctagctcctcttcgtaagatgggacaaccagttttacctcggagatcctcagaagaaaaaagtgaaaaaataccgaaagagtctacaactgttacttgcacaggagaaaaagcttcaaaaccaggtactcatgagaagcaagagatgaaaaagaagaaagttgaaaaaggagtgcttaatgtacatcctgctgcttctgcttccaagccttctgcagatcagatcaggcaaagtgtcagacattctctcaaagacattcttatgaagagacttacagactcaaatttgaaggtaccagaggaaaaggcagcaaaagttgccacaaaaattgagaaagagcttttctctttttttcgggacacagatgctaaatataagaacaaatatagaagtttgatgtttaatttgaaagatcctaaaaacaatatattatttaaaaaagtactgaaaggagaagtaactcctgatcatcttatcagaatgagtccagaagaactagcttctaaagagttagctgcttggagacgaagagaaaacagacataccatagaaatgattgagaaagagcagagagaagtggaacgacggccaatcaccaaaataactcataaaggtgaaatagaaattgagagtgatgccccaatgaaagaacaggaagcagccatggagattcaggaaccagccgccaataagtcattggagaagccagaaggatctgaaaaacaaaaagaggaggttgactctatgtctaaagataccactagtcaacacagacagcatctttttgatctcaactgcaaaatctgcataggtcgaatggcaccacctgtagatgatctttctccaaaaaaagtaaaagttgttgtaggagtagctcgcaaacattcagacaatgaagcagaaagtatagcagatgcattatcttcaacctcaaatattttggcttctgaattctttgaggaggagaaacaggagtctccaaagtcaacgttctctcctgctccacgtccagagatgcctggaactgttgaagttgagtctacctttctggctcgattgaacttcatctggaaaggttttatcaacatgccttctgtggcaaaatttgttaccaaagcctatccagtatctggctccccagaatacctgacagaggacctaccagatagtattcaagtaggtggcaggatatcacctcagacagtttgggattatgtggaaaaaataaaagcatcaggaaccaaggaaatttgtgtggttcgcttcacaccagtaactgaagaagatcaaatttcttatactttgctctttgcatacttcagtagcagaaagcgctatggagtagctgctaacaacatgaagcaggttaaagatatgtaccttattcctttgggtgccacagataaaattccacaccctcttgtgccttttgatggacctgggcttgaactgcatagacctaatctattgttgggcttaattattcgtcagaaactgaagcgacagcacagtgcctgtgctagtactagtcatatagctgagactcctgaaagtgcaccaccaatagcattgccacctgataaaaaaagtaaaatagaagtttctacagaagaagcaccagaggaagaaaatgacttttttaattcttttacaactgtattacacaagcagagaaataaacctcagcagaatcttcaggaagaccttccaacagcagttgaacctttaatggaagtcaccaaacaggagccaccaaaacctttaagatttcttcctggcgtgttgattggctgggagaatcaacctactactctggaattagcaaataaacctcttcctgtggatgatatacttcaaagccttttgggcaccactggtcaagtatatgaccaggcccagtcagtgatggaacaaaacactgttaaagaaattccatttttaaatgagcagaccaatcaaaatcccatggttccctggccacctgttgttcatctcccaggtcagccacagcgtatgatgggtcctctctcacaagcatcaaggtatataggcccgcagaatttttaccaggttaaagacattcggaggccagaaaggcgccatagtgacccttggggtaggcaagaccaacagcaactggataggccatttaataggggtaaaggggaccgccagagattttatagtgattcacaccatttgaaaagagagcgacatgaaaaggaatgggagcaagaatctgaaaggcatagacgcagagacagaagccaagacaaggacagagacagaaaaagcagggaggaagggcacaaagataaagagagggcacggttatcacatggtgatcgaggaacagatggaaaagcaagcagagatagtaggaatgtagacaagaagccagataaacctaaaagtgaagactatgagaaggacaaagaacgagagaaaagtaaacacagagaaggagaaaaggacagggataggtaccacaaagatagggaccacactgacagaactaaaagcaaaaggtaaaatttgcaggctgcttcaggattacatttaaataactgttaaaatgttgtatcttgtaaacaaaagaaagattgcctgctaggattgtgccatctttaaaatttttactattggtcatttgcagaacagtaaattctgtgtgttggtacagagtgctctgtaccagtgctcatcatcccttcttcataccaacggtccctagttataggaatttaatatttttaaaagttttacattgctgtatattcaaagatttgttttattaatatgcaataaaggcttagaaattttagttttattccttaattggtaaatatggttaactatggaatatatttacttcctctagtgaatgtcctttatataatgactaatttgggagtaatgtgtgctctgtaagtttgttttaaattgcactgtttttaaagaaactgtagaggagcaacaaaaatccaagcaacttcataatcagattatgctaatcatttagttgagcagtttttgaccaagaatcagaagcccaaggggtacatttattgctttaatctgcactcattgaagtcatttattaccatatactacagctttgtggtaggccattattttcattttcatttttggctcttcagaaacttgaatacttaagcttgtacatgatcttgtgttttgctatcctttttactgtaaaatgtaaatattttaagggatattttgattctaaatatgataaaataatttctcacctattttgtgtgtgtgacttgaaattcagtagtaaaagaatttcttctttaaagctttaattaccttcagacattgattttttgttactcagccaagaacatatagaaatagctatctatgtcaggcattagatgaggggaaaaacaatttttttaaaatcttaaattgtaggctgagatgaattgtgtagttctaaagaggctagaatttagaactacctgtgaaacactgtgcagctatagcccactttataggtaagtttctgaaaacttttacaccatcgcaatttggtactctgactcactaatcattaaaattaaagaccgcagaacttgaagagaaatatgttttgaatccttttataaaatgtgcgatttagcctaattcgtaaagtaactgtacagtttcatatgccagttttacttgaaaaaaaaatatgaaaactattgttaattcaaatctaaatttatttaaaccctaaaacacatggttttgatggctgtaatttaaagtaagagctatcaaatgatgctgacaaaagaaaaaccttccaaaatacaaaagaaagagaactctattatttacttacctgtattaatgaagaaaaatataaataattccacaaaattgattgttttcctaaagagcttaaagattagagttaaaaattggttttgaaacagaattatccttgttatttttgctggagagaagggaggaaattcagaaccaaacattctatttaatttgcaatgacttgcagtacttttttccctatccttatcctgtgaaacttactatcataaggttctaaaacagagaacttgtgtttaaataaagcccgtttaactttggtccacttttcttttggaaattaacttgttagaaaacaaagttagttcccaaacaaaacaaaatctaagttataatttgcaccattacaaagaaattgctgtcagggttttacacattttaaaaacatttcaatttcaaatgtgtatatcgtcaataaatctacctttactgata

SEQ ID NO: 446585 - DNA, 946 bp, Homo sapiens
agactgaggcaatgcgcatgcccagcgccgtatcgcgcacgcgctctctgcggctttccttgacctctgacccgccgaccacgcttgatccccggccgcggggccaggaagtcggagtttgagccccggaggcagagcggctgccatggccaagtacctggcccagatcattgtgatgggcgtgcaggtggtgggcagggcctttgcacgggccttgcggcaggagtttgcagccagccgggccgcagctgatgcccgaggacgcgctggacaccggtctgcagccgcttccaacctctccggcctcagcctccaggaggcacagcagattctcaacgtgtccaagctgagccctgaggaggtccagaagaactatgaacacttatttaaggtgaatgataaatccgtgggtggctccttctacctgcagtcaaaggtggtccgcgcaaaggagcgcctggatgaggaactcaaaatccaggcccaggaggacagagaaaaagggcagatgccccatacgtgactgctcggctccccccgcccaccccgccgcctctaatttatagcttggtaataaatttcttttctgcaaaaaaaaaaaataccaatttcactggcccggcggttttacaaacgtttttgaactgtgtaatatactcttggccgtttacccacactttataatctggcttttgtaggacaccaattctccccttttttggcccagactttgggcgttaaaatagtcctaatgaagggtctccgtatacccggaaatcggccccttttccccaaaccattttgtctcaaaaccctttgaaatgtgctccaaattgggtcaataaatttggttaaagcgcgtttaaaaaaatatttgggtttaaaaatattctgccggttttaaaaaatttatttgtgtgtacatctaagtctttcttttttttcc

SEQ ID NO: 446586 - DNA, 591 bp, Homo sapiens
agactgaggcaatgcgcatgcccagcgccgtatcgcgcacgcgctctctgcggctttccttgacctctgacccgccgaccacgcttgatccccggccgcggggccaggaagtcggagtttgagccccggaggcagagcggctgccatggccaagtacctggcccagatcattgtgatgggcgtgcaggtggtgggcagggcctttgcacgggccttgcggcaggagtttgcagccagccgggccgcagctgatgcccgaggacgcgctggacaccggtctgcagccgcttccaacctctccggcctcagcctccaggaggcacagcagattctcaacgtgtccaagctgagccctgaggaggtccagaagaactatgaacacttatttaaggtgaatgataaatccgtgggtggctccttctacctgcagtcaaaggtggtccgcgcaaaggagcgcctggatgaggaactcaaaatccaggcccaggaggacagagaaaaagggcagatgccccatacgtgactgctcggctccccccgcccaccccgccgcctctaatttatagcttggtaataaatttcttttctgca

SEQ ID NO: 446587 - DNA, 486 bp, Homo sapiens
cacagggagtggcctgctaaccgggtgcctgctttgcccacaggccaagtacctggcccagatcattgtgatgggcgtgcaggtggtgggcagggcctttgcacgggccttgcggcaggagtttgcagccagccgggccgcagctgatgcccgaggacgcgctggacaccggtctgcagccgcttccaacctctccggcctcagcctccaggaggcacagcagattctcaacgtgtccaagctgagccctgaggaggtccagaagaactatgaacacttatttaaggtgaatgataaatccgtgggtggctccttctacctgcagtcaaaggtggtccgcgcaaaggagcgcctggatgaggaactcaaaatccaggcccaggaggacagagaaaaagggcagatgccccatacgtgactgctcggctccccccgcccaccccgccgcctctaatttatagcttggtaataaatttcttttctgca

SEQ ID NO: 446588 - DNA, 759 bp, Homo sapiens
agactgaggcaatgcgcatgcccagcgccgtatcgcgcacgcgctctctgcggctttccttgacctctgacccgccgaccacgcttgatccccggccgcggggccaggaagtcggagtttgagccccggaggcagagcggctgccatggccaagtacctggcccagatcattgtgatgggcgtgcaggtggtgggcagggcctttgcacgggccttgcggcaggagtttgcagcctctaccccctaaaaaggaaaccactcctggagaagaggcagctcctagccacctgtccctgtgtctctcatcctgtgctggtggcaggggtgagccaccaactcggaaggcccagggtgaagtgtgggctgctgaggactgagcgatcacccacatgtccacacagccagccgggccgcagctgatgcccgaggacgcgctggacaccggtctgcagccgcttccaacctctccggcctcagcctccaggaggcacagcagattctcaacgtgtccaagctgagccctgaggaggtccagaagaactatgaacacttatttaaggtgaatgataaatccgtgggtggctccttctacctgcagtcaaaggtggtccgcgcaaaggagcgcctggatgaggaactcaaaatccaggcccaggaggacagagaaaaagggcagatgccccatacgtgactgctcggctccccccgcccaccccgccgcctctaatttatagcttggtaataaatttcttttctgca

SEQ ID NO: 446589 - DNA, 910 bp, Homo sapiens
agactgaggcaatgcgcatgcccagcgccgtatcgcgcacgcgctctctgcggctttccttgacctctgacccgccgaccacgcttgatccccggccgcggggccaggaagtcggagtttgagccccggaggcagagcggctgccatgtcattggccttggcagaaaagtaaacaagtgattgcaaggctgtacgatggcagcagagggaccgaaggctgttggtgtgaggggtagtctgagacctgagccgtgtttcaagccgaggggaccctctgactttcacctctgtccttcagacagcaccagcatcccatccctgagcctcctgttccactcgggaggggctttaggaaggaggcgaagtcaggtgagaccgcaggtgtcatcaggtgcatccctgaccctccctcatctgcagtacagccacagccctgcccctcgctgtgatcacaggagggtcttctctgggctctttctgctgtgaaatccagaagttatgaagtttccacctacttttgaaatcttaacccacttgtttgttcattcccctaatggcccataatgacatcccacctgttaaggaaagagcaggtcctcggaggctgaacaaggccagctctggagtcgaatccactggaatctggagcaagcccctctggcctcggggttgggttcttgatacttgtcggcttgcccaggtgccctaccttcagaccccgggaccctgcgtagtgactgctgtgacagatagcaccagccttgggtttccgatctgcctccgaggcacctgctgttacgtcctcgggccagtcagcagtcccccacccctgagttgtcagaattaaacggcacaatgaattgaacgtgtttggcaccgtgcctggtgtgtggactcagttgatacctgt

SEQ ID NO: 446590 - DNA, 1305 bp, Homo sapiens
ccctcctctcacggaaccccctcctctcacagaaccccctcctctcacacagaaccccctcctctcacacagaaccccctcctctcacggaaccccctcctctcacggaaccccctcctctcacggaacgccctcctctcacacagaaccccctcctctcaccgaatcccatctcagtcttgagttttccctcgactctgttgcttccgctcacatcttagtgagtccccagggcctctgcggggcatggaatcacacgtgcagtgttccggcatgttcagcctggtgtgtgacagtggggttccctgccaggccagcagtgtgctctgactcggggcagggaccaggttctgtgtagctttgtgctcaagtgctgagcagagttagactctcagcagatgtttgaatgaatgggtgaaccaatggctgcacaaatgaacgagcctgactctccctcatgatttggtccatagtgtgtttaaataccctcctagtgggcttttagctccttgaagatggaaacaggtttgcatagtaagtttgttttattgaatggaatggacttaaagtcttcggacttgggagaattaggacagatctgtttccccgttggtaaagtaaaggttgggcctgatgatctcagaaactcaggaagagtgatggtcggccccagggtcgagagtgagttactgccaggtccagggctgtccctgtgttctggctcccagaccacagtgtttcttcctgaagccggtggttgcagccactttgccttgctcctctacgcctttcctgaaggatgaggtggggccagtctgcctctgggagctcggtcaagttcacccgcctgcctgcctgtccagccaagtacctggcccagatcattgtgatgggcgtgcaggtggtgggcagggcctttgcacgggccttgcggcaggagtttgcagccagccgggccgcagctgatgcccgaggacgcgctggacaccggtctgcagccgcttccaacctctccggcctcagcctccaggaggcacagcagattctcaacgtgtccaagctgagccctgaggaggtccagaagaactatgaacacttatttaaggtgaatgataaatccgtgggtggctccttctacctgcagtcaaaggtggtccgcgcaaaggagcgcctggatgaggaactcaaaatccaggcccaggaggacagagaaaaagggcagatgccccatacgtgactgctcggctccccccgcccaccccgccgcctctaatttatagcttggtaataaatttcttttctgca

SEQ ID NO: 446591 - DNA, 1739 bp, Homo sapiens
ccctcctctcacggaaccccctcctctcacagaaccccctcctctcacacagaaccccctcctctcacacagaaccccctcctctcacggaaccccctcctctcacggaaccccctcctctcacggaacgccctcctctcacacagaaccccctcctctcaccgaatcccatctcagtcttgagttttccctcgactctgttgcttccgctcacatcttagtgagtccccagggcctctgcggggcatggaatcacacgtgcagtgttccggcatgttcagcctggtgtgtgacagtggggttccctgccaggccagcagtgtgctctgactcggggcagggaccaggttctgtgtagctttgtgctcaagtgctgagcagagttagactctcagcagatgtttgaatgaatgggtgaaccaatggctgcacaaatgaacgagcctgactctccctcatgatttggtccatagtgtgtttaaataccctcctagtgggcttttagctccttgaagatggaaacaggtttgcatagtaagtttgttttattgaatggaatggacttaaagtcttcggacttgggagaattaggacagatctgtttccccgttggtaaagtaaaggttgggcctgatgatctcagaaactcaggaagagtgatggtcggccccagggtcgagagtgagttactgccaggtccagggctgtccctgtgttctggctcccagaccacagtgtttcttcctgaagccggtggttgcagccactttgccttgctcctctacgcctttcctgaaggatgaggtggggccagtctgcctctgggagctcggtcaagttcacccgcctgcctgcctgtccagccaagtacctggcccagatcattgtgatgggcgtgcaggtggtgggcagggcctttgcacgggccttgcggcaggagtttgcaggggtgagccaccaactcggaaggcccagggtgaagtgtgggctgctgaggactgagcgatcacccacatgtccacacagccagccgggccgcagctgatgcccgaggacgcgctggacaccggtctgcagccgcttccaacctctccggcctcagcctccaggaggcacagcagattctcaacgtgtccaagctgagccctgaggaggtccagaagaactatgaacacttatttaaggtgaatgataaatccgtgggtggctccttctacctgcagtcaaaggtggtccgcgcaaaggagcgcctggatgaggaactcaaaatccaggcccaggaggacagagaaaaagggcagatgccccatacgtgactgctcggctccccccgcccaccccgccgcctctaatttatagcttggtaataaatttcttttctgcaaaaaaaaaaaataccaatttcactggcccggcggttttacaaacgtttttgaactgtgtaatatactcttggccgtttacccacactttataatctggcttttgtaggacaccaattctccccttttttggcccagactttgggcgttaaaatagtcctaatgaagggtctccgtatacccggaaatcggccccttttccccaaaccattttgtctcaaaaccctttgaaatgtgctccaaattgggtcaataaatttggttaaagcgcgtttaaaaaaatatttgggtttaaaaatattctgccggttttaaaaaatttatttgtgtgtacatctaagtctttcttttttttcc

SEQ ID NO: 446592 - DNA, 1299 bp, Homo sapiens
  misc_feature (1288)..(1288): n is a, c, g, or t
ccctcctctcacggaaccccctcctctcacagaaccccctcctctcacacagaaccccctcctctcacacagaaccccctcctctcacggaaccccctcctctcacggaaccccctcctctcacggaacgccctcctctcacacagaaccccctcctctcaccgaatcccatctcagtcttgagttttccctcgactctgttgcttccgctcacatcttagtgagtccccagggcctctgcggggcatggaatcacacgtgcagtgttccggcatgttcagcctggtgtgtgacagtggggttccctgccaggccagcagtgtgctctgactcggggcagggaccaggttctgtgtagctttgtgctcaagtgctgagcagagttagactctcagcagatgtttgaatgaatgggtgaaccaatggctgcacaaatgaacgagcctgactctccctcatgatttggtccatagtgtgtttaaataccctcctagtgggcttttagctccttgaagatggaaacaggtttgcatagtaagtttgttttattgaatggaatggacttaaagtcttcggacttgggagaattaggacagatctgtttccccgttggtaaagtaaaggttgggcctgatgatctcagaaactcaggaagagtgatggtcggccccagggtcgagagtgagttactgccaggtccagggctgtccctgtgttctggctcccagaccacagtgtttcttcctgaagccggtggttgcagccactttgccttgctcctctacgcctttcctgaaggatgaggtggggccagtctgcctctgggagctcggtcaagttcacccgcctgcctgcctgtccagccaagtacctggcccagatcattgtgatgggcgtgcaggtggtgggcagggcctttgcacgggccttgcggcaggagtttgcagccagccgggccgcagctgatgcccgaggacgcgctggacaccggtctgcagccgcttccaacctctccggcctcagcctccaggaggcacagcagattctcaacgtgtccaagctgagccctgaggaggtccagaagaactatgaacacttatttaaggtgaatgataaatccgtgggtggctccttctacctgcagtcaaaggtggtccgcgcaaaggagcgcctggatgaggaactcaaaatccaggcccaggaggacagagaaaaagggcagatgccccatacgtgatttcttggtttcgtaagtgcctttttaataatcttttcatggaaaagtttntgtgccaggcc

SEQ ID NO: 446593 - DNA, 316 bp, Homo sapiens
ccaggccaccccgaccctggggtgccactgaaggaagcattggtatccacccactgcccttcaaaaaatggacctgggctgatgggaataggccatcccatgtgggcaaggggtatggggcggaggcttggcctcccggcctgattatccgtgacccactaggtggtccgcgcaaaggagcgcctggatgaggaactcaaaatccaggcccaggaggacagagaaaaagggcagatgccccatacgtgactgctcggctccccccgcccaccccgccgcctctaatttatagcttggtaataaatttcttttctgc

SEQ ID NO: 446594 - DNA, 319 bp, Homo sapiens
gccaagtacctggcccagatcattgtgatgggcgtgcaggtggtgggcagggcctttgcacgggccttgcggcaggagtttgcaggtaagcatgggtccgtctcccctgtgggctgggagttcctctccaggtcagattttccccgtagccatgggcacctcaggcctggcggttctgaagtgtgcgtggcctgaggcacttcccatggtggggggtgatgccagaccggggcattcttcagtggtacctggttagcaagagcatccagggcaggagctggcacactggcccatctggatacctgattttgtaaacttg

SEQ ID NO: 446595 - DNA, 728 bp, Homo sapiens
ccctcctctcacggaaccccctcctctcacagaaccccctcctctcacacagaaccccctcctctcacacagaaccccctcctctcacggaaccccctcctctcacggaaccccctcctctcacggaacgccctcctctcacacagaaccccctcctctcaccgaatcccatctcagtcttgagttttccctcgactctgttgcttccgctcacatcttagtgagtccccagggcctctgcggggcatggaatcacacgtgcagtgttccggcatgttcagcctggccaagtacctggcccagatcattgtgatgggcgtgcaggtggtgggcagggcctttgcacgggccttgcggcaggagtttgcagccagccgggccgcagctgatgcccgaggacgcgctggacaccggtctgcagccgcttccaacctctccggcctcagcctccaggaggcacagcagattctcaacgtgtccaagctgagccctgaggaggtccagaagaactatgaacacttatttaaggtgaatgataaatccgtgggtggctccttctacctgcagtcaaaggtggtccgcgcaaaggagcgcctggatgaggaactcaaaatccaggcccaggaggacagagaaaaagggcagatgccccatacgtgactgctcggctccccccgcccaccccgccgcctctaatttatagcttggtaataaatttcttttctgca

SEQ ID NO: 446596 - DNA, 735 bp, Homo sapiens
accggcggcctcagggccagggaaaaccgtctgcctggaagaggccgggcaaacgtggtcgcgctgtgcctagcccgcgtgtgagcgagcagccgtgggcagcggtggagcatgagtctggctggccaagtacctggcccagatcattgtgatgggcgtgcaggtggtgggcagggcctttgcacgggccttgcggcaggagtttgcagcctctaccccctaaaaaggaaaccactcctggagaagaggcagctcctagccacctgtccctgtgtctctcatcctgtgctggtggcaggggtgagccaccaactcggaaggcccagggtgaagtgtgggctgctgaggactgagcgatcacccacatgtccacacagccagccgggccgcagctgatgcccgaggacgcgctggacaccggtctgcagccgcttccaacctctccggcctcagcctccaggaggcacagcagattctcaacgtgtccaagctgagccctgaggaggtccagaagaactatgaacacttatttaaggtgaatgataaatccgtgggtggctccttctacctgcagtcaaaggtggtccgcgcaaaggagcgcctggatgaggaactcaaaatccaggcccaggaggacagagaaaaagggcagatgccccatacgtgactgctcggctccccccgcccaccccgccgcctctaatttatagcttggtaataaatttcttttctgca

SEQ ID NO: 446597 - DNA, 1473 bp, Homo sapiens
ccctcctctcacggaaccccctcctctcacagaaccccctcctctcacacagaaccccctcctctcacacagaaccccctcctctcacggaaccccctcctctcacggaaccccctcctctcacggaacgccctcctctcacacagaaccccctcctctcaccgaatcccatctcagtcttgagttttccctcgactctgttgcttccgctcacatcttagtgagtccccagggcctctgcggggcatggaatcacacgtgcagtgttccggcatgttcagcctggtgtgtgacagtggggttccctgccaggccagcagtgtgctctgactcggggcagggaccaggttctgtgtagctttgtgctcaagtgctgagcagagttagactctcagcagatgtttgaatgaatgggtgaaccaatggctgcacaaatgaacgagcctgactctccctcatgatttggtccatagtgtgtttaaataccctcctagtgggcttttagctccttgaagatggaaacaggtttgcatagtaagtttgttttattgaatggaatggacttaaagtcttcggacttgggagaattaggacagatctgtttccccgttggtaaagtaaaggttgggcctgatgatctcagaaactcaggaagagtgatggtcggccccagggtcgagagtgagttactgccaggtccagggctgtccctgtgttctggctcccagaccacagtgtttcttcctgaagccggtggttgcagccactttgccttgctcctctacgcctttcctgaaggatgaggtggggccagtctgcctctgggagctcggtcaagttcacccgcctgcctgcctgtccagccaagtacctggcccagatcattgtgatgggcgtgcaggtggtgggcagggcctttgcacgggccttgcggcaggagtttgcagcctctaccccctaaaaaggaaaccactcctggagaagaggcagctcctagccacctgtccctgtgtctctcatcctgtgctggtggcaggggtgagccaccaactcggaaggcccagggtgaagtgtgggctgctgaggactgagcgatcacccacatgtccacacagccagccgggccgcagctgatgcccgaggacgcgctggacaccggtctgcagccgcttccaacctctccggcctcagcctccaggaggcacagcagattctcaacgtgtccaagctgagccctgaggaggtccagaagaactatgaacacttatttaaggtgaatgataaatccgtgggtggctccttctacctgcagtcaaaggtggtccgcgcaaaggagcgcctggatgaggaactcaaaatccaggcccaggaggacagagaaaaagggcagatgccccatacgtgactgctcggctccccccgcccaccccgccgcctctaatttatagcttggtaataaatttcttttctgca

SEQ ID NO: 446598 - DNA, 696 bp, Homo sapiens
agactgaggcaatgcgcatgcccagcgccgtatcgcgcacgcgctctctgcggctttccttgacctctgacccgccgaccacgcttgatccccggccgcggggccaggaagtcggagtttgagccccggaggcagagcggctgccatgtcattggccttggcagaaaagtaaacaagtgattgcaaggctgtacgatggcagcagagggaccgaaggctgttggtgtgaggggtagtctgagacctgagccgtgtttcaagccgaggggaccctctgactttcacctctgtccttcagacagcaccagcatcccatccctgagcctcctgttccactcgggaggggctttaggaaggaggcgaagtcaggaaagagcaggtcctcggaggctgaacaaggccagctctggagtcgaatccactggaatctggagcaagcccctctggcctcggggttgggttcttgatacttgtcggcttgcccaggtgccctaccttcagaccccgggaccctgcgtagtgactgctgtgacagatagcaccagccttgggtttccgatctgcctccgaggcacctgctgttacgtcctcgggccagtcagcagtcccccacccctgagttgtcagaattaaacggcacaatgaattgaacgtgtttggcaccgtgcctggtgtgtggactcagttgatacctgt

SEQ ID NO: 446599 - DNA, 1922 bp, Homo sapiens
aataaaattgtatagagaaacatctatctatcacaatgaaacgcctgatgaagacaaaattaactcttacttttaaatttcgaacccagaaaaaagcgtttccaaggacggaagactgttaatttgtccattccactaagtgaaacatcttccaccaaactgtcccacattgatgaatacatttcctcatctccaacctaccagaccgtgcctgattttcagagagtgcagattactggtgactatgcctctggggttacagttgaagattttgaaattgtttgcaaaggtctgtatcgggcactatgcatacgtgagaaatacatgcagaagtcgtttcagaggttccctaaaaccccttccaaatacttgcggaacattgatggtgaggcttgggtagcaaatgagagcttctatccagtaagacctatacccaccggcgcctgaagttcctctcctccaagttccaggtccatcagatgcttaacgagatggacgagttaaaggagctgaaaaacaacccccaccgagatttttataactgcaggaaggtggacacccatatccatgcagccgcttgcatgaaccagaaacatctgctgcgttttattaagaaatcttaccaaattgatgctgacagagtggtctatagcaccaaagagaagaatctgaccctaaaggaactttttgctaaattaaaaatgcatccttatgacctgactgttgattctctggatgttcatgctggacgccagaccttccagcgttttgataagttcaatgacaaatataatcctgtaggagcaagtgagctacgggacctctacttgaagacagacaattacattaatggggaatattttgccactatcatcaaggaggtaggtgcggacctggtggaggccaagtaccagcatgctgagccccgcctgtccatctatggccgcagtcctgatgagtggagcaaactctcctcctggttcgtctgcaatcgcatccactgccccaacatgacatggatgatccaggttcccaggatctatgatgtgttccgttccaagaatttccttccacattttggaaaaatgctggagaatattttcatgccagtgtttgaggccaccatcaacccccaggctgacccagaactcagtgtcttcctcaagcatatcactggctttgacagtgtggatgatgagtccaaacacagtggccacatgttctcctccaagagtcccaagccccaggagtggacattggaaaagaatccatcttacacttactatgcctactacatgtatgcaaacatcatggtgctcaacagcctgagaaaggaacgaggcatgaatacgtttctgttccgacctcactgtggagaagctggagccctcacccatctcatgacagcattcatgatagcagatgatatctctcatggcctaaatttaaaaaagagtcccgtgctacagtacttgtttttcttagcccaaattcccatcgccatgtcaccactaagtaacaatagcctatttctagagtatgccaaaaatccttttttggatttccttcagaaagggctaatgatctcactgtctacagatgacccaatgcaattccactttaccaaggagcccctaatggaagaatatgctattgctgcacaagtcttcaagctgagcacctgtgatatgtgcgaagtggcaaggaacagtgtcttgcagtgtggaatttctcatgaggagaaagtaaagtttctgggcgacaattaccttgaggaaggccctgctggaaatgatatccggaggacaaatgtagcccaaatccgcatggcctatcgctatgaaacctggtgttatgaactcaatttaattgctgagggtcttaaatcaacagaataaaaaaaagtaaaccaaataataata

SEQ ID NO: 446600 - DNA, 671 bp, Homo sapiens
tggggctgcagccgggacggggccttcggcagggcctgcgggggcgggacggagcggacccgagtgatacccgggagactagcttggccacaggagacaacgttgaggtacagacaggtggcagagaaacaaacatcggtattgcttaaaccacttgctatttccagttccggcttttgctaggtctaccataaccaaataccgcagattgagtggttcaaacgccagagattgatattctcacaagtctggaggctgtagaaatctaacatcaaggtgccaacagggattattcaagatcaggttgtagccattttcaacaaggatcactgatcaaaattttctttttacaaagagatttacaagttaaacatgaagggaaaatactggaatcatttggattctgacaggataaagaatacaatatttcacatttacttgtaatggaacctttgtaagattcatcacttgtcattcacccagttgggaacatggatgtggtttttctcgtactactgttcagacactgtcaagaagccactgcaaaaacatcaaacaaaaaatttctcaatgggaaggaagggctaatggtatatctaatccagaaaagtggtgtccaaaggactttggagtgagatataactgtcaccaagagatccgtcttaagaaaa

SEQ ID NO: 446601 - DNA, 446 bp, Homo sapiens
tgcactccagcctgggcgacagagcgagactctgtctcaaaaaaaaaaaagaatgagaaattgtttttctaaagaaacatgatttgcagacaaaatttgatatttcataatatatcaattattacttaatgttgcccaaaacaaagaatgtgttatctgtaaagctctcctatctacacacttagattttgaatcagtttgttaaaaatttttaaatgttcagttagtttgaaagtacagatgataaacattagagaagatgaaaatttactagtcaaatttcaacaaaaatccttgcttaatttaaggtgaatagaattgacaaataagtattctgattcagtcagtgaagctcttctttcattgttttccatgtatttgtggtgagttatctttttctattactgtggccttttgtattagtttgctaggtctaccataaccaa

SEQ ID NO: 446602 - DNA, 2352 bp, Homo sapiens
ttttatagtgtcagtcagtcaccccacagtctcctctctcttcttttctactgtgctatcctagaatcaaggatttcagcaacaatgcctctgttcaaactcccagctgaagagaaacaaattgatgatgcaatgcgcaactttgctgaaaaagtgtttgcctctgaagtcaaagatgaaggaggtcgtcaggagatttccccctttgatgtggatgagatctgtccgatttctcatcatgagatgcaagcacacatattccatctggagactctgtccacctccacagaagccaggagaaaaaagcgtttccaaggacggaagactgttaatttgtccattccactaagtgaaacatcttccaccaaactgtcccacattgatgaatacatttcctcatctccaacctaccagaccgtgcctgattttcagagagtgcagattactggtgactatgcctctggggttacagttgaagattttgaaattgtttgcaaaggtctgtatcgggcactatgcatacgtgagaaatacatgcagaagtcgtttcagaggttccctaaaaccccttccaaatacttgcggaacattgatggtgaggcttgggtagcaaatgagagcttctatccagtctttactcctcctgtgaagaagggagaggaccccttccgaacagacaaccttcctgaaaacctgggctatcacctcaaaatgaaggacggtgtagtttacgtctatcctaatgaagcagcagtcagcaaagatgagcctaagccacttccttacccaaatctggacaccttcttagacgatatgaattttttacttgctttaattgctcaaggacctgttaagacctatacccaccggcgcctgaagttcctctcctccaagttccaggtccatcagatgcttaacgagatggacgagttaaaggagctgaaaaacaacccccaccgagatttttataactgcaggaaggtggacacccatatccatgcagccgcttgcatgaaccagaaacatctgctgcgttttattaagaaatcttaccaaattgatgctgacagagtggtctatagcaccaaagagaagaatctgaccctaaaggaactttttgctaaattaaaaatgcatccttatgacctgactgttgattctctggatgttcatgctggacgccagaccttccagcgttttgataagttcaatgacaaatataatcctgtaggagcaagtgagctacgggacctctacttgaagacagacaattacattaatggggaatattttgccactatcatcaaggaggtaggtgcggacctggtggaggccaagtaccagcatgctgagccccgcctgtccatctatggccgcagtcctgatgagtggagcaaactctcctcctggttcgtctgcaatcgcatccactgccccaacatgacatggatgatccaggttcccaggatctatgatgtgttccgttccaagaatttccttccacattttggaaaaatgctggagaatattttcatgccagtgtttgaggccaccatcaacccccaggctgacccagaactcagtgtcttcctcaagcatatcactggctttgacagtgtggatgatgagtccaaacacagtggccacatgttctcctccaagagtcccaagccccaggagtggacattggaaaagaatccatcttacacttactatgcctactacatgtatgcaaacatcatggtgctcaacagcctgagaaaggaacgaggcatgaatacgtttctgttccgacctcactgtggagaagctggagccctcacccatctcatgacagcattcatgatagcagatgatatctctcatggcctaaatttaaaaaagagtcccgtgctacagtacttgtttttcttagcccaaattcccatcgccatgtcaccactaagtaacaatagcctatttctagagtatgccaaaaatccttttttggatttccttcagaaagggctaatgatctcactgtctacagatgacccaatgcaattccactttaccaaggagcccctaatggaagaatatgctattgctgcacaagtcttcaagctgagcacctgtgatatgtgcgaagtggcaaggaacagtgtcttgcagtgtggaatttctcatgaggagaaagtaaagtttctgggcgacaattaccttgaggaaggccctgctggaaatgatatccggaggacaaatgtagcccaaatccgcatggcctatcgctatgaaacctggtgttatgaactcaatttaattgctgagggtcttaaatcaacagaataaaaaaaagtaaaccaaataataata

SEQ ID NO: 446603 - DNA, 2665 bp, Homo sapiens
ttttatagtgtcagtcagtcaccccacagtctcctctctcttcttttctactgtgctatcctagaatcaaggatttcagcaacaatgcctctgttcaaactcccagctgaagagaaacaaattgatgatgcaatgcgcaactttgctgaaaaagtgtttgcctctgaagtcaaagatgaaggaggtcgtcaggagatttccccctttgatgtggatgagatctgtccgatttctcatcatgagatgcaagcacacatattccatctggagactctgtccacctccacagaagccaggagaaaaaagcgtttccaaggacggaagactgttaatttgtccattccactaagtgaaacatcttccaccaaactgtcccacattgatgaatacatttcctcatctccaacctaccagaccgtgcctgattttcagagagtgcagattactggtgactatgcctctggggttacagttgaagattttgaaattgtttgcaaaggtctgtatcgggcactatgcatacgtgagaaatacatgcagaagtcgtttcagaggttccctaaaaccccttccaaatacttgcggaacattgatggtgaggcttgggtagcaaatgagagcttctatccagtctttactcctcctgtgaagaagggagaggaccccttccgaacagacaaccttcctgaaaacctgggctatcacctcaaaatgaaggacggtgtagtttacgtctatcctaatgaagcagcagtcagcaaagatgagcctaagccacttccttacccaaatctggacaccttcttagacgatatgaattttttacttgctttaattgctcaaggacctgttaagacctatacccaccggcgcctgaagttcctctcctccaagttccaggtccatcagatgcttaacgagatggacgagttaaaggagctgaaaaacaacccccaccgagatttttataactgcaggaaggtggacacccatatccatgcagccgcttgcatgaaccagaaacatctgctgcgttttattaagaaatcttaccaaattgatgctgacagagtggtctatagcaccaaagagaagaatctgaccctaaaggaactttttgctaaattaaaaatgcatccttatgacctgactgttgattctctggatgttcatgctggacgccagaccttccagcgttttgataagttcaatgacaaatataatcctgtaggagcaagtgagctacgggacctctacttgaagacagacaattacattaatggggaatattttgccactatcatcaaggaggtaggtgcggacctggtggaggccaagtaccagcatgctgagccccgcctgtccatctatggccgcagtcctgatgagtggagcaaactctcctcctggttcgtctgcaatcgcatccactgccccaacatgacatggatgatccaggttcccaggatctatgatgtgttccgttccaagaatttccttccacattttggaaaaatgctggagaatattttcatgccagtgtttgaggccaccatcaacccccaggctgacccagaactcagtgtcttcctcaagcatatcactggctttgacagtgtggatgatgagtccaaacacagtggccacatgttctcctccaagagtcccaagccccaggagtggacattggaaaagaatccatcttacacttactatgcctactacatgtatgcaaacatcatggtgctcaacagcctgagaaaggaacgaggcatgaatacgtttctgttccgacctcactgtggagaagctggagccctcacccatctcatgacagcattcatgatagcagatgatatctctcatggcctaaatttaaaaaagagtcccgtgctacagtacttgtttttcttagcccaaattcccatcgccatgtcaccactaagtaacaatagcctatttctagagtatgccaaaaatccttttttggatttccttcagaaagggctaatgatctcactgtctacagatgacccaatgcaattccactttaccaaggagcccctaatggaagaatatgctattgctgcacaagtcttcaagctgagcacctgtgatatgtgcgaagtggcaaggaacagtgtcttgcagtgtggaatttctcatgagtttgctaggtctaccataaccaaataccgcagattgagtggttcaaacgccagagattgatattctcacaagtctggaggctgtagaaatctaacatcaaggtgccaacagggattattcaagatcaggttgtagccattttcaacaaggatcactgatcaaaattttctttttacaaagagatttacaagttaaacatgaagggaaaatactggaatcatttggattctgacaggataaagaatacaatatttcacatttacttgtaatggaacctttgtaagattcatcacttgtcattcacccagttgggaacatggatgtggtttttctcgtactactgttcagacactgtcaagaagccactgcaaaaacatcaaacaaaaaatttctcaatgggaaggaagggctaatggtatatctaatccagaaaagtggtgtccaaaggactttggagtgagatataactgtcaccaagagatccgtcttaagaaaa

SEQ ID NO: 446604 - DNA, 803 bp, Homo sapiens
ccgccgccgcctgtgggttggctagttattttgcaagcgggaggggccgtgcgcgctcctgcctcaggcctctgtcccccaccccctttccccggtcccaggctctccttcggaaagatgtcggacacggcagtagctgatacccggcgccttaactcgaagccgcaggacctgaccgacgcttacgggccgccaagtaacttcctggagatcgacatctttaatcctcagacggtgggcgtgggacgcgcgcgcttcaccacctatgaggttcgcatgcggacaaacctacctatcttcaagctaaaggagtcctgcgtacggcggcgctacagtgactttgagtggctgaaaaatgagctggagagagatagcaagattgtagtaccaccactgcctgggaaagccttgaagcggcagctccctttccgaggagatgaagggatctttgaggagtctttcatcgaagaaaggaggcagggcctcgagcagtttattaacaaaattgctgggcacccactggctcagaatgaacgctgcctacacatgttcctgcaagaggaggcaattgacaggaactacgtcccggggaagagtcttgctgtgtcttgcccaggctggagtgcagtggcatgatctcggctcactgtagcctccacctcccagattcaaacgattctcctgtctcagcctcctgagtagctgggactacaggataaaagaacattggaataattggatactgaggtgcataattgctggcaatggagtggaggagaggagttgatcagctggaaaggagc

SEQ ID NO: 446605 - DNA, 1095 bp, Homo sapiens
ttgtttttttggcaatagccaggctagcaggtgtgcaagtgaaatttcactgtggctttgatttgcatttccctgatgattagcgatgttgagcatcttttcatgtatgtattgggcatttttgtgtctgaaaaaaatgtctcttcaagcccttaagcttatttttatctcaactgacactgttttttttcccaaataaatttgacacaggcagaaaggtgggtgaactctcagaacttttggtgggtggatattcatctgaccagtgagctctgaaatggtttccctacacagagtgggttttggcaagggttggaatgaggggaggtagcagtcttgtcatttagaaaatcaaagctagttttgatgtagctcaacatggaaagaaggtacagaaagtgatgtgttcaaaacattagcaaattaaggctgaatgtggttggctcatgcctgtaatcccagcattttgggaggctgaggcaggaggattgcttgagcccaggaggttgagactagcctgggcaacagagtgagacactgtctctacaaaaaatttcaaaagaaaaaaaaaaaggaaattaatgttacttagcagtatttggttctaagtagaagagtgggggctgtgaggaagttgaggtttttggtagttcatgaatgagatgactaaaaatatctgaggggatagggaagaatgggtatttctgtgaaataaaggaaaggaagggtaaagagagatgcaaccttcataggcagcagtgttagagaatgaactgcagaataaatagaaaagcagctataaaataaagtgttaacaaaaatttggacagatgacaactcatttaacaagtgctaatagtcttctgtgtgtctggtcctatgctaacagcagggctggggatagggtggagtggttgtggtacaagtaaaatatgatattacattctcttttttcgtagaccttaagagttcagttgaagagatgtttagctgggcgtggtggcttatgcctgtaatcccagcactttgggaggattgcttgagcccaggagttggagactagcctgggcaaccgagtgagatctcatctctaca

SEQ ID NO: 446606 - DNA, 491 bp, Homo sapiens
ccgccgccgcctgtgggttggctagttattttgcaagcgggaggggccgtgcgcgctcctgcctcaggcctctgtcccccaccccctttccccggtcccaggctctccttcggaaagatgtcggacacggcagtagctgatacccggcgccttaactcgaagccgcaggacctgaccgacgcttacgggccgccaagtaacttcctggagatcgacatctttaatcctcagacggtgggcgtgggacgcgcgcgcttcaccacctatgaggttcgcatgcggacaaacctacctatcttcaagctaaaggagtcctgcgtacggcggcgctacagtgactttgagtggctgaaaaatgagctggagagagatagcaagattgcaatattcctttgggcctctgcttctcttcacctaaaaaaagagaattagattatattggtggttctcagcaagagaaggagtatgtgttccaatggttgcctttccca

SEQ ID NO: 446607 - DNA, 3630 bp, Homo sapiens
ccgccgccgcctgtgggttggctagttattttgcaagcgggaggggccgtgcgcgctcctgcctcaggcctctgtcccccaccccctttccccggtcccaggctctccttcggaaagatgtcggacacggcagtagctgatacccggcgccttaactcgaagccgcaggacctgaccgacgcttacgggccgccaagtaacttcctggagatcgacatctttaatcctcagacggtgggcgtgggacgcgcgcgcttcaccacctatgaggttcgcatgcggacaaacctacctatcttcaagctaaaggagtcctgcgtacggcggcgctacagtgactttgagtggctgaaaaatgagctggagagagatagcaagaattgctgggcacccactggctcagaatgaacgctgcctacacatgttcctgcaagaggaggcaattgacaggaactacgtcccggggaaggtgcgccagtaggagcccctctcaccacctgccctctactttcctgctgaaatgacattggtttttacactaagcctctctctgtctttgatctgaagttggctgcccatctcctggcctgatagactgtctggcattgtgctccctggtacctgactacaccatgtgggcactctgctaggatcctcttctctgaggagaggtgggaacccacaggcagatgccctttgcttggggttggggtgggtgggtggggggattagactggaaggcaatttcttgggcatttacccatgccagaaggctaacctggggggaggggggcgcttgtgctggtgaggcacttggatacatactgatgctgcaagttcaggggatttttcttactcttaggtttaaccaagaacactgagcagggaaaaaccctgcctttcctaactgcatgtattttttcctttttggaaaggtggtagagactcagaagctttccttgttttcttcaggcctgctcccagttttcttaacagtttcttttgttgctttctctctcccttgttgctttccatggcagtaatcctcctagagtccaagcagtctgttgtatggagcagggtgtgtgggttttctgggcccatcattatggctgcttcagagtcagaagaaagccatagggcagtaggggagctcctattgcctagcccctctccctttgtggctcccactctagctgcctatttttgctcatcagctggtgagtcagtatgggccagcagttctccctccctaagcccttgctactttatgggttagctttgcaggtttggtggcttgaggggtgggggcaactcaccactgccaggtaactccctgaagggtgggagtggattatcttctaggctcttacccgcggtagggaagggcatcaacactgtcttccttccattctcctttcccccatcccatttagtgctgccacagggcagaagcacacaaaccaaccacacagtctctgacttctcctaagcactttgagttgttgaatggggctcaggggcaagagtttttgctgccctccccagcgtggtcacagggttattgaactgcctgcacttgtttctcatgcaactccagcattttccccagaagttgaactatggatagcagcttggtatggatttcctaaatcttaacatttgaagcagcttcttgaggctggcaactatcctggtttctgtcttggagggggtggtttgtttgctggggcccaacgtctgtcccaagtggtggggtgagagtaagttaactttggtgccaggtgagaggtgggggctctttgcttagactccctatcatggaaagattggagttttctatgcagggcactggggaaaaggattgctgattctgactgaccctgatcagagagattaggattgtattttgacataggatttggaacccatctaaatgttgaagttccctgagacagctctccagctgctgagcctgcgccaggggctaagcagcccctaatgagaggctctgctccctttcccacctcgccaatgttgttgttgctgcctttttgatttgtatcctctgttatagacattttttaaaaacgatttcctctttcattgtgcacaagtgctgagagtctgaggccccatttctgctgtgtatatatatcctgactcggggcttttattcagcaaactgttcattcttctgtcagacaatgtcatattcaactctgttcatattaaaccactgtgaagcaagcctctgttttcctgcttaagttgtaaatttagtattctttagtgtctaggatatgctgggtattatgcagaaatcatacagtgtggccagtgtcctgaggtaatgttttgcatttaaatttttttagaaagcagaatcttaacttatcttaatgatatttacctatcctttttgcaactcacaactgactttgtcacagaggtaatgcatctgcttgcaggaagtagctgtaggctcagtacctgttgtttgagtcagatttagcagatttggtttttaagcttgtgggtttgtgctaatttgggcagaatatatttattatatatgtgtgtgtgtatgtgtgtatgtgtgtgtctgcatatgtaatacatgtacataaacacacatgcatgtgttcatcctctgacacacccacacaacaccaacaaacatttcttctataggctttttatctcaactgacactgttttttttcccaaataaatttgacacaggcagaaaggtgggtgaactctcagaacttttggtgggtggatattcatctgaccagtgagctctgaaatggtttccctacacagagtgggttttggcaagggttggaatgaggggaggtagcagtcttgtcatttagaaaatcaaagctagttttgatgtagctcaacatggaaagaaggtacagaaagtgatgtgttcaaaacattagcaaattaaggctgaatgtggttggctcatgcctgtaatcccagcattttgggaggctgaggcaggaggattgcttgagcccaggaggttgagactagcctgggcaacagagtgagacactgtctctacaaaaaatttcaaaagaaaaaaaaaaaggaaattaatgttacttagcagtatttggttctaagtagaagagtgggggctgtgaggaagttgaggtttttggtagttcatgaatgagatgactaaaaatatctgaggggatagggaagaatgggtatttctgtgaaataaaggaaaggaagggtaaagagagatgcaaccttcataggcagcagtgttagagaatgaactgcagaataaatagaaaagcagctataaaataaagtgttaacaaaaatttggacagatgacaactcatttaacaagtgctaatagtcttctgtgtgtctggtcctatgctaacagcagggctggggatagggtggagtggttgtggtacaagtaaaatatgatattacattctcttttttcgtagaccttaagagttcagttgaagagatgtttagctgggcgtggtggcttatgcctgtaatcccagcactttgggaggattgcttgagcccaggagttggagactagcctgggcaaccgagtgagatctcatctctaca

SEQ ID NO: 446608 - DNA, 3701 bp, Homo sapiens
ccgccgccgcctgtgggttggctagttattttgcaagcgggaggggccgtgcgcgctcctgcctcaggcctctgtcccccaccccctttccccggtcccaggctctccttcggaaagatgtcggacacggcagtagctgatacccggcgccttaactcgaagccgcaggacctgaccgacgcttacgggccgccaagtaacttcctggagatcgacatctttaatcctcagacggtgggcgtgggacgcgcgcgcttcaccacctatgaggttcgcatgcggacaaacctacctatcttcaagctaaaggagtcctgcgtacggcggcgctacagtgactttgagtggctgaaaaatgagctggagagagatagcaagattgtagtaccaccactgcctgggaaagccttgaagcggcagctccctttccgaggagatgaagggatctttgaggagtctttcatcgaagaaaggaggcagggcctcgagcagtttattaacaaaattgctgggcacccactggctcagaatgaacgctgcctacacatgttcctgcaagaggaggcaattgacaggaactacgtcccggggaaggtgcgccagtaggagcccctctcaccacctgccctctactttcctgctgaaatgacattggtttttacactaagcctctctctgtctttgatctgaagttggctgcccatctcctggcctgatagactgtctggcattgtgctccctggtacctgactacaccatgtgggcactctgctaggatcctcttctctgaggagaggtgggaacccacaggcagatgccctttgcttggggttggggtgggtgggtggggggattagactggaaggcaatttcttgggcatttacccatgccagaaggctaacctggggggaggggggcgcttgtgctggtgaggcacttggatacatactgatgctgcaagttcaggggatttttcttactcttaggtttaaccaagaacactgagcagggaagactcagaagctttccttgttttcttcaggcctgctcccagttttcttaacagtttcttttgttgctttctctctcccttgttgctttccatggcagtaatcctcctagagtccaagcagtctgttgtatggagcagggtgtgtgggttttctgggcccatcattatggctgcttcagagtcagaagaaagccatagggcagtaggggagctcctattgcctagcccctctccctttgtggctcccactctagctgcctatttttgctcatcagctggtgagtcagtatgggccagcagttctccctccctaagcccttgctactttatgggttagctttgcaggtttggtggcttgaggggtgggggcaactcaccactgccaggtaactccctgaagggtgggagtggattatcttctaggctcttacccgcggtagggaagggcatcaacactgtcttccttccattctcctttcccccatcccatttagtgctgccacagggcagaagcacacaaaccaaccacacagtctctgacttctcctaagcactttgagttgttgaatggggctcaggggcaagagtttttgctgccctccccagcgtggtcacagggttattgaactgcctgcacttgtttctcatgcaactccagcattttccccagaagttgaactatggatagcagcttggtatggatttcctaaatcttaacatttgaagcagcttcttgaggctggcaactatcctggtttctgtcttggagggggtggtttgtttgctggggcccaacgtctgtcccaagtggtggggtgagagtaagttaactttggtgccaggtgagaggtgggggctctttgcttagactccctatcatggaaagattggagttttctatgcagggcactggggaaaaggattgctgattctgactgaccctgatcagagagattaggattgtattttgacataggatttggaacccatctaaatgttgaagttccctgagacagctctccagctgctgagcctgcgccaggggctaagcagcccctaatgagaggctctgctccctttcccacctcgccaatgttgttgttgctgcctttttgatttgtatcctctgttatagacattttttaaaaacgatttcctctttcattgtgcacaagtgctgagagtctgaggccccatttctgctgtgtatatatatcctgactcggggcttttattcagcaaactgttcattcttctgtcagacaatgtcatattcaactctgttcatattaaaccactgtgaagcaagcctctgttttcctgcttaagttgtaaatttagtattctttagtgtctaggatatgctgggtattatgcagaaatcatacagtgtggccagtgtcctgaggtaatgttttgcatttaaatttttttagaaagcagaatcttaacttatcttaatgatatttacctatcctttttgcaactcacaactgactttgtcacagaggtaatgcatctgcttgcaggaagtagctgtaggctcagtacctgttgtttgagtcagatttagcagatttggtttttaagcttgtgggtttgtgctaatttgggcagaatatatttattatatatgtgtgtgtgtatgtgtgtatgtgtgtgtctgcatatgtaatacatgtacataaacacacatgcatgtgttcatcctctgacacacccacacaacaccaacaaacatttcttctataggctttttatctcaactgacactgttttttttcccaaataaatttgacacaggcagaaaggtgggtgaactctcagaacttttggtgggtggatattcatctgaccagtgagctctgaaatggtttccctacacagagtgggttttggcaagggttggaatgaggggaggtagcagtcttgtcatttagaaaatcaaagctagttttgatgtagctcaacatggaaagaaggtacagaaagtgatgtgttcaaaacattagcaaattaaggctgaatgtggttggctcatgcctgtaatcccagcattttgggaggctgaggcaggaggattgcttgagcccaggaggttgagactagcctgggcaacagagtgagacactgtctctacaaaaaatttcaaaagaaaaaaaaaaaggaaattaatgttacttagcagtatttggttctaagtagaagagtgggggctgtgaggaagttgaggtttttggtagttcatgaatgagatgactaaaaatatctgaggggatagggaagaatgggtatttctgtgaaataaaggaaaggaagggtaaagagagatgcaaccttcataggcagcagtgttagagaatgaactgcagaataaatagaaaagcagctataaaataaagtgttaacaaaaatttggacagatgacaactcatttaacaagtgctaatagtcttctgtgtgtctggtcctatgctaacagcagggctggggatagggtggagtggttgtggtacaagtaaaatatgatattacattctcttttttcgtagaccttaagagttcagttgaagagatgtttagctgggcgtggtggcttatgcctgtaatcccagcactttgggaggattgcttgagcccaggagttggagactagcctgggcaaccgagtgagatctcatctctaca

SEQ ID NO: 446609 - DNA, 2429 bp, Homo sapiens
ccgccgccgcctgtgggttggctagttattttgcaagcgggaggggccgtgcgcgctcctgcctcaggcctctgtcccccaccccctttccccggtcccaggctctccttcggaaagatgtcggacacggcagtagctgatacccggcgccttaactcgaagccgcaggacctgaccgacgcttacgggccgccaagtaacttcctggagatcgacatctttaatcctcagacggtgggcgtgggacgcgcgcgcttcaccacctatgaggttcgcatgcggacaaacctacctatcttcaagctaaaggagtcctgcgtacggcggcgctacagtgactttgagtggctgaaaaatgagctggagagagatagcaagattgtagtaccaccactgcctgggaaagccttgaagcggcagctccctttccgaggagatgaagggatctttgaggagtctttcatcgaagaaaggaggcagggcctcgagcagtttattaacaaaattgctgggcacccactggctcagaatgaacgctgcctacacatgttcctgcaagaggaggcaattgacaggaactacgtcccggggaaggtgcgccagtaggagcccctctcaccacctgccctctactttcctgctgaaatgacattggtttttacactaagcctctctctgtctttgatctgaagttggctgcccatctcctggcctgatagactgtctggcattgtgctccctggtacctgactacaccatgtgggcactctgctaggatcctcttctctgaggagaggtgggaacccacaggcagatgccctttgcttggggttggggtgggtgggtggggggattagactggaaggcaatttcttgggcatttacccatgccagaaggctaacctggggggaggggggcgcttgtgctggtgaggcacttggatacatactgatgctgcaagttcaggggatttttcttactcttaggtttaaccaagaacactgagcagggaaaaaccctgcctttcctaactgcatgtattttttcctttttggaaaggtggtagagactcagaagctttccttgttttcttcaggcctgctcccagttttcttaacagtttcttttgttgctttctctctcccttgttgctttccatggcagtaatcctcctagagtccaagcagtctgttgtatggagcagggtgtgtgggttttctgggcccatcattatggctgcttcagagtcagaagaaagccatagggcagtaggggagctcctattgcctagcccctctccctttgtggctcccactctagctgcctatttttgctcatcagctggtgagtcagtatgggccagcagttctccctccctaagcccttgctactttatgggttagctttgcaggtttggtggcttgaggggtgggggcaactcaccactgccaggtaactccctgaagggtgggagtggattatcttctaggctcttacccgcggtagggaagggcatcaacactgtcttccttccattctcctttcccccatcccatttagtgctgccacagggcagaagcacacaaaccaaccacacagtctctgacttctcctaagcactttgagttgttgaatggggctcaggggcaagagtttttgctgccctccccagcgtggtcacagggttattgaactgcctgcacttgtttctcatgcaactccagcattttccccagaagttgaactatggatagcagcttggtatggatttcctaaatcttaacatttgaagcagcttcttgaggctggcaactatcctggtttctgtcttggagggggtggtttgtttgctggggcccaacgtctgtcccaagtggtggggtgagagtaagttaactttggtgccaggtgagaggtgggggctctttgcttagactccctatcatggaaagattggagttttctatgcagggcactggggaaaaggattgctgattctgactgaccctgatcagagagattaggattgtattttgacataggatttggaacccatctaaatgttgaagttccctgagacagctctccagctgctgagcctgcgccaggggctaagcagcccctaatgagaggctctgctccctttcccacctcgccaatgttgttgttgctgcctttttgatttgtatcctctgttatagacattttttaaaaacgatttcctctttcattgtgcacaagtgctgagagtctgaggccccatttctgctgtgtatatatatcctgactcggggcttttattcagcaaactgttcattcttctgtcagacaatgtcatattcaactctgttcatattaaaccactgaaaaaaaaactctctaccgcataaaccctgtccccctcctgggccaatcgattctaacttgg

SEQ ID NO: 446610 - DNA, 2367 bp, Homo sapiens
ccgccgccgcctgtgggttggctagttattttgcaagcgggaggggccgtgcgcgctcctgcctcaggcctctgtcccccaccccctttccccggtcccaggctctccttcggaaagatgtcggacacggcagtagctgatacccggcgccttaactcgaagccgcaggacctgaccgacgcttacgggccgccaagtaacttcctggagatcgacatctttaatcctcagacggtgggcgtgggacgcgcgcgcttcaccacctatgaggttcgcatgcggacaaacctacctatcttcaagctaaaggagtcctgcgtacggcggcgctacagtgactttgagtggctgaaaaatgagctggagagagatagcaagattgtagtaccaccactgcctgggaaagccttgaagcggcagctccctttccgaggagatgaagggatctttgaggagtctttcatcgaagaaaggaggcagggcctcgagcagtttattaacaaaattgctgggcacccactggctcagaatgaacgctgcctacacatgttcctgcaagaggaggcaattgacaggaactacgtcccggggaaggtgcgccagtaggagcccctctcaccacctgccctctactttcctgctgaaatgacattggtttttacactaagcctctctctgtctttgatctgaagttggctgcccatctcctggcctgatagactgtctggcattgtgctccctggtacctgactacaccatgtgggcactctgctaggatcctcttctctgaggagaggtgggaacccacaggcagatgccctttgcttggggttggggtgggtgggtggggggattagactggaaggcaatttcttgggcatttacccatgccagaaggctaacctggggggaggggggcgcttgtgctggtgaggcacttggatacatactgatgctgcaagttcaggggatttttcttactcttaggtttaaccaagaacactgagcagggaaaaaccctgcctttcctaactgcatgtattttttcctttttggaaaggtggtagagactcagaagctttccttgttttcttcaggcctgctcccagttttcttaacagtttcttttgttgctttctctctcccttgttgctttccatggcagtaatcctcctagagtccaagcagtctgttgtatggagcagggtgtgtgggttttctgggcccatcattatggctgcttcagagtcagaagaaagccatagggcagtaggggagctcctattgcctagcccctctccctttgtggctcccactctagctgcctatttttgctcatcagctggtgagtcagtatgggccagcagttctccctccctaagcccttgctactttatgggttagctttgcaggtttggtggcttgaggggtgggggcaactcaccactgccaggtaactccctgaagggtgggagtggattatcttctaggctcttacccgcggtagggaagggcatcaacactgtcttccttccattctcctttcccccatcccatttagtgctgccacagggcagaagcacacaaaccaaccacacagtctctgacttctcctaagcactttgagttgttgaatggggctcaggggcaagagtttttgctgccctccccagcgtggtcacagggttattgaactgcctgcacttgtttctcatgcaactccagcattttccccagaagttgaactatggatagcagcttggtatggatttcctaaatcttaacatttgaagcagcttcttgaggctggcaactatcctggtttctgtcttggagggggtggtttgtttgctggggcccaacgtctgtcccaagtggtggggtgagagtaagttaactttggtgccaggtgagaggtgggggctctttgcttagactccctatcatggaaagattggagttttctatgcagggcactggggaaaaggattgctgattctgactgaccctgatcagagagattaggattgtattttgacataggatttggaacccatctaaatgttgaagttccctgagacagctctccagctgctgagcctgcgccaggggctaagcagcccctaatgagaggctctgctccctttcccacctcgccaatgttgttgttgctgcctttttgatttgtatcctctgttatagacattttttaaaaacgatttcctctttcattgtgcacaagtgctgagagtctgaggccccatttctgctgtgtatatatatcctgactcggggcttttattcagcaaactgttcattcttctgtcagacaatgcaatcgataacctcgaggtcacctgcagcatc

SEQ ID NO: 446611 - DNA, 1918 bp, Homo sapiens
  misc_feature (2)..(2): n is a, c, g, or t
anttcgacggagactctcaccccaacgtctgtcccaagtggtggggtgagagtaagttaactttggtgccaggtgagaggtgggggctctttgcttagactccctatcatggaaagattggagttttctatgcagggcactggggaaaaggattgctgattctgactgaccctgatcagagagattaggattgtattttgacataggatttggaacccatctaaatgttgaagttccctgagacagctctccagctgctgagcctgcgccaggggctaagcagcccctaatgagaggctctgctccctttcccacctcgccaatgttgttgttgctgcctttttgatttgtatcctctgttatagacattttttaaaaacgatttcctctttcattgtgcacaagtgctgagagtctgaggccccatttctgctgtgtatatatatcctgactcggggcttttattcagcaaactgttcattcttctgtcagacaatgtcatattcaactctgttcatattaaaccactgtgaagcaagcctctgttttcctgcttaagttgtaaatttagtattctttagtgtctaggatatgctgggtattatgcagaaatcatacagtgtggccagtgtcctgaggtaatgttttgcatttaaatttttttagaaagcagaatcttaacttatcttaatgatatttacctatcctttttgcaactcacaactgactttgtcacagaggtaatgcatctgcttgcaggaagtagctgtaggctcagtacctgttgtttgagtcagatttagcagatttggtttttaagcttgtgggtttgtgctaatttgggcagaatatatttattatatatgtgtgtgtgtatgtgtgtatgtgtgtgtctgcatatgtaatacatgtacataaacacacatgcatgtgttcatcctctgacacacccacacaacaccaacaaacatttcttctataggctttttatctcaactgacactgttttttttcccaaataaatttgacacaggcagaaaggtgggtgaactctcagaacttttggtgggtggatattcatctgaccagtgagctctgaaatggtttccctacacagagtgggttttggcaagggttggaatgaggggaggtagcagtcttgtcatttagaaaatcaaagctagttttgatgtagctcaacatggaaagaaggtacagaaagtgatgtgttcaaaacattagcaaattaaggctgaatgtggttggctcatgcctgtaatcccagcattttgggaggctgaggcaggaggattgcttgagcccaggaggttgagactagcctgggcaacagagtgagacactgtctctacaaaaaatttcaaaagaaaaaaaaaaaggaaattaatgttacttagcagtatttggttctaagtagaagagtgggggctgtgaggaagttgaggtttttggtagttcatgaatgagatgactaaaaatatctgaggggatagggaagaatgggtatttctgtgaaataaaggaaaggaagggtaaagagagatgcaaccttcataggcagcagtgttagagaatgaactgcagaataaatagaaaagcagctataaaataaagtgttaacaaaaatttggacagatgacaactcatttaacaagtgctaatagtcttctgtgtgtctggtcctatgctaacagcagggctggggatagggtggagtggttgtggtacaagtaaaatatgatattacattctcttttttcgtagaccttaagagttcagttgaagagatgtttagctgggcgtggtggcttatgcctgtaatcccagcactttgggaggattgcttgagcccaggagttggagactagcctgggcaaccgagtgagatctcatctctaca

SEQ ID NO: 446612 - DNA, 2149 bp, Homo sapiens
ccgccgccgcctgtgggttggctagttattttgcaagcgggaggggccgtgcgcgctcctgcctcaggcctctgtcccccaccccctttccccggtcccaggctctccttcggaaagatgtcggacacggcagtagctgatacccggcgccttaactcgaagccgcaggacctgaccgacgcttacgggccgccaagtaacttcctggagatcgacatctttaatcctcagacggtgggcgtgggacgcgcgcgcttcaccacctatgaggttcgcatgcggacaaacctacctatcttcaagctaaaggagtcctgcgtacggcggcgctacagtgactttgagtggctgaaaaatgagctggagagagatagcaagattgtagtaccaccactgcctgggaaagccttgaagcggcagctccctttccgaggagatgaagggatctttgaggagtctttcatcgaagaaaggaggcagggcctcgagcagtttattaacaagggctaagcagcccctaatgagaggctctgctccctttcccacctcgccaatgttgttgttgctgcctttttgatttgtatcctctgttatagacattttttaaaaacgatttcctctttcattgtgcacaagtgctgagagtctgaggccccatttctgctgtgtatatatatcctgactcggggcttttattcagcaaactgttcattcttctgtcagacaatgtcatattcaactctgttcatattaaaccactgtgaagcaagcctctgttttcctgcttaagttgtaaatttagtattctttagtgtctaggatatgctgggtattatgcagaaatcatacagtgtggccagtgtcctgaggtaatgttttgcatttaaatttttttagaaagcagaatcttaacttatcttaatgatatttacctatcctttttgcaactcacaactgactttgtcacagaggtaatgcatctgcttgcaggaagtagctgtaggctcagtacctgttgtttgagtcagatttagcagatttggtttttaagcttgtgggtttgtgctaatttgggcagaatatatttattatatatgtgtgtgtgtatgtgtgtatgtgtgtgtctgcatatgtaatacatgtacataaacacacatgcatgtgttcatcctctgacacacccacacaacaccaacaaacatttcttctataggctttttatctcaactgacactgttttttttcccaaataaatttgacacaggcagaaaggtgggtgaactctcagaacttttggtgggtggatattcatctgaccagtgagctctgaaatggtttccctacacagagtgggttttggcaagggttggaatgaggggaggtagcagtcttgtcatttagaaaatcaaagctagttttgatgtagctcaacatggaaagaaggtacagaaagtgatgtgttcaaaacattagcaaattaaggctgaatgtggttggctcatgcctgtaatcccagcattttgggaggctgaggcaggaggattgcttgagcccaggaggttgagactagcctgggcaacagagtgagacactgtctctacaaaaaatttcaaaagaaaaaaaaaaaggaaattaatgttacttagcagtatttggttctaagtagaagagtgggggctgtgaggaagttgaggtttttggtagttcatgaatgagatgactaaaaatatctgaggggatagggaagaatgggtatttctgtgaaataaaggaaaggaagggtaaagagagatgcaaccttcataggcagcagtgttagagaatgaactgcagaataaatagaaaagcagctataaaataaagtgttaacaaaaatttggacagatgacaactcatttaacaagtgctaatagtcttctgtgtgtctggtcctatgctaacagcagggctggggatagggtggagtggttgtggtacaagtaaaatatgatattacattctcttttttcgtagaccttaagagttcagttgaagagatgtttagctgggcgtggtggcttatgcctgtaatcccagcactttgggaggattgcttgagcccaggagttggagactagcctgggcaaccgagtgagatctcatctctaca

SEQ ID NO: 446613 - DNA, 2038 bp, Homo sapiens
ccgccgccgcctgtgggttggctagttattttgcaagcgggaggggccgtgcgcgctcctgcctcaggcctctgtcccccaccccctttccccggtcccaggctctccttcggaaagatgtcggacacggcagtagctgatacccggcgccttaactcgaagccgcaggacctgaccgacgcttacgggccgccaagtaacttcctggagatcgacatctttaatcctcagacggtgggcgtgggacgcgcgcgcttcaccacctatgaggttcgcatgcggacaaacctacctatcttcaagctaaaggagtcctgcgtacggcggcgctacagtgactttgagtggctgaaaaatgagctggagagagatagcaagattgtagtaccaccactgcctgggaaagccttgaagcggctctgctccctttcccacctcgccaatgttgttgttgctgcctttttgatttgtatcctctgttatagacattttttaaaaacgatttcctctttcattgtgcacaagtgctgagagtctgaggccccatttctgctgtgtatatatatcctgactcggggcttttattcagcaaactgttcattcttctgtcagacaatgtcatattcaactctgttcatattaaaccactgtgaagcaagcctctgttttcctgcttaagttgtaaatttagtattctttagtgtctaggatatgctgggtattatgcagaaatcatacagtgtggccagtgtcctgaggtaatgttttgcatttaaatttttttagaaagcagaatcttaacttatcttaatgatatttacctatcctttttgcaactcacaactgactttgtcacagaggtaatgcatctgcttgcaggaagtagctgtaggctcagtacctgttgtttgagtcagatttagcagatttggtttttaagcttgtgggtttgtgctaatttgggcagaatatatttattatatatgtgtgtgtgtatgtgtgtatgtgtgtgtctgcatatgtaatacatgtacataaacacacatgcatgtgttcatcctctgacacacccacacaacaccaacaaacatttcttctataggctttttatctcaactgacactgttttttttcccaaataaatttgacacaggcagaaaggtgggtgaactctcagaacttttggtgggtggatattcatctgaccagtgagctctgaaatggtttccctacacagagtgggttttggcaagggttggaatgaggggaggtagcagtcttgtcatttagaaaatcaaagctagttttgatgtagctcaacatggaaagaaggtacagaaagtgatgtgttcaaaacattagcaaattaaggctgaatgtggttggctcatgcctgtaatcccagcattttgggaggctgaggcaggaggattgcttgagcccaggaggttgagactagcctgggcaacagagtgagacactgtctctacaaaaaatttcaaaagaaaaaaaaaaaggaaattaatgttacttagcagtatttggttctaagtagaagagtgggggctgtgaggaagttgaggtttttggtagttcatgaatgagatgactaaaaatatctgaggggatagggaagaatgggtatttctgtgaaataaaggaaaggaagggtaaagagagatgcaaccttcataggcagcagtgttagagaatgaactgcagaataaatagaaaagcagctataaaataaagtgttaacaaaaatttggacagatgacaactcatttaacaagtgctaatagtcttctgtgtgtctggtcctatgctaacagcagggctggggatagggtggagtggttgtggtacaagtaaaatatgatattacattctcttttttcgtagaccttaagagttcagttgaagagatgtttagctgggcgtggtggcttatgcctgtaatcccagcactttgggaggattgcttgagcccaggagttggagactagcctgggcaaccgagtgagatctcatctctaca

SEQ ID NO: 446614 - DNA, 480 bp, Homo sapiens
gtgggttgaccgtggcttgtgggttgaccgtggtttgtgggttgaccgtggcttgtgggttgaccgtggcttgttaaggaaagtgaggattatttggagtttatttccttcttttgaggtggtaaacctgtcttcccacagaaacggattaatttttgacctgagccatcctgactgttcttatggtcttagttcttgcaagttgctggctgtgggacaggatggaccctatgcctaataagaaatgaggtacacggtgctttaccatctcattcccactctgtctctctcccatgtggctggaattttgtgtgtgcctgcagattgtagtaccaccactgcctgggaaagccttgaagcggcagctccctttccgaggagatgaagggatctttgaggagtctttcatcgaagaaaggaggcagggcctcgagcagtttattaacaataagccaagttcctgggggctccacttgctac

SEQ ID NO: 446615 - DNA, 3755 bp, Homo sapiens
ccgccgccgcctgtgggttggctagttattttgcaagcgggaggggccgtgcgcgctcctgcctcaggcctctgtcccccaccccctttccccggtcccaggctctccttcggaaagatgtcggacacggcagtagctgatacccggcgccttaactcgaagccgcaggacctgaccgacgcttacgggccgccaagtaacttcctggagatcgacatctttaatcctcagacggtgggcgtgggacgcgcgcgcttcaccacctatgaggttcgcatgcggacaaacctacctatcttcaagctaaaggagtcctgcgtacggcggcgctacagtgactttgagtggctgaaaaatgagctggagagagatagcaagattgtagtaccaccactgcctgggaaagccttgaagcggcagctccctttccgaggagatgaagggatctttgaggagtctttcatcgaagaaaggaggcagggcctcgagcagtttattaacaaaattgctgggcacccactggctcagaatgaacgctgcctacacatgttcctgcaagaggaggcaattgacaggaactacgtcccggggaaggtgcgccagtaggagcccctctcaccacctgccctctactttcctgctgaaatgacattggtttttacactaagcctctctctgtctttgatctgaagttggctgcccatctcctggcctgatagactgtctggcattgtgctccctggtacctgactacaccatgtgggcactctgctaggatcctcttctctgaggagaggtgggaacccacaggcagatgccctttgcttggggttggggtgggtgggtggggggattagactggaaggcaatttcttgggcatttacccatgccagaaggctaacctggggggaggggggcgcttgtgctggtgaggcacttggatacatactgatgctgcaagttcaggggatttttcttactcttaggtttaaccaagaacactgagcagggaaaaaccctgcctttcctaactgcatgtattttttcctttttggaaaggtggtagagactcagaagctttccttgttttcttcaggcctgctcccagttttcttaacagtttcttttgttgctttctctctcccttgttgctttccatggcagtaatcctcctagagtccaagcagtctgttgtatggagcagggtgtgtgggttttctgggcccatcattatggctgcttcagagtcagaagaaagccatagggcagtaggggagctcctattgcctagcccctctccctttgtggctcccactctagctgcctatttttgctcatcagctggtgagtcagtatgggccagcagttctccctccctaagcccttgctactttatgggttagctttgcaggtttggtggcttgaggggtgggggcaactcaccactgccaggtaactccctgaagggtgggagtggattatcttctaggctcttacccgcggtagggaagggcatcaacactgtcttccttccattctcctttcccccatcccatttagtgctgccacagggcagaagcacacaaaccaaccacacagtctctgacttctcctaagcactttgagttgttgaatggggctcaggggcaagagtttttgctgccctccccagcgtggtcacagggttattgaactgcctgcacttgtttctcatgcaactccagcattttccccagaagttgaactatggatagcagcttggtatggatttcctaaatcttaacatttgaagcagcttcttgaggctggcaactatcctggtttctgtcttggagggggtggtttgtttgctggggcccaacgtctgtcccaagtggtggggtgagagtaagttaactttggtgccaggtgagaggtgggggctctttgcttagactccctatcatggaaagattggagttttctatgcagggcactggggaaaaggattgctgattctgactgaccctgatcagagagattaggattgtattttgacataggatttggaacccatctaaatgttgaagttccctgagacagctctccagctgctgagcctgcgccaggggctaagcagcccctaatgagaggctctgctccctttcccacctcgccaatgttgttgttgctgcctttttgatttgtatcctctgttatagacattttttaaaaacgatttcctctttcattgtgcacaagtgctgagagtctgaggccccatttctgctgtgtatatatatcctgactcggggcttttattcagcaaactgttcattcttctgtcagacaatgtcatattcaactctgttcatattaaaccactgtgaagcaagcctctgttttcctgcttaagttgtaaatttagtattctttagtgtctaggatatgctgggtattatgcagaaatcatacagtgtggccagtgtcctgaggtaatgttttgcatttaaatttttttagaaagcagaatcttaacttatcttaatgatatttacctatcctttttgcaactcacaactgactttgtcacagaggtaatgcatctgcttgcaggaagtagctgtaggctcagtacctgttgtttgagtcagatttagcagatttggtttttaagcttgtgggtttgtgctaatttgggcagaatatatttattatatatgtgtgtgtgtatgtgtgtatgtgtgtgtctgcatatgtaatacatgtacataaacacacatgcatgtgttcatcctctgacacacccacacaacaccaacaaacatttcttctataggctttttatctcaactgacactgttttttttcccaaataaatttgacacaggcagaaaggtgggtgaactctcagaacttttggtgggtggatattcatctgaccagtgagctctgaaatggtttccctacacagagtgggttttggcaagggttggaatgaggggaggtagcagtcttgtcatttagaaaatcaaagctagttttgatgtagctcaacatggaaagaaggtacagaaagtgatgtgttcaaaacattagcaaattaaggctgaatgtggttggctcatgcctgtaatcccagcattttgggaggctgaggcaggaggattgcttgagcccaggaggttgagactagcctgggcaacagagtgagacactgtctctacaaaaaatttcaaaagaaaaaaaaaaaggaaattaatgttacttagcagtatttggttctaagtagaagagtgggggctgtgaggaagttgaggtttttggtagttcatgaatgagatgactaaaaatatctgaggggatagggaagaatgggtatttctgtgaaataaaggaaaggaagggtaaagagagatgcaaccttcataggcagcagtgttagagaatgaactgcagaataaatagaaaagcagctataaaataaagtgttaacaaaaatttggacagatgacaactcatttaacaagtgctaatagtcttctgtgtgtctggtcctatgctaacagcagggctggggatagggtggagtggttgtggtacaagtaaaatatgatattacattctcttttttcgtagaccttaagagttcagttgaagagatgtttagctgggcgtggtggcttatgcctgtaatcccagcactttgggaggattgcttgagcccaggagttggagactagcctgggcaaccgagtgagatctcatctctaca

SEQ ID NO: 446616 - DNA, 2988 bp, Homo sapiens
ccgccgccgcctgtgggttggctagttattttgcaagcgggaggggccgtgcgcgctcctgcctcaggcctctgtcccccaccccctttccccggtcccaggctctccttcggaaagatgtcggacacggcagtagctgatacccggcgccttaactcgaagccgcaggacctgaccgacgcttacgggccgccaagtaacttcctggagatcgacatctttaatcctcagacggtgggcgtgggacgcgcgcgcttcaccacctatgaggttcgcatgcggacaaacctacctatcttcaagctaaaggagtcctgcgtacggcggcgctacagtgactttgagtggctgaaaaatgagctggagagagatagcaagcttgttgctttccatggcagtaatcctcctagagtccaagcagtctgttgtatggagcagggtgtgtgggttttctgggcccatcattatggctgcttcagagtcagaagaaagccatagggcagtaggggagctcctattgcctagcccctctccctttgtggctcccactctagctgcctatttttgctcatcagctggtgagtcagtatgggccagcagttctccctccctaagcccttgctactttatgggttagctttgcaggtttggtggcttgaggggtgggggcaactcaccactgccaggtaactccctgaagggtgggagtggattatcttctaggctcttacccgcggtagggaagggcatcaacactgtcttccttccattctcctttcccccatcccatttagtgctgccacagggcagaagcacacaaaccaaccacacagtctctgacttctcctaagcactttgagttgttgaatggggctcaggggcaagagtttttgctgccctccccagcgtggtcacagggttattgaactgcctgcacttgtttctcatgcaactccagcattttccccagaagttgaactatggatagcagcttggtatggatttcctaaatcttaacatttgaagcagcttcttgaggctggcaactatcctggtttctgtcttggagggggtggtttgtttgctggggcccaacgtctgtcccaagtggtggggtgagagtaagttaactttggtgccaggtgagaggtgggggctctttgcttagactccctatcatggaaagattggagttttctatgcagggcactggggaaaaggattgctgattctgactgaccctgatcagagagattaggattgtattttgacataggatttggaacccatctaaatgttgaagttccctgagacagctctccagctgctgagcctgcgccaggggctaagcagcccctaatgagaggctctgctccctttcccacctcgccaatgttgttgttgctgcctttttgatttgtatcctctgttatagacattttttaaaaacgatttcctctttcattgtgcacaagtgctgagagtctgaggccccatttctgctgtgtatatatatcctgactcggggcttttattcagcaaactgttcattcttctgtcagacaatgtcatattcaactctgttcatattaaaccactgtgaagcaagcctctgttttcctgcttaagttgtaaatttagtattctttagtgtctaggatatgctgggtattatgcagaaatcatacagtgtggccagtgtcctgaggtaatgttttgcatttaaatttttttagaaagcagaatcttaacttatcttaatgatatttacctatcctttttgcaactcacaactgactttgtcacagaggtaatgcatctgcttgcaggaagtagctgtaggctcagtacctgttgtttgagtcagatttagcagatttggtttttaagcttgtgggtttgtgctaatttgggcagaatatatttattatatatgtgtgtgtgtatgtgtgtatgtgtgtgtctgcatatgtaatacatgtacataaacacacatgcatgtgttcatcctctgacacacccacacaacaccaacaaacatttcttctataggctttttatctcaactgacactgttttttttcccaaataaatttgacacaggcagaaaggtgggtgaactctcagaacttttggtgggtggatattcatctgaccagtgagctctgaaatggtttccctacacagagtgggttttggcaagggttggaatgaggggaggtagcagtcttgtcatttagaaaatcaaagctagttttgatgtagctcaacatggaaagaaggtacagaaagtgatgtgttcaaaacattagcaaattaaggctgaatgtggttggctcatgcctgtaatcccagcattttgggaggctgaggcaggaggattgcttgagcccaggaggttgagactagcctgggcaacagagtgagacactgtctctacaaaaaatttcaaaagaaaaaaaaaaaggaaattaatgttacttagcagtatttggttctaagtagaagagtgggggctgtgaggaagttgaggtttttggtagttcatgaatgagatgactaaaaatatctgaggggatagggaagaatgggtatttctgtgaaataaaggaaaggaagggtaaagagagatgcaaccttcataggcagcagtgttagagaatgaactgcagaataaatagaaaagcagctataaaataaagtgttaacaaaaatttggacagatgacaactcatttaacaagtgctaatagtcttctgtgtgtctggtcctatgctaacagcagggctggggatagggtggagtggttgtggtacaagtaaaatatgatattacattctcttttttcgtagaccttaagagttcagttgaagagatgtttagctgggcgtggtggcttatgcctgtaatcccagcactttgggaggattgcttgagcccaggagttggagactagcctgggcaaccgagtgagatctcatctctaca

SEQ ID NO: 446617 - DNA, 2540 bp, Homo sapiens
ccgccgccgcctgtgggttggctagttattttgcaagcgggaggggccgtgcgcgctcctgcctcaggcctctgtcccccaccccctttccccggtcccaggctctccttcggaaagatgtcggacacggcagtagctgatacccggcgccttaactcgaagccgcaggacctgaccgacgcttacgggccgccaagtaacttcctggagatcgacatctttaatcctcagacggtgggcgtgggacgcgcgcgcttcaccacctatgaggttcgcatgcggacaaacctacctatcttcaagctaaaggagtcctgcgtacggcggcgctacagtgactttgagtggctgaaaaatgagctggagagagatagcaagattgtagtaccaccactgcctgggaaagccttgaagcggcagctccctttccgaggagatgaagggatctttgaggagtctttcatcgaagaaaggaggcagggcctcgagcagtttattaacaaaattgctgggcacccactggctcagaatgaacgctgcctacacatgttcctgcaagaggaggcaattgacaggaactacgtcccggggaaggtgcgccagtaggagcccctctcaccacctgccctctactttcctgctgaaatgacattggtttttacactaagcctctctctgtctttgatctgaagttggctgcccatctcctggcctgatagactgtctggcattgtgctccctggtacctgactacaccatgtgggcactctgctaggatcctcttctctgaggagaggtgggaacccacaggcagatgccctttgcttggggttggggtgggtgggtggggggattagactggaaggcaatttcttgggcatttacccatgccagaaggctaacctggggggaggggggcgcttgtgctggtgaggcacttggatacatactgatgctgcaagttcaggggatttttcttactcttaggtttaaccaagaacactgagcagggaaaaaccctgcctttcctaactgcatgtattttttcctttttggaaaggtggtagagactcagaagctttccttgttttcttcaggcctgctcccagttttcttaacagtttcttttgttgctttctctctcccttgttgctttccatggcagtaatcctcctagagtccaagcagtctgttgtatggagcagggtgtgtgggttttctgggcccatcattatggctgcttcagagtcagaagaaagccatagggcagtaggggagctcctattgcctagcccctctccctttgtggctcccactctagctgcctatttttgctcatcagctggtgagtcagtatgggccagcagttctccctccctaagcccttgctactttatgggttagctttgcaggtttggtggcttgaggggtgggggcaactcaccactgccaggtaactccctgaagggtgggagtggattatcttctaggctcttacccgcggtagggaagggcatcaacactgtcttccttccattctcctttcccccatcccatttagtgctgccacagggcagaagcacacaaaccaaccacacagtctctgacttctcctaagcactttgagttgttgaatggggctcaggggcaagagtttttgctgccctccccagcgtggtcacagggttattgaactgcctgcacttgtttctcatgcaactccagcattttccccagaagttgaactatggatagcagcttggtatggatttcctaaatcttaacatttgaagcagcttcttgaggctggcaactatcctggtttctgtcttggagggggtggtttgtttgctggggcccaacgtctgtcccaagtggtggggtgagagtaagttaactttggtgccaggtgagaggtgggggctctttgcttagactccctatcatggaaagattggagttttctatgcagggcactggggaaaaggattgctgattctgactgaccctgatcagagagattaggattgtattttgacataggatttggaacccatctaaatgttgaagttccctgagacagctctccagctgctgagcctgcgccaggggctaagcagcccctaatgagaggctctgctccctttcccacctcgccaatgttgttgttgctgcctttttgatttgtatcctctgttatagacattttttaaaaacgatttcctctttcattgtgcacaagtgctgagagtctgaggccccatttctgctgtgtatatatatcctgactcggggcttttattcagcaaactgttcattcttctgtcagacaatgtcatattcaactctgttcatattaaaccactgccatggagcaaaaaaaaaaaaaaaaggggggtaaaattccggggccaataggccgttgtaagggcaaggggaaaaaaagggggtaagagggaggagggttggagacctctgggttggaccgaacggaaaaagttgaggtttggtgagataaagaacaagggggtaagtgcgaa

SEQ ID NO: 446618 - DNA, 2377 bp, Homo sapiens
ccgccgccgcctgtgggttggctagttattttgcaagcgggaggggccgtgcgcgctcctgcctcaggcctctgtcccccaccccctttccccggtcccaggctctccttcggaaagatgtcggacacggcagtagctgatacccggcgccttaactcgaagccgcaggacctgaccgacgcttacgggccgccaagtaacttcctggagatcgacatctttaatcctcagacggtgggcgtgggacgcgcgcgcttcaccacctatgaggttcgcatgcggacaaacctacctatcttcaagctaaaggagtcctgcgtacggcggcgctacagtgactttgagtggctgaaaaatgagctggagagagatagcaagattgtagtaccaccactgcctgggaaagccttgaagcggcagctccctttccgaggagatgaagggatctttgaggagtctttcatcgaagaaaggaggcagggcctcgagcagtttattaacaaaattgctgggcacccactggctcagaatgaacgctgcctacacatgttcctgcaagaggaggcaattgacaggaactacgtcccggggaaggtgcgccagtaggagcccctctcaccacctgccctctactttcctgctgaaatgacattggtttttacactaagcctctctctgtctttgatctgaagttggctgcccatctcctggcctgatagactgtctggcattgtgctccctggtacctgactacaccatgtgggcactctgctaggatcctcttctctgaggagaggtgggaacccacaggcagatgccctttgcttggggttggggtgggtgggtggggggattagactggaaggcaatttcttgggcatttacccatgccagaaggctaacctggggggaggggggcgcttgtgctggtgaggcacttggatacatactgatgctgcaagttcaggggatttttcttactcttaggtttaaccaagaacactgagcagggaaaaaccctgcctttcctaactgcatgtattttttcctttttggaaaggtggtagagactcagaagctttccttgttttcttcaggcctgctcccagttttcttaacagtttcttttgttgctttctctctcccttgttgctttccatggcagtaatcctcctagagtccaagcagtctgttgtatggagcagggtgtgtgggttttctgggcccatcattatggctgcttcagagtcagaagaaagccatagggcagtaggggagctcctattgcctagcccctctccctttgtggctcccactctagctgcctatttttgctcatcagctggtgagtcagtatgggccagcagttctccctccctaagcccttgctactttatgggttagctttgcaggtttggtggcttgaggggtgggggcaactcaccactgccaggtaactccctgaagggtgggagtggattatcttctaggctcttacccgcggtagggaagggcatcaacactgtcttccttccattctcctttcccccatcccatttagtgctgccacagggcagaagcacacaaaccaaccacacagtctctgacttctcctaagcactttgagttgttgaatggggctcaggggcaagagtttttgctgccctccccagcgtggtcacagggttattgaactgcctgcacttgtttctcatgcaactccagcattttccccagaagttgaactatggatagcagcttggtatggatttcctaaatcttaacatttgaagcagcttcttgaggctggcaactatcctggtttctgtcttggagggggtggtttgtttgctggggcccaacgtctgtcccaagtggtggggtgagagtaagttaactttggtgccaggtgagaggtgggggctctttgcttagactccctatcatggaaagattggagttttctatgcagggcactggggaaaaggattgctgattctgactgaccctgatcagagagattaggattgtattttgacataggatttggaacccatctaaatgttgaagttccctgagacagctctccagctgctgagcctgcgccaggggctaagcagcccctaatgagaggctctgctccctttcccacctcgccaatgttgttgttgctgcctttttgatttgtatcctctgttatagacattttttaaaaacgatttcctctttcattgtgcacaagtgctgagagtctgaggccccatttctgctgtgtatatatatcctgactcggggctcacatgcggcgtacagttctcccgtcggtccgacatagtcatcgacagtggcgttaacatatctgcactgtcaaatagca

SEQ ID NO: 446619 - DNA, 4223 bp, Homo sapiens
  misc_feature (1395)..(1395): n is a, c, g, or t
cattcatcttctcctgcccttggacatcacagctccaggaactcagatcttcagactcagggtgaaggacaccaccagctttccaggttccccagcttgcagacggcatacgctaggtcttgactccactaacggggacttctcatacggctttgaacttggaccttggtgcataagcaaatgtaactcagcgaattgtaatggaaagcatatggacaggtctacgccacatcacttaggtgctaagagatgccgtttgcaggcctcatctctgcttgagaatcgggggctccaggcactagaagagccggctgatcctgggctcctagcttgaataagccttcacttccagctgctctccccaacggctgtgtaaactactcgtttctcttaatgatgggtattggtaagaataccacatccaaatcaatggaggctggaagttcaacagaaggcaaatacgaagacgaggcaaagcacccagctttcttcactcttccggtggtgataaatggaggcgccacctccagcggtgagcaggacaatgaggacactgagctcatggcgatctacactacggaaaacggcattgcagaaaagagctctctcgctgagaccctggatagcactggcagtctggacccccagcgatcagacatgatttataccatagaagatgttcctccctggtacctgtgtatatttctggggctacagcactacctgacatgcttcagcggcacgatcgcagtgcccttcctgttggccgatgccatgtgtgtggggtacgaccagtgggccaccagccagctcattgggaccattttcttctgtgtgggaatcactactttgctacagacaacgtttggatgcaggttacccctgtttcaggccagtgcttttgcatttttggcccctgctcgagccatcctgtctttagataaatggaaatgtaacaccacagatgtttcagttgccaatggaacagcagagctgttgcacacagaacacatctggtatccccggatccgagagatccagggggccatcatcatgtcctcactgatagaagtagtcatcggcctcctcggcctgcctggggctctactgaagtacatcggtcccttgaccattacacccacggtggccctaattggcctctctggtttccaggcagcgggggagagagccgggaagcactggggcattgccatgctgacaatattcctagtattactgttttctcaatacgccagaaatgttaaatttcctctcccgatttataaatccaagaaaggatggactgcgtacaagttacagctgttcaaaatgttccctatcatcctggccatcctggtatcctggctgctctgcttcatcttcacggtgacagangtcttccctcccgacagcacaaagtatggcttctatgctcgcacagatgccaggcaaggcgtgcttctggtagccccgtggtttaaggttccatacccatttcagtggggactgcccaccgtgtctgcggccggtgtcatcggcatgctcagtgccgtggtcgccagcatcatcgagtctattggtgactactacgcctgtgcacggctgtcctgtgccccacccccccccatccacgcaataaacaggggaattttcgtggaaggcctctcctgtgttcttgatggcatatttggtactgggaatggctctacttcatccagtcccaacattggagttttgggaattacaaaggtcggcagccgccgcgtgatacagtgcggagcagccctcatgctcgctctgggcatgatcgggaagttcagcgccctctttgcgtcccttccggatcctgtgctgggagccctgttctgcacgctctttggaatgatcacagctgttggcctctctaacctgcagttcattgatttaaattcttcccggaacctctttgtgcttggattttcgatcttctttgggctcgtccttccaagttacctcagacagaaccctctggtcacagggataacaggaatcgatcaagtgttgaacgtccttctcacaactgctatgtttgtagggggctgtgtggcttttatcctggataacaccatcccaggcactccagaggaaagaggaatccggaaatggaagaagggtgtgggcaaagggaacaaatcactcgacggcatggagtcgtacaatttgccatttggcatgaacattataaaaaaatacagatgcttcagctacttacccatcagcccaacctttgtgggctacacatggaaaggcctcaggaagagcgacaacagccggagttcagatgaagactcccaggccacgggatagcctttgctgtgccctgtggcctggccgcagtgaggcatgtatctgtagttccttgctgagtaacaagaagtaaaatacatgtttgtatatctacatttacattctgcgccccagagctaagacagactgcgaatcacttttctgctgtgagggtgatggtgcctgatgcggtgtctcgcctatctccttatttaagcccttaactccttgccctttgagagtgtccattgctggccatggtcactaaatttgaagttccagtcctccctttggagtggacatttaaaatctgcagccattccttgcttcagttcccttccaccacccagggctggctttcctataagccacctccagggtccaggggctttctctctctctccgaagcccctggacctgtttccttgtcatttgaccctcgtctgtgcccgcggagacctcctctgaccaaggggcactagtatgccttgcgctatcatgactgactggcccagtatgattctgttgtcgctgatctcccggaggaggaggctgttgacctgaaaacagtggcgtggctcccctgtgcccagatctggccatgggtgaggcctgcacagatgttgaatgaacatctgtttggggcattggagggaaaaggaaaggaccctgaagccaatatctgattctcggctgcaccttctcttggccaccctggccctgaccgggccagcacgtgcacactggcctcttttcatttcactagtggccgagacaccctctctggcatttatcactgttggccggtgtgatgagtatagagtgccacccaaggcaccagtcacacaagctgatgggcgtcttggctctgccgtcatgtggatgttattgtcgcgcgcgtctataattacaaggttttattcctatttaatgttattgactatagcagattttggaaatcagtgttttccatgtgaccctctttccttgcatccctattccttgtcccccacccactcttccccccatcaagaaaagaaccagcatttgtaaagctgtggacaccatcagggaagcttgttgtaacggcttttgaaggccagtaaccattgttgtggttgtgttttgtattgcttgataccatgaaagtgtaaatactgtaatgcctaatctatttatcaaaactgactactggaccggagcccagaaaccatgggtcaagttacacgtgaatttgttttgtgaagaagggaagctggggcaggtaacacgcagagccgccacgtggaacggtctgtccgccggtctgtcccgcttgccgggcttctgttgcaagtcttggcttaaggagacttcctgtgggttgccatgtcgcacgtccgttagatcttgattttacaggtgagggtggttgccaaaggtgataagaaaagcagccaacaggctccctctcacttaagagagttctaattaataacactaaattcttcctgagaaatgactcctcttggtttggtttgaagtttttcagtgaaggaaaaggcctgagataggaagcagtgccctcgcttcatgaggtggcacatcttcggtggccgttggcctggtcgagctttggtcagctgcgtgggtgcctgtctcctgtctccagcggcagggcatggttcttggcagcctggtgtccacacggtgcattcctgtccccctcggccccaggctggctcagctctccagtgctgcggcgctgtctttgcagcattgccatgtcaccgtagcccccttcactcttggaagtttggggcttcaaggtttattctggcaagaacacctcggagccactgcattgttttgccaaaaacttactgcagattaagtaaagaacttagatgctaaattac

SEQ ID NO: 446620 - DNA, 2055 bp, Homo sapiens
  misc_feature (1395)..(1395): n is a, c, g, or t
cattcatcttctcctgcccttggacatcacagctccaggaactcagatcttcagactcagggtgaaggacaccaccagctttccaggttccccagcttgcagacggcatacgctaggtcttgactccactaacggggacttctcatacggctttgaacttggaccttggtgcataagcaaatgtaactcagcgaattgtaatggaaagcatatggacaggtctacgccacatcacttaggtgctaagagatgccgtttgcaggcctcatctctgcttgagaatcgggggctccaggcactagaagagccggctgatcctgggctcctagcttgaataagccttcacttccagctgctctccccaacggctgtgtaaactactcgtttctcttaatgatgggtattggtaagaataccacatccaaatcaatggaggctggaagttcaacagaaggcaaatacgaagacgaggcaaagcacccagctttcttcactcttccggtggtgataaatggaggcgccacctccagcggtgagcaggacaatgaggacactgagctcatggcgatctacactacggaaaacggcattgcagaaaagagctctctcgctgagaccctggatagcactggcagtctggacccccagcgatcagacatgatttataccatagaagatgttcctccctggtacctgtgtatatttctggggctacagcactacctgacatgcttcagcggcacgatcgcagtgcccttcctgttggccgatgccatgtgtgtggggtacgaccagtgggccaccagccagctcattgggaccattttcttctgtgtgggaatcactactttgctacagacaacgtttggatgcaggttacccctgtttcaggccagtgcttttgcatttttggcccctgctcgagccatcctgtctttagataaatggaaatgtaacaccacagatgtttcagttgccaatggaacagcagagctgttgcacacagaacacatctggtatccccggatccgagagatccagggggccatcatcatgtcctcactgatagaagtagtcatcggcctcctcggcctgcctggggctctactgaagtacatcggtcccttgaccattacacccacggtggccctaattggcctctctggtttccaggcagcgggggagagagccgggaagcactggggcattgccatgctgacaatattcctagtattactgttttctcaatacgccagaaatgttaaatttcctctcccgatttataaatccaagaaaggatggactgcgtacaagttacagctgttcaaaatgttccctatcatcctggccatcctggtatcctggctgctctgcttcatcttcacggtgacagangtcttccctcccgacagcacaaagtatggcttctatgctcgcacagatgccaggcaaggcgtgcttctggtagccccgtggtttaaggttccatacccatttcagtggggactgcccaccgtgtctgcggccggtgtcatcggcatgctcagtgccgtggtcgccagcatcatcgagtctattggtgactactacgcctgtgcacggctgtcctgtgccccacccccccccatccacgcaataaacaggtacgttcctgagaagacaagttcctgattggtcccagcaccttgttactttgttcttaggtttacattaccttgaagacaaaaccaagagtttcagcaggagcccagccaagcagcaggactctagcgactgtttgatgcatcaccacctttgtttactttcgactgtctgatacaccactgcctttgtttactttcattttcctcgtccatgacgtggaacggaattcctacccttccttaattgcagtgacatcaaataacacactctctgcgaaaccactgtaagccttaaattcaaaaaccacatgccaagcactgcacttgttctttgctttttttggggtgtgtgtgtgtgtgtgtgtcatttggagattagatagataaaatcaaagtagctctgtctatatat

SEQ ID NO: 446621 - DNA, 987 bp, Homo sapiens
ctcagcctcccgagtagttggaattacaggcacatgcccccacgcctggctaatttttgtatttttagtagagatggggtttcaccttgttggccaggctggtctcgaactcctgacctcgtgatctgcctgcctcggcctcccaaagtgctgggattacaggcgtgagccaccgcatccggctacgatgttttcttttaattaaagacacagtgcacatcagtcctcattatggccgccttcatctgacttagcaactgtcccaggcatctggtgcttaagattttaaaatgaacagtttccatgagcttcagaatccaagtggatcttgtagagtcttgcagcgttcagaatgactttgggtaactggtcctggtcactttcgcctgcctctctaggagcattcatggttgttttcctcccacagttcagtggggactgcccaccgtgtctgcggccggtgtcatcggcatgctcagtgccgtggtcgccagcatcatcgagtctattggtgactactacgcctgtgcacggctgtcctgtgccccacccccccccatccacgcaataaacaggtacgttcctgagaagacaagttcctgattggtcccagcaccttgttactttgttcttaggtttacattaccttgaagacaaaaccaagagtttcagcaggagcccagccaagcagcaggactctagcgactgtttgatgcatcaccacctttgtttactttcgactgtctgatacaccactgcctttgtttactttcattttcctcgtccatgacgtggaacggaattcctacccttccttaattgcagtgacatcaaataacacactctctgcgaaaccactgtaagccttaaattcaaaaaccacatgccaagcactgcacttgttctttgctttttttggggtgtgtgtgtgtgtgtgtgtcatttggagattagatagataaaatcaaagtagctctgtctatatat

SEQ ID NO: 446622 - DNA, 594 bp, Homo sapiens
ctgtctcctgaaggccttgccattctggtcaggagaggattagacagcaagtaagggaggccctgtccccagagggcagaaaccaacacacagagactgaccggctcccttctcacattagcgagctgtctcttttggatctgctaggatgaaatcctggacaaggggtctcttgccaggtttaagctctggtggccaggatttgagggcagctgcttagataggcaagtatagagctgcttggtcccagagctgccaaagtggaaagatgtgagtgggaacagcctggggattagcaagcaacctgctcaagcatgatggaatttatataatctcttaatgggcagccataatcttttaaatttggccacagctgtagaggtaagttgatagtcactaatggccaaaagctgcatcttaatttgagtgttgtgtaactgttgggggtgtgaatacattccctagctggggtgtcacctggactcgcagctggccccgtgtaggtgatcccagtggttgttacacacttggttccattgtgaagactctagtcccggcgtctgggtttttattagaattggagcctgagcttag

SEQ ID NO: 446623 - DNA, 231 bp, Homo sapiens
ctgtgatcacaccactccacttcagcctggttgacatagtgagaccctgtctcaaaaaacaaatgatgaatgggaattgttgacatcacagcaggaggaagaaaagaacaggtagaatggattaccagggaaaagaaagaagatgttcagggcacaagcaagagcagtgacataaaggaagggaaaggaaatagagttatagaaagaaggaagaatagagaaaggagaaaa

SEQ ID NO: 446624 - DNA, 6983 bp, Homo sapiens
  misc_feature (1395)..(1395): n is a, c, g, or t
cattcatcttctcctgcccttggacatcacagctccaggaactcagatcttcagactcagggtgaaggacaccaccagctttccaggttccccagcttgcagacggcatacgctaggtcttgactccactaacggggacttctcatacggctttgaacttggaccttggtgcataagcaaatgtaactcagcgaattgtaatggaaagcatatggacaggtctacgccacatcacttaggtgctaagagatgccgtttgcaggcctcatctctgcttgagaatcgggggctccaggcactagaagagccggctgatcctgggctcctagcttgaataagccttcacttccagctgctctccccaacggctgtgtaaactactcgtttctcttaatgatgggtattggtaagaataccacatccaaatcaatggaggctggaagttcaacagaaggcaaatacgaagacgaggcaaagcacccagctttcttcactcttccggtggtgataaatggaggcgccacctccagcggtgagcaggacaatgaggacactgagctcatggcgatctacactacggaaaacggcattgcagaaaagagctctctcgctgagaccctggatagcactggcagtctggacccccagcgatcagacatgatttataccatagaagatgttcctccctggtacctgtgtatatttctggggctacagcactacctgacatgcttcagcggcacgatcgcagtgcccttcctgttggccgatgccatgtgtgtggggtacgaccagtgggccaccagccagctcattgggaccattttcttctgtgtgggaatcactactttgctacagacaacgtttggatgcaggttacccctgtttcaggccagtgcttttgcatttttggcccctgctcgagccatcctgtctttagataaatggaaatgtaacaccacagatgtttcagttgccaatggaacagcagagctgttgcacacagaacacatctggtatccccggatccgagagatccagggggccatcatcatgtcctcactgatagaagtagtcatcggcctcctcggcctgcctggggctctactgaagtacatcggtcccttgaccattacacccacggtggccctaattggcctctctggtttccaggcagcgggggagagagccgggaagcactggggcattgccatgctgacaatattcctagtattactgttttctcaatacgccagaaatgttaaatttcctctcccgatttataaatccaagaaaggatggactgcgtacaagttacagctgttcaaaatgttccctatcatcctggccatcctggtatcctggctgctctgcttcatcttcacggtgacagangtcttccctcccgacagcacaaagtatggcttctatgctcgcacagatgccaggcaaggcgtgcttctggtagccccgtggtttaaggttccatacccatttcagtggggactgcccaccgtgtctgcggccggtgtcatcggcatgctcagtgccgtggtcgccagcatcatcgagtctattggtgactactacgcctgtgcacggctgtcctgtgccccacccccccccatccacgcaataaacaggggaattttcgtggaaggcctctcctgtgttcttgatggcatatttggtactgggaatggctctacttcatccagtcccaacattggagttttgggaattacaaaggtcggcagccgccgcgtgatacagtgcggagcagccctcatgctcgctctgggcatgatcgggaagttcagcgccctctttgcgtcccttccggatcctgtgctgggagccctgttctgcacgctctttggaatgatcacagctgttggcctctctaacctgcagttcattgatttaaattcttcccggaacctctttgtgcttggattttcgatcttctttgggctcgtccttccaagttacctcagacagaaccctctggtcacagggataacaggaatcgatcaagtgttgaacgtccttctcacaactgctatgtttgtagggggctgtgtggcttttatcctggataacaccatcccaggcactccagaggaaagaggaatccggaaatggaagaagggtgtgggcaaagggaacaaatcactcgacggcatggagtcgtacaatttgccatttggcatgaacattataaaaaaatacagatgcttcagctacttacccatcagcccaacctttgtgggctacacatggaaaggcctcaggaagagcgacaacagccggagttcagatgaagactcccaggccacgggatagcctttgctgtgccctgtggcctggccgcagtgaggcatgtatctgtagttccttgctgagtaacaagaagtaaaatacatgtttgtatatctacatttacattctgcgccccagagctaagacagactgcgaatcacttttctgctgtgagggtgatggtgcctgatgcggtgtctcgcctatctccttatttaagcccttaactccttgccctttgagagtgtccattgctggccatggtcactaaatttgaagttccagtcctccctttggagtggacatttaaaatctgcagccattccttgcttcagttcccttccaccacccagggctggctttcctataagccacctccagggtccaggggctttctctctctctccgaagcccctggacctgtttccttgtcatttgaccctcgtctgtgcccgcggagacctcctctgaccaaggggcactagtatgccttgcgctatcatgactgactggcccagtatgattctgttgtcgctgatctcccggaggaggaggctgttgacctgaaaacagtggcgtggctcccctgtgcccagatctggccatgggtgaggcctgcacagatgttgaatgaacatctgtttggggcattggagggaaaaggaaaggaccctgaagccaatatctgattctcggctgcaccttctcttggccaccctggccctgaccgggccagcacgtgcacactggcctcttttcatttcactagtggccgagacaccctctctggcatttatcactgttggccggtgtgatgagtatagagtgccacccaaggcaccagtcacacaagctgatgggcgtcttggctctgccgtcatgtggatgttattgtcgcgcgcgtctataattacaaggttttattcctatttaatgttattgactatagcagattttggaaatcagtgttttccatgtgaccctctttccttgcatccctattccttgtcccccacccactcttccccccatcaagaaaagaaccagcatttgtaaagctgtggacaccatcagggaagcttgttgtaacggcttttgaaggccagtaaccattgttgtggttgtgttttgtattgcttgataccatgaaagtgtaaatactgtaatgcctaatctatttatcaaaactgactactggaccggagcccagaaaccatgggtcaagttacacgtgaatttgttttgtgaagaagggaagctggggcaggtaacacgcagagccgccacgtggaacggtctgtccgccggtctgtcccgcttgccgggcttctgttgcaagtcttggcttaaggagacttcctgtgggttgccatgtcgcacgtccgttagatcttgattttacaggtgagggtggttgccaaaggtgataagaaaagcagccaacaggctccctctcacttaagagagttctaattaataacactaaattcttcctgagaaatgactcctcttggtttggtttgaagtttttcagtgaaggaaaaggcctgagataggaagcagtgccctcgcttcatgaggtggcacatcttcggtggccgttggcctggtcgagctttggtcagctgcgtgggtgcctgtctcctgtctccagcggcagggcatggttcttggcagcctggtgtccacacggtgcattcctgtccccctcggccccaggctggctcagctctccagtgctgcggcgctgtctttgcagcattgccatgtcaccgtagcccccttcactcttggaagtttggggcttcaaggtttattctggcaagaacacctcggagccactgcattgttttgccaaaaacttactgcagattaagtaaagaacttagatgctaaattacatctaattttgtatgtttttttaaatgtgtctttgatgcatactttagaagcacactggctcgcggtttccatccctcttgccttgggacactcttgaggctggcagccctcctgcaatgagttgctctcagttccttctgtttggattttgctcaacatctccagtttctctgctctgaaaaatggggaaaactgctaaacatcccagagatttgcaatcttctagctctccaggtgagcagaaagaccaaatatccaaataaaagcctgaaagccattggtgatccaggggcaccttctcttcagcttgactgggcgtcttccgctgcataacactcaaggtgtctgctctagtcatccagaaacccactcccttctgaagcccctccttgggccgggttgtatcaggaggattcaaccccgctaacatgtggggtgccctctgtaggccttcacacagggaaggaagccctaccctttcaactcctgttggagtgagagtttcctgttctgattccactgtggccaacccaataattctgtccgaggaggggtaagggaataggaggtggggagcaaagagggcagcctgactagatgcccctgctgaatctggtactttctgcacagccttgagtgattggagtcccctaatgactaataaacttgaacatgtaacacacacacacacacacacacacaccattttaggaagtggttctcctactggaaaatatgctacagaatgaaagtttgtaattgaaagaaaaagaatgtattcatctgcttcttgggtttaagcacacacctgaaggggagatattgggggacacggtggccactcgcggtctgtgtcatgacacttcccattcacatcattggcctgcgttgctggggctttgaaccaccaccccgtactttgttttgcctgtagagtgttgtaaaatattttggatgtgaatgtccttgcaggccggttagtctccagtttccacagagaccacctacccaccaccttcccaggtcacctgcctggtccctgaaagaaagcatttgtgtgggcaatcccaacatgaaatgtagacagcgtgaatacggacaggaggtgatgccatattcacagtgggggatggagggcccccacccctgcttcacagaataatgggaagtgactctagtctttgtaagcaattttcattctcattaggaagttaaatgtagattcacagatacatttactttcagaatcctcaagaggatttcaaatgctaacttttagtttcttgggattgatcaaggcaagagaagtggctttaaccatgccagccagaatgaagcatcatgggtcctgatggtttcccgttttcatggtaacaaattcgcacagaggttttgctttatactgtagaataccgactttcatgatgacaacttggtttatgcatgaatattgcagtatttccatatagcaaaataacatttctacccaggataatagtcacagttttccagggagggaatgatataattttcatgacaatgtcatgtgatgatagaatttctccattgatgaatctctagtatgtgtgtatactttatttacccatacgtatattttatgaccatgagctaagttgttatttctttcattcatatccctgctgaaatattggtactagcaacttaaagttggcaagtctcatcttcagtaatacggatgccatgggagtggccaggccagattgaaggtgaatatggagcagtagcagaagcctcattccagaacccatctggccagagaagcagcagcatcctgggggatggccgtgcatggggtgtacactcgctataggcataggcccggcatggctgtcgctggacgccagctgtgcacacccagccacacctgctgcacgccgcgttagtgtgcggctccgggcctgagcattcgcaaagctcgcttctccagggagcctcctcttggctttggaaaagagcccagggacttaacgtgctgcctgttgtactctgtcccctcatgactttttagacacagggactaggacatcgaccaccctctgcccctcctgcagtcagaacccgagtagtgcaagaacggccacccggttttgccagcgttcagcgtctgcccatggacccataaggcacattagcgttgggggtctcttttcagcagcctcacagacattcccgtcctttctggttggtgttgactgtgtttcagcatcactctaccctcccatgtccttagcattgctgtgcgtgtttccaggcacttaggacacccttccccacgttgccatcttactgacagttcaaatgactctccttttttgttcgttagtaacaatcttcatttgacaccttaatacatttctgactgttcttaaaacagtggggatgcctatattttccttgagtttttgtgactgactttggctatatatacctttctggggttttgtttgttttttatttttattttgattaccgagggtatttggggtggggttgttttttgagatgtgtaattcttttatggagtttttaaaaagaattttcatattgtttttctaacatggcttcattaaacgtttaagtattttaaaaatatgtaatatttggaccagatgttgtgaataatagtagagataaagctattttattctgtatttttaaaactgttccgtacaaataaaagctctcctggacacagttttgctcttcacgtgcctcct

SEQ ID NO: 446625 - DNA, 6929 bp, Homo sapiens
  misc_feature (1395)..(1395): n is a, c, g, or t
cattcatcttctcctgcccttggacatcacagctccaggaactcagatcttcagactcagggtgaaggacaccaccagctttccaggttccccagcttgcagacggcatacgctaggtcttgactccactaacggggacttctcatacggctttgaacttggaccttggtgcataagcaaatgtaactcagcgaattgtaatggaaagcatatggacaggtctacgccacatcacttaggtgctaagagatgccgtttgcaggcctcatctctgcttgagaatcgggggctccaggcactagaagagccggctgatcctgggctcctagcttgaataagccttcacttccagctgctctccccaacggctgtgtaaactactcgtttctcttaatgatgggtattggtaagaataccacatccaaatcaatggaggctggaagttcaacagaaggcaaatacgaagacgaggcaaagcacccagctttcttcactcttccggtggtgataaatggaggcgccacctccagcggtgagcaggacaatgaggacactgagctcatggcgatctacactacggaaaacggcattgcagaaaagagctctctcgctgagaccctggatagcactggcagtctggacccccagcgatcagacatgatttataccatagaagatgttcctccctggtacctgtgtatatttctggggctacagcactacctgacatgcttcagcggcacgatcgcagtgcccttcctgttggccgatgccatgtgtgtggggtacgaccagtgggccaccagccagctcattgggaccattttcttctgtgtgggaatcactactttgctacagacaacgtttggatgcaggttacccctgtttcaggccagtgcttttgcatttttggcccctgctcgagccatcctgtctttagataaatggaaatgtaacaccacagatgtttcagttgccaatggaacagcagagctgttgcacacagaacacatctggtatccccggatccgagagatccagggggccatcatcatgtcctcactgatagaagtagtcatcggcctcctcggcctgcctggggctctactgaagtacatcggtcccttgaccattacacccacggtggccctaattggcctctctggtttccaggcagcgggggagagagccgggaagcactggggcattgccatgctgacaatattcctagtattactgttttctcaatacgccagaaatgttaaatttcctctcccgatttataaatccaagaaaggatggactgcgtacaagttacagctgttcaaaatgttccctatcatcctggccatcctggtatcctggctgctctgcttcatcttcacggtgacagangtcttccctcccgacagcacaaagtatggcttctatgctcgcacagatgccaggcaaggcgtgcttctggtagccccgtggtttaaggttccatacccatttcagtggggactgcccaccgtgtctgcggccggtgtcatcggcatgctcagtgccgtggtcgccagcatcatcgagtctattggtgactactacgcctgtgcacggctgtcctgtgccccacccccccccatccacgcaataaacaggggaattttcgtggaaggcctctcctgtgttcttgatggcatatttggtactgggaatggctctacttcatccagtcccaacattggagttttgggaattacaaaggtcggcagccgccgcgtgatacagtgcggagcagccctcatgctcgctctgggcatgatcgggaagttcagcgccctctttgcgtcccttccggatcctgtgctgggagccctgttctgcacgctctttggaatgatcacagctgttggcctctctaacctgcagttcattgatttaaattcttcccggaacctctttgtgcttggattttcgatcttctttgggctcgtccttccaagttacctcagacagaaccctctggtcacagggataacaggaatcgatcaagtgttgaacgtccttctcacaactgctatgtttgtagggggctgtgtggcttttatcctggataacaccatcccaggcactccagaggaaagaggaatccggaaatggaagaagggtgtgggcaaagggaacaaatcactcgacggcatggagtcgtacaatttgccatttggcatgaacattataaaaaaatacagatgcttcagctacttacccatcagcccaacctttgtgggctacacatggaaaggcctcaggaagagcgacaacagccggagttcagatgaagactcccaggccacgggatagcctttgctgtgccctgtggcctggccgcagtgaggcatgtatctgtagttccttgctgagtaacaagaagtaaaatacatgtttgtatatctacatttacattctgcgccccagagctaagacagactgcgaatcacttttctgctgtgagggtgatggtgcctgatgcggtgtctcgcctatctccttatttaagcccttaactccttgccctttgagagtgtccattgctggccatggtcactaaatttgaagttccagtcctccctttggagtggacatttaaaatctgcagccattccttgcttcagttcccttccaccacccagggctggctttcctataagccacctccagggtccaggggctttctctctctctccgaagcccctggacctgtttccttgtcatttgaccctcgtctgtgcccgcggagacctcctctgaccaaggggcactagtatgccttgcgctatcatgactgactggcccagtatgattctgttgtcgctgatctcccggaggaggaggctgttgacctgaaaacagtggcgtggctcccctgtgcccagatctggccatgggtgaggcctgcacagatgttgaatgaacatctgtttggggcattggagggccaccctggccctgaccgggccagcacgtgcacactggcctcttttcatttcactagtggccgagacaccctctctggcatttatcactgttggccggtgtgatgagtatagagtgccacccaaggcaccagtcacacaagctgatgggcgtcttggctctgccgtcatgtggatgttattgtcgcgcgcgtctataattacaaggttttattcctatttaatgttattgactatagcagattttggaaatcagtgttttccatgtgaccctctttccttgcatccctattccttgtcccccacccactcttccccccatcaagaaaagaaccagcatttgtaaagctgtggacaccatcagggaagcttgttgtaacggcttttgaaggccagtaaccattgttgtggttgtgttttgtattgcttgataccatgaaagtgtaaatactgtaatgcctaatctatttatcaaaactgactactggaccggagcccagaaaccatgggtcaagttacacgtgaatttgttttgtgaagaagggaagctggggcaggtaacacgcagagccgccacgtggaacggtctgtccgccggtctgtcccgcttgccgggcttctgttgcaagtcttggcttaaggagacttcctgtgggttgccatgtcgcacgtccgttagatcttgattttacaggtgagggtggttgccaaaggtgataagaaaagcagccaacaggctccctctcacttaagagagttctaattaataacactaaattcttcctgagaaatgactcctcttggtttggtttgaagtttttcagtgaaggaaaaggcctgagataggaagcagtgccctcgcttcatgaggtggcacatcttcggtggccgttggcctggtcgagctttggtcagctgcgtgggtgcctgtctcctgtctccagcggcagggcatggttcttggcagcctggtgtccacacggtgcattcctgtccccctcggccccaggctggctcagctctccagtgctgcggcgctgtctttgcagcattgccatgtcaccgtagcccccttcactcttggaagtttggggcttcaaggtttattctggcaagaacacctcggagccactgcattgttttgccaaaaacttactgcagattaagtaaagaacttagatgctaaattacatctaattttgtatgtttttttaaatgtgtctttgatgcatactttagaagcacactggctcgcggtttccatccctcttgccttgggacactcttgaggctggcagccctcctgcaatgagttgctctcagttccttctgtttggattttgctcaacatctccagtttctctgctctgaaaaatggggaaaactgctaaacatcccagagatttgcaatcttctagctctccaggtgagcagaaagaccaaatatccaaataaaagcctgaaagccattggtgatccaggggcaccttctcttcagcttgactgggcgtcttccgctgcataacactcaaggtgtctgctctagtcatccagaaacccactcccttctgaagcccctccttgggccgggttgtatcaggaggattcaaccccgctaacatgtggggtgccctctgtaggccttcacacagggaaggaagccctaccctttcaactcctgttggagtgagagtttcctgttctgattccactgtggccaacccaataattctgtccgaggaggggtaagggaataggaggtggggagcaaagagggcagcctgactagatgcccctgctgaatctggtactttctgcacagccttgagtgattggagtcccctaatgactaataaacttgaacatgtaacacacacacacacacacacacacaccattttaggaagtggttctcctactggaaaatatgctacagaatgaaagtttgtaattgaaagaaaaagaatgtattcatctgcttcttgggtttaagcacacacctgaaggggagatattgggggacacggtggccactcgcggtctgtgtcatgacacttcccattcacatcattggcctgcgttgctggggctttgaaccaccaccccgtactttgttttgcctgtagagtgttgtaaaatattttggatgtgaatgtccttgcaggccggttagtctccagtttccacagagaccacctacccaccaccttcccaggtcacctgcctggtccctgaaagaaagcatttgtgtgggcaatcccaacatgaaatgtagacagcgtgaatacggacaggaggtgatgccatattcacagtgggggatggagggcccccacccctgcttcacagaataatgggaagtgactctagtctttgtaagcaattttcattctcattaggaagttaaatgtagattcacagatacatttactttcagaatcctcaagaggatttcaaatgctaacttttagtttcttgggattgatcaaggcaagagaagtggctttaaccatgccagccagaatgaagcatcatgggtcctgatggtttcccgttttcatggtaacaaattcgcacagaggttttgctttatactgtagaataccgactttcatgatgacaacttggtttatgcatgaatattgcagtatttccatatagcaaaataacatttctacccaggataatagtcacagttttccagggagggaatgatataattttcatgacaatgtcatgtgatgatagaatttctccattgatgaatctctagtatgtgtgtatactttatttacccatacgtatattttatgaccatgagctaagttgttatttctttcattcatatccctgctgaaatattggtactagcaacttaaagttggcaagtctcatcttcagtaatacggatgccatgggagtggccaggccagattgaaggtgaatatggagcagtagcagaagcctcattccagaacccatctggccagagaagcagcagcatcctgggggatggccgtgcatggggtgtacactcgctataggcataggcccggcatggctgtcgctggacgccagctgtgcacacccagccacacctgctgcacgccgcgttagtgtgcggctccgggcctgagcattcgcaaagctcgcttctccagggagcctcctcttggctttggaaaagagcccagggacttaacgtgctgcctgttgtactctgtcccctcatgactttttagacacagggactaggacatcgaccaccctctgcccctcctgcagtcagaacccgagtagtgcaagaacggccacccggttttgccagcgttcagcgtctgcccatggacccataaggcacattagcgttgggggtctcttttcagcagcctcacagacattcccgtcctttctggttggtgttgactgtgtttcagcatcactctaccctcccatgtccttagcattgctgtgcgtgtttccaggcacttaggacacccttccccacgttgccatcttactgacagttcaaatgactctccttttttgttcgttagtaacaatcttcatttgacaccttaatacatttctgactgttcttaaaacagtggggatgcctatattttccttgagtttttgtgactgactttggctatatatacctttctggggttttgtttgttttttatttttattttgattaccgagggtatttggggtggggttgttttttgagatgtgtaattcttttatggagtttttaaaaagaattttcatattgtttttctaacatggcttcattaaacgtttaagtattttaaaaatatgtaatatttggaccagatgttgtgaataatagtagagataaagctattttattctgtatttttaaaactgttccgtacaaataaaagctctcctggacacagttttgctcttcacgtgcctcct

SEQ ID NO: 446626 - DNA, 6929 bp, Homo sapiens
  misc_feature (1395)..(1395): n is a, c, g, or t
cattcatcttctcctgcccttggacatcacagctccaggaactcagatcttcagactcagggtgaaggacaccaccagctttccaggttccccagcttgcagacggcatacgctaggtcttgactccactaacggggacttctcatacggctttgaacttggaccttggtgcataagcaaatgtaactcagcgaattgtaatggaaagcatatggacaggtctacgccacatcacttaggtgctaagagatgccgtttgcaggcctcatctctgcttgagaatcgggggctccaggcactagaagagccggctgatcctgggctcctagcttgaataagccttcacttccagctgctctccccaacggctgtgtaaactactcgtttctcttaatgatgggtattggtaagaataccacatccaaatcaatggaggctggaagttcaacagaaggcaaatacgaagacgaggcaaagcacccagctttcttcactcttccggtggtgataaatggaggcgccacctccagcggtgagcaggacaatgaggacactgagctcatggcgatctacactacggaaaacggcattgcagaaaagagctctctcgctgagaccctggatagcactggcagtctggacccccagcgatcagacatgatttataccatagaagatgttcctccctggtacctgtgtatatttctggggctacagcactacctgacatgcttcagcggcacgatcgcagtgcccttcctgttggccgatgccatgtgtgtggggtacgaccagtgggccaccagccagctcattgggaccattttcttctgtgtgggaatcactactttgctacagacaacgtttggatgcaggttacccctgtttcaggccagtgcttttgcatttttggcccctgctcgagccatcctgtctttagataaatggaaatgtaacaccacagatgtttcagttgccaatggaacagcagagctgttgcacacagaacacatctggtatccccggatccgagagatccagggggccatcatcatgtcctcactgatagaagtagtcatcggcctcctcggcctgcctggggctctactgaagtacatcggtcccttgaccattacacccacggtggccctaattggcctctctggtttccaggcagcgggggagagagccgggaagcactggggcattgccatgctgacaatattcctagtattactgttttctcaatacgccagaaatgttaaatttcctctcccgatttataaatccaagaaaggatggactgcgtacaagttacagctgttcaaaatgttccctatcatcctggccatcctggtatcctggctgctctgcttcatcttcacggtgacagangtcttccctcccgacagcacaaagtatggcttctatgctcgcacagatgccaggcaaggcgtgcttctggtagccccgtggtttaaggttccatacccatttcagtggggactgcccaccgtgtctgcggccggtgtcatcggcatgctcagtgccgtggtcgccagcatcatcgagtctattggtgactactacgcctgtgcacggctgtcctgtgccccacccccccccatccacgcaataaacaggggaattttcgtggaaggcctctcctgtgttcttgatggcatatttggtactgggaatggctctacttcatccagtcccaacattggagttttgggaattacaaaggtcggcagccgccgcgtgatacagtgcggagcagccctcatgctcgctctgggcatgatcgggaagttcagcgccctctttgcgtcccttccggatcctgtgctgggagccctgttctgcacgctctttggaatgatcacagctgttggcctctctaacctgcagttcattgatttaaattcttcccggaacctctttgtgcttggattttcgatcttctttgggctcgtccttccaagttacctcagacagaaccctctggtcacagggataacaggaatcgatcaagtgttgaacgtccttctcacaactgctatgtttgtagggggctgtgtggcttttatcctggataacaccatcccaggcactccagaggaaagaggaatccggaaatggaagaagggtgtgggcaaagggaacaaatcactcgacggcatggagtcgtacaatttgccatttggcatgaacattataaaaaaatacagatgcttcagctacttacccatcagcccaacctttgtgggctacacatggaaaggcctcaggaagagcgacaacagccggagttcagatgaagactcccaggccacgggatagcctttgctgtgccctgtggcctggccgcagtgaggcatgtatctgtagttccttgctgagtaacaagaagtaaaatacatgtttgtatatctacatttacattctgcgccccagagctaagacagactgcgaatcacttttctgctgtgagggtgatggtgcctgatgcggtgtctcgcctatctccttatttaagcccttaactccttgccctttgagagtgtccattgctggccatggtcactaaatttgaagttccagtcctccctttggagtggacatttaaaatctgcagccattccttgcttcagttcccttccaccacccagggctggctttcctataagccacctccagggtccaggggctttctctctctctccgaagcccctggacctgtttccttgtcatttgaccctcgtctgtgcccgcggagacctcctctgaccaaggggcactagtatgccttgcgctatcatgactgactggcccagtatgattctgttgtcgctgatctcccggaggaggaggctgttgacctgaaaacagtggcgtggctcccctgtgcccagatctggccatgggtgaggcctgcacagatgttgaatgaacatctgtttggggcattggagggaaaaggaaaggaccctgaagccaatatctgattctcggctgcaccttctcttggccaccctggccctgaccgggccagcacgtgcacactggcctcttttcatttcactagtggccgagacaccctctctggcatttatcactgttggccggtgtgatgagtatagagtgccacccaaggcaccagtcacacaagctgatgggcgtcttggctctgccgtcatgtggatgttattgtcgcgcgcgtctataattacaaggttttattcctatttaatgttattgactatagcagattttggaaatcagtgttttccatgtgaccctctttccttgcatccctattccttgtcccccacccactcttccccccatcaagaaaagaaccagcatttgtaaagctgtggacaccatcagggaagcttgttgtaacggcttttgaaggccagtaaccattgttgtggttgtgttttgtattgcttgataccatgaaagtgtaaatactgtaatgcctaatctatttatcttgttttgtgaagaagggaagctggggcaggtaacacgcagagccgccacgtggaacggtctgtccgccggtctgtcccgcttgccgggcttctgttgcaagtcttggcttaaggagacttcctgtgggttgccatgtcgcacgtccgttagatcttgattttacaggtgagggtggttgccaaaggtgataagaaaagcagccaacaggctccctctcacttaagagagttctaattaataacactaaattcttcctgagaaatgactcctcttggtttggtttgaagtttttcagtgaaggaaaaggcctgagataggaagcagtgccctcgcttcatgaggtggcacatcttcggtggccgttggcctggtcgagctttggtcagctgcgtgggtgcctgtctcctgtctccagcggcagggcatggttcttggcagcctggtgtccacacggtgcattcctgtccccctcggccccaggctggctcagctctccagtgctgcggcgctgtctttgcagcattgccatgtcaccgtagcccccttcactcttggaagtttggggcttcaaggtttattctggcaagaacacctcggagccactgcattgttttgccaaaaacttactgcagattaagtaaagaacttagatgctaaattacatctaattttgtatgtttttttaaatgtgtctttgatgcatactttagaagcacactggctcgcggtttccatccctcttgccttgggacactcttgaggctggcagccctcctgcaatgagttgctctcagttccttctgtttggattttgctcaacatctccagtttctctgctctgaaaaatggggaaaactgctaaacatcccagagatttgcaatcttctagctctccaggtgagcagaaagaccaaatatccaaataaaagcctgaaagccattggtgatccaggggcaccttctcttcagcttgactgggcgtcttccgctgcataacactcaaggtgtctgctctagtcatccagaaacccactcccttctgaagcccctccttgggccgggttgtatcaggaggattcaaccccgctaacatgtggggtgccctctgtaggccttcacacagggaaggaagccctaccctttcaactcctgttggagtgagagtttcctgttctgattccactgtggccaacccaataattctgtccgaggaggggtaagggaataggaggtggggagcaaagagggcagcctgactagatgcccctgctgaatctggtactttctgcacagccttgagtgattggagtcccctaatgactaataaacttgaacatgtaacacacacacacacacacacacacaccattttaggaagtggttctcctactggaaaatatgctacagaatgaaagtttgtaattgaaagaaaaagaatgtattcatctgcttcttgggtttaagcacacacctgaaggggagatattgggggacacggtggccactcgcggtctgtgtcatgacacttcccattcacatcattggcctgcgttgctggggctttgaaccaccaccccgtactttgttttgcctgtagagtgttgtaaaatattttggatgtgaatgtccttgcaggccggttagtctccagtttccacagagaccacctacccaccaccttcccaggtcacctgcctggtccctgaaagaaagcatttgtgtgggcaatcccaacatgaaatgtagacagcgtgaatacggacaggaggtgatgccatattcacagtgggggatggagggcccccacccctgcttcacagaataatgggaagtgactctagtctttgtaagcaattttcattctcattaggaagttaaatgtagattcacagatacatttactttcagaatcctcaagaggatttcaaatgctaacttttagtttcttgggattgatcaaggcaagagaagtggctttaaccatgccagccagaatgaagcatcatgggtcctgatggtttcccgttttcatggtaacaaattcgcacagaggttttgctttatactgtagaataccgactttcatgatgacaacttggtttatgcatgaatattgcagtatttccatatagcaaaataacatttctacccaggataatagtcacagttttccagggagggaatgatataattttcatgacaatgtcatgtgatgatagaatttctccattgatgaatctctagtatgtgtgtatactttatttacccatacgtatattttatgaccatgagctaagttgttatttctttcattcatatccctgctgaaatattggtactagcaacttaaagttggcaagtctcatcttcagtaatacggatgccatgggagtggccaggccagattgaaggtgaatatggagcagtagcagaagcctcattccagaacccatctggccagagaagcagcagcatcctgggggatggccgtgcatggggtgtacactcgctataggcataggcccggcatggctgtcgctggacgccagctgtgcacacccagccacacctgctgcacgccgcgttagtgtgcggctccgggcctgagcattcgcaaagctcgcttctccagggagcctcctcttggctttggaaaagagcccagggacttaacgtgctgcctgttgtactctgtcccctcatgactttttagacacagggactaggacatcgaccaccctctgcccctcctgcagtcagaacccgagtagtgcaagaacggccacccggttttgccagcgttcagcgtctgcccatggacccataaggcacattagcgttgggggtctcttttcagcagcctcacagacattcccgtcctttctggttggtgttgactgtgtttcagcatcactctaccctcccatgtccttagcattgctgtgcgtgtttccaggcacttaggacacccttccccacgttgccatcttactgacagttcaaatgactctccttttttgttcgttagtaacaatcttcatttgacaccttaatacatttctgactgttcttaaaacagtggggatgcctatattttccttgagtttttgtgactgactttggctatatatacctttctggggttttgtttgttttttatttttattttgattaccgagggtatttggggtggggttgttttttgagatgtgtaattcttttatggagtttttaaaaagaattttcatattgtttttctaacatggcttcattaaacgtttaagtattttaaaaatatgtaatatttggaccagatgttgtgaataatagtagagataaagctattttattctgtatttttaaaactgttccgtacaaataaaagctctcctggacacagttttgctcttcacgtgcctcct

SEQ ID NO: 446627 - DNA, 6930 bp, Homo sapiens
  misc_feature (1395)..(1395): n is a, c, g, or t
cattcatcttctcctgcccttggacatcacagctccaggaactcagatcttcagactcagggtgaaggacaccaccagctttccaggttccccagcttgcagacggcatacgctaggtcttgactccactaacggggacttctcatacggctttgaacttggaccttggtgcataagcaaatgtaactcagcgaattgtaatggaaagcatatggacaggtctacgccacatcacttaggtgctaagagatgccgtttgcaggcctcatctctgcttgagaatcgggggctccaggcactagaagagccggctgatcctgggctcctagcttgaataagccttcacttccagctgctctccccaacggctgtgtaaactactcgtttctcttaatgatgggtattggtaagaataccacatccaaatcaatggaggctggaagttcaacagaaggcaaatacgaagacgaggcaaagcacccagctttcttcactcttccggtggtgataaatggaggcgccacctccagcggtgagcaggacaatgaggacactgagctcatggcgatctacactacggaaaacggcattgcagaaaagagctctctcgctgagaccctggatagcactggcagtctggacccccagcgatcagacatgatttataccatagaagatgttcctccctggtacctgtgtatatttctggggctacagcactacctgacatgcttcagcggcacgatcgcagtgcccttcctgttggccgatgccatgtgtgtggggtacgaccagtgggccaccagccagctcattgggaccattttcttctgtgtgggaatcactactttgctacagacaacgtttggatgcaggttacccctgtttcaggccagtgcttttgcatttttggcccctgctcgagccatcctgtctttagataaatggaaatgtaacaccacagatgtttcagttgccaatggaacagcagagctgttgcacacagaacacatctggtatccccggatccgagagatccagggggccatcatcatgtcctcactgatagaagtagtcatcggcctcctcggcctgcctggggctctactgaagtacatcggtcccttgaccattacacccacggtggccctaattggcctctctggtttccaggcagcgggggagagagccgggaagcactggggcattgccatgctgacaatattcctagtattactgttttctcaatacgccagaaatgttaaatttcctctcccgatttataaatccaagaaaggatggactgcgtacaagttacagctgttcaaaatgttccctatcatcctggccatcctggtatcctggctgctctgcttcatcttcacggtgacagangtcttccctcccgacagcacaaagtatggcttctatgctcgcacagatgccaggcaaggcgtgcttctggtagccccgtggtttaaggttccatacccatttcagtggggactgcccaccgtgtctgcggccggtgtcatcggcatgctcagtgccgtggtcgccagcatcatcgagtctattggtgactactacgcctgtgcacggctgtcctgtgccccacccccccccatccacgcaataaacaggggaattttcgtggaaggcctctcctgtgttcttgatggcatatttggtactgggaatggctctacttcatccagtcccaacattggagttttgggaattacaaaggtcggcagccgccgcgtgatacagtgcggagcagccctcatgctcgctctgggcatgatcgggaagttcagcgccctctttgcgtcccttccggatcctgtgctgggagccctgttctgcacgctctttggaatgatcacagctgttggcctctctaacctgcagttcattgatttaaattcttcccggaacctctttgtgcttggattttcgatcttctttgggctcgtccttccaagttacctcagacagaaccctctggtcacagggataacaggaatcgatcaagtgttgaacgtccttctcacaactgctatgtttgtagggggctgtgtggcttttatcctggataacaccatcccaggcactccagaggaaagaggaatccggaaatggaagaagggtgtgggcaaagggaacaaatcactcgacggcatggagtcgtacaatttgccatttggcatgaacattataaaaaaatacagatgcttcagctacttacccatcagcccaacctttgtgggctacacatggaaaggcctcaggaagagcgacaacagccggagttcagatgaagactcccaggccacgggatagcctttgctgtgccctgtggcctggccgcagtgaggcatgtatctgtagttccttgctgagtaacaagaagtaaaatacatgtttgtatatctacatttacattctgcgccccagagctaagacagactgcgaatcacttttctgctgtgagggtgatggtgcctgatgcggtgtctcgcctatctccttatttaagcccttaactccttgccctttgagagtgtccattgctggccatggtcactaaatttgaagttccagtcctccctttggagtggacatttaaaatctgcagccattccttgcttcagttcccttccaccacccagggctggctttcctataagccacctccagggtccaggggctttctctctctctccgaagcccctggacctgtttccttgtcatttgaccctcgtctgtgcccgcggagacctcctctgaccaaggggcactagtatgccttgcgctatcatgactgactggcccagtatgattctgttgtcgctgatctcccggaggaggaggctgttgacctgaaaacagtggcgtggctcccctgtgcccagatctggccatgggtgaggcctgcacagatgttgaatgaacatctgtttggggcattggagggaaaaggaaaggaccctgaagccaatatctgattctcggctgcaccttctcttggccaccctggccctgaccgggccagcacgtgcacactggcctcttttcatttcactagtggccgagacaccctctctggcatttatcactgttggccggtgtgatgagtatagagtgccacccaaggcaccagtcacacaagctgatgggcgtcttggctctgccgtcatgtggatgttattgtcgcgcgcgtctataattacaaggttttattcctatttaatgttattgactatagcagattttggaaatcagtgttttccatgtgaccctctttccttgcatccctattccttgtcccccacccactcttccccccatcaagaaaagaaccagcatttgtaaagctgtggacaccatcagggaagcttgttgtaacggcttttgaaggccagtaaccattgttgtggttgtgttttgtattgcttgataccatgaaagtgtaaatactgtaatgcctaatctatttatcaaaactgactactggaccggagcccagaaaccatgggtcaagttacacgtgaatttgttttgtgaagaagggaagctggggcaggtaacacgcagagccgccacgtggaacggtctgtccgccggtctgtcccgcttgccgggcttctgttgcaagtcttggcttaaggagacttcctgtgggttgccatgtcgcacgtccgttagatcttgattttacaggtgagggtggttgccaaaggtgataagaaaagcagccaacaggctccctctcacttaagagagttctaattaataacactaaattcttcctgagaaatgactcctcttggtttggtttgaagtttttcagtgaaggaaaaggcctgagataggaagcagtgccctcgcttcatgaggtggcacatcttcggtggccgttggcctggtcgagctttggtcagctgcgtgggtgcctgtctcctgtctccagcggcagggcatggttcttggcagcctggtgtccacacggtgcattcctgtccccctcggccccaggctggctcagctctccagtgctgcggcgctgtctttgcagcattgccatgtcaccgtagcccccttcactcttggaagtttggggcttcaaggtttattctggcaagaacacctcggagccactgcattgttttgccaaaaacttactgcagattaagtaaagaacttagatgctaaattacatctaattttgtatgtttttttaaatgtgtctttgatgcatactttagaagcacactggctcgcggtttccatccctcttgccttgggacactcttgaggctggcagccctcctgcaatgagttgctctcagttccttctgtttggattttgctcaacatctccagtttctctgctctgaaaaatggggaaaactgctaaacatcccagagatttgcaatcttctagctctccaggtgagcagaaagaccaaatatccaaataaaagcctgaaagccattggtgatccaggggcaccttctcttcagcttgactgggcgtcttccgctgcataacactcaaggtgtctgctctagtcatccagaaacccactcccttctgaagcccctccttgggccgggttgtatcaggaggattcaaccccgctaacatgtggggtgccctctgtaggccttcacacagggaaggaagccctaccctttcaactcctgttggagtgagagtttcctgttctgattccactgtggccaacccaataattctgtccgaggaggggtaagggaataggaggtggggagcaaagagggcagcctgactagatgcccctgctgaatctggtactttctgcacagccttgagtgattggagtcccctaatgactaataaacttgaacatgtaacacacacacacacacacacacacaccattttaggaagtggttctcctactggaaaatatgctacagaatgaaagtttgtaattgaaagaaaaagaatgtattcatctgcttcttgggtttaagcacacacctgaaggggagatattgggggacacggtggccactcgcggtctgtgtcatgacacttcccattcacatcattggcctgcgttgctggggctttgaaccaccaccccgtactttgttttgcctgtagagtgttgtaaaatattttggatgtgaatgtccttgcaggccggttagtctccagtttccacagagaccacctacccaccaccttcccaggtcacctgcctggtccctgaaagaaagcatttgtgtgggcaatcccaacatgaaatgtagacagcgtgaatacggacaggaggtgatgccatattcacagtgggggatggagggcccccacccctgcttcacagaataatgggaagtgactctagtctttgtaagcaattttcattctcattaggaagttaaatgtagattcacagatacatttactttcagaatcctcaagaggatttcaaatgctaacttttagtttcttgggattgatcaaggcaagagaagtggctttaaccatgccagccagaatgaagcatcatgggtcctgatggtttcccgttttcatggtaacaaattcgcacagaggttttgctttatactgtagaataccgactttcatgatgacaacttggtttatgcatgaatattgcagtatttccatatagcaaaataacatttctacccaggataatagtcacagttttccagggagggaatgatataattttcatgacaatgtcatgtgatgatagaatttctccattgatgaatctctagtatgtgtgtatactttatttacccatacgtatattttatgaccatgagctaagttgttatttctttcattcatatccctgctgaaatattggtactagcaacttaaagttggcaagtctcatcttcagtaatacggatgccatgggagtggccaggccagattgaaggtgaatatggagcagtagcagaagcctcattccagaacccatctggccagagaagcagcagcatcctgggggatggccgtgcatggggtgtacactcgctataggcataggcccggcatggctgtcgctggacgccagctgtgcacacccagccacacctgctgcacgccgcgttagtgtgcggctccgggcctgagcattcgcaaagctcgcttctccagggagcctcctcttggctttggtttttagacacagggactaggacatcgaccaccctctgcccctcctgcagtcagaacccgagtagtgcaagaacggccacccggttttgccagcgttcagcgtctgcccatggacccataaggcacattagcgttgggggtctcttttcagcagcctcacagacattcccgtcctttctggttggtgttgactgtgtttcagcatcactctaccctcccatgtccttagcattgctgtgcgtgtttccaggcacttaggacacccttccccacgttgccatcttactgacagttcaaatgactctccttttttgttcgttagtaacaatcttcatttgacaccttaatacatttctgactgttcttaaaacagtggggatgcctatattttccttgagtttttgtgactgactttggctatatatacctttctggggttttgtttgttttttatttttattttgattaccgagggtatttggggtggggttgttttttgagatgtgtaattcttttatggagtttttaaaaagaattttcatattgtttttctaacatggcttcattaaacgtttaagtattttaaaaatatgtaatatttggaccagatgttgtgaataatagtagagataaagctattttattctgtatttttaaaactgttccgtacaaataaaagctctcctggacacagttttgctcttcacgtgcctcct

SEQ ID NO: 446628 - DNA, 6928 bp, Homo sapiens
  misc_feature (1395)..(1395): n is a, c, g, or t
cattcatcttctcctgcccttggacatcacagctccaggaactcagatcttcagactcagggtgaaggacaccaccagctttccaggttccccagcttgcagacggcatacgctaggtcttgactccactaacggggacttctcatacggctttgaacttggaccttggtgcataagcaaatgtaactcagcgaattgtaatggaaagcatatggacaggtctacgccacatcacttaggtgctaagagatgccgtttgcaggcctcatctctgcttgagaatcgggggctccaggcactagaagagccggctgatcctgggctcctagcttgaataagccttcacttccagctgctctccccaacggctgtgtaaactactcgtttctcttaatgatgggtattggtaagaataccacatccaaatcaatggaggctggaagttcaacagaaggcaaatacgaagacgaggcaaagcacccagctttcttcactcttccggtggtgataaatggaggcgccacctccagcggtgagcaggacaatgaggacactgagctcatggcgatctacactacggaaaacggcattgcagaaaagagctctctcgctgagaccctggatagcactggcagtctggacccccagcgatcagacatgatttataccatagaagatgttcctccctggtacctgtgtatatttctggggctacagcactacctgacatgcttcagcggcacgatcgcagtgcccttcctgttggccgatgccatgtgtgtggggtacgaccagtgggccaccagccagctcattgggaccattttcttctgtgtgggaatcactactttgctacagacaacgtttggatgcaggttacccctgtttcaggccagtgcttttgcatttttggcccctgctcgagccatcctgtctttagataaatggaaatgtaacaccacagatgtttcagttgccaatggaacagcagagctgttgcacacagaacacatctggtatccccggatccgagagatccagggggccatcatcatgtcctcactgatagaagtagtcatcggcctcctcggcctgcctggggctctactgaagtacatcggtcccttgaccattacacccacggtggccctaattggcctctctggtttccaggcagcgggggagagagccgggaagcactggggcattgccatgctgacaatattcctagtattactgttttctcaatacgccagaaatgttaaatttcctctcccgatttataaatccaagaaaggatggactgcgtacaagttacagctgttcaaaatgttccctatcatcctggccatcctggtatcctggctgctctgcttcatcttcacggtgacagangtcttccctcccgacagcacaaagtatggcttctatgctcgcacagatgccaggcaaggcgtgcttctggtagccccgtggtttaaggttccatacccatttcagtggggactgcccaccgtgtctgcggccggtgtcatcggcatgctcagtgccgtggtcgccagcatcatcgagtctattggtgactactacgcctgtgcacggctgtcctgtgccccacccccccccatccacgcaataaacaggggaattttcgtggaaggcctctcctgtgttcttgatggcatatttggtactgggaatggctctacttcatccagtcccaacattggagttttgggaattacaaaggtcggcagccgccgcgtgatacagtgcggagcagccctcatgctcgctctgggcatgatcgggaagttcagcgccctctttgcgtcccttccggatcctgtgctgggagccctgttctgcacgctctttggaatgatcacagctgttggcctctctaacctgcagttcattgatttaaattcttcccggaacctctttgtgcttggattttcgatcttctttgggctcgtccttccaagttacctcagacagaaccctctggtcacagggataacaggaatcgatcaagtgttgaacgtccttctcacaactgctatgtttgtagggggctgtgtggcttttatcctggataacaccatcccaggcactccagaggaaagaggaatccggaaatggaagaagggtgtgggcaaagggaacaaatcactcgacggcatggagtcgtacaatttgccatttggcatgaacattataaaaaaatacagatgcttcagctacttacccatcagcccaacctttgtgggctacacatggaaaggcctcaggaagagcgacaacagccggagttcagatgaagactcccaggccacgggatagcctttgctgtgccctgtggcctggccgcagtgaggcatgtatctgtagttccttgctgagtaacaagaagtaaaatacatgtttgtatatctacatttacattctgcgccccagagctaagacagactgcgaatcacttttctgctgtgagggtgatggtgcctgatgcggtgtctcgcctatctccttatttaagcccttaactccttgccctttgagagtgtccattgctggccatggtcactaaatttgaagttccagtcctccctttggagtggacatttaaaatctgcagccattccttgcttcagttcccttccaccacccagggctggctttcctataagccacctccagggtccaggggctttctctctctctccgaagcccctggacctgtttccttgtcatttgaccctcgtctgtgcccgcggagacctcctctgaccaaggggcactagtatgccttgcgctatcatgactgactggcccagtatgattctgttgtcgctgatctcccggaggaggaggctgttgacctgaaaacagtggcgtggctcccctgtgcccagatctggccatgggtgaggcctgcacagatgttgaatgaacatctgtttggggcattggagggaaaaggaaaggaccctgaagccaatatctgattctcggctgcaccttctcttggccaccctggccctgaccgggccagcacgtgcacactggcctcttttcatttcactagtggccgagacaccctctctggcatttatcactgttggccggtgtgatgagtatagagtgccacccaaggcaccagtcacacaagctgatgggcgtcttggctctgccgtcatgtggatgttattgtcgcgcgcgtctataattacaaggttttattcctatttaatgttattgactatagcagattttggaaatcagtgttttccatgtgaccctctttccttgcatccctattccttgtcccccacccactcttccccccatcaagaaaagaaccagcatttgtaaagctgtggacaccatcagggaagcttgttgtaacggcttttgaaggccagtaaccattgttgtggttgtgttttgtattgcttgataccatgaaagtgtaaatactgtaatgcctaatctatttatcaaaactgactactggaccggagcccagaaaccatgggtcaagttacacgtgaatttgttttgtgaagaagggaagctggggcaggtaacacgcagagccgccacgtggaacggtctgtccgccggtctgtcccgcttgccgggcttctgttgcaagtcttggcttaaggagacttcctgtgggttgccatgtcgcacgtccgttagatcttgattttacaggtgagggtggttgccaaaggtgataagaaaagcagccaacaggctccctctcacttaagagagttctaattaataacactaaattcttcctgagaaatgactcctcttggtttggtttgaagtttttcagtgaaggaaaaggcctgagataggaagcagtgccctcgcttcatgaggtggcacatcttcggtggccgttggcctggtcgagctttggtcagctgcgtgggtgcctgtctcctgtctccagcggcagggcatggttcttggcagcctggtgtccacacggtgcattcctgtccccctcggccccaggctggctcagctctccagtgctgcggcgctgtctttgcagcattgccatgtcaccgtagcccccttcactcttggaagtttggggcttcaaggtttattctggcaagaacacctcggagccactgcattgttttgccaaaaacttactgcagattaagtaaagaacttagatgctaaattacatctaattttgtatgtttttttaaatgtgtctttgatgcatactttagaagcacactggctcgcggtttccatccctcttgccttgggacactcttgaggctggcagccctcctgcaatgagttgctctcagttccttctgtttggattttgctcaacatctccagtttctctgctctgaaaaatggggaaaactgctaaacatcccagagatttgcaatcttctagctctccaggtgagcagaaagaccaaatatccaaataaaagcctgaaagccattggtgatccaggggcaccttctcttcagcttgactgggcgtcttccgctgcataacactcaaggtgtctgctctagtcatccagaaacccactcccttctgaagcccctccttgggccgggttgtatcaggaggattcaaccccgctaacatgtggggtgccctctgtaggccttcacacagggaaggaagccctaccctttcaactcctgttggagtgagagtttcctgttctgattccactgtggccaacccaataattctgtccgaggaggggtaagggaataggaggtggggagcaaagagggcagcctgactagatgcccctgctgaatctggtactttctgcacagccttgagtgattggagtcccctaatgactaataaacttgaacatgtaacacacacacacacacacacacacaccattttaggaagtggttctcctactggaaaatatgctacagaatgaaagtttgtaattgaaagaaaaagaatgtattcatctgcttcttgggtttaagcacacacctgaaggggagatattgggggacacggtggccactcgcggtctgtgtcatgacacttcccattcacatcattggcctgcgttgctggggctttgaaccaccaccccgtactttgttttgcctgtagagtgttagagaccacctacccaccaccttcccaggtcacctgcctggtccctgaaagaaagcatttgtgtgggcaatcccaacatgaaatgtagacagcgtgaatacggacaggaggtgatgccatattcacagtgggggatggagggcccccacccctgcttcacagaataatgggaagtgactctagtctttgtaagcaattttcattctcattaggaagttaaatgtagattcacagatacatttactttcagaatcctcaagaggatttcaaatgctaacttttagtttcttgggattgatcaaggcaagagaagtggctttaaccatgccagccagaatgaagcatcatgggtcctgatggtttcccgttttcatggtaacaaattcgcacagaggttttgctttatactgtagaataccgactttcatgatgacaacttggtttatgcatgaatattgcagtatttccatatagcaaaataacatttctacccaggataatagtcacagttttccagggagggaatgatataattttcatgacaatgtcatgtgatgatagaatttctccattgatgaatctctagtatgtgtgtatactttatttacccatacgtatattttatgaccatgagctaagttgttatttctttcattcatatccctgctgaaatattggtactagcaacttaaagttggcaagtctcatcttcagtaatacggatgccatgggagtggccaggccagattgaaggtgaatatggagcagtagcagaagcctcattccagaacccatctggccagagaagcagcagcatcctgggggatggccgtgcatggggtgtacactcgctataggcataggcccggcatggctgtcgctggacgccagctgtgcacacccagccacacctgctgcacgccgcgttagtgtgcggctccgggcctgagcattcgcaaagctcgcttctccagggagcctcctcttggctttggaaaagagcccagggacttaacgtgctgcctgttgtactctgtcccctcatgactttttagacacagggactaggacatcgaccaccctctgcccctcctgcagtcagaacccgagtagtgcaagaacggccacccggttttgccagcgttcagcgtctgcccatggacccataaggcacattagcgttgggggtctcttttcagcagcctcacagacattcccgtcctttctggttggtgttgactgtgtttcagcatcactctaccctcccatgtccttagcattgctgtgcgtgtttccaggcacttaggacacccttccccacgttgccatcttactgacagttcaaatgactctccttttttgttcgttagtaacaatcttcatttgacaccttaatacatttctgactgttcttaaaacagtggggatgcctatattttccttgagtttttgtgactgactttggctatatatacctttctggggttttgtttgttttttatttttattttgattaccgagggtatttggggtggggttgttttttgagatgtgtaattcttttatggagtttttaaaaagaattttcatattgtttttctaacatggcttcattaaacgtttaagtattttaaaaatatgtaatatttggaccagatgttgtgaataatagtagagataaagctattttattctgtatttttaaaactgttccgtacaaataaaagctctcctggacacagttttgctcttcacgtgcctcct

SEQ ID NO: 446629 - DNA, 5915 bp, Homo sapiens
ctcagcctcccgagtagttggaattacaggcacatgcccccacgcctggctaatttttgtatttttagtagagatggggtttcaccttgttggccaggctggtctcgaactcctgacctcgtgatctgcctgcctcggcctcccaaagtgctgggattacaggcgtgagccaccgcatccggctacgatgttttcttttaattaaagacacagtgcacatcagtcctcattatggccgccttcatctgacttagcaactgtcccaggcatctggtgcttaagattttaaaatgaacagtttccatgagcttcagaatccaagtggatcttgtagagtcttgcagcgttcagaatgactttgggtaactggtcctggtcactttcgcctgcctctctaggagcattcatggttgttttcctcccacagttcagtggggactgcccaccgtgtctgcggccggtgtcatcggcatgctcagtgccgtggtcgccagcatcatcgagtctattggtgactactacgcctgtgcacggctgtcctgtgccccacccccccccatccacgcaataaacaggggaattttcgtggaaggcctctcctgtgttcttgatggcatatttggtactgggaatggctctacttcatccagtcccaacattggagttttgggaattacaaaggtcggcagccgccgcgtgatacagtgcggagcagccctcatgctcgctctgggcatgatcgggaagttcagcgccctctttgcgtcccttccggatcctgtgctgggagccctgttctgcacgctctttggaatgatcacagctgttggcctctctaacctgcagttcattgatttaaattcttcccggaacctctttgtgcttggattttcgatcttctttgggctcgtccttccaagttacctcagacagaaccctctggtcacagggataacaggaatcgatcaagtgttgaacgtccttctcacaactgctatgtttgtagggggctgtgtggcttttatcctggataacaccatcccaggcactccagaggaaagaggaatccggaaatggaagaagggtgtgggcaaagggaacaaatcactcgacggcatggagtcgtacaatttgccatttggcatgaacattataaaaaaatacagatgcttcagctacttacccatcagcccaacctttgtgggctacacatggaaaggcctcaggaagagcgacaacagccggagttcagatgaagactcccaggccacgggatagcctttgctgtgccctgtggcctggccgcagtgaggcatgtatctgtagttccttgctgagtaacaagaagtaaaatacatgtttgtatatctacatttacattctgcgccccagagctaagacagactgcgaatcacttttctgctgtgagggtgatggtgcctgatgcggtgtctcgcctatctccttatttaagcccttaactccttgccctttgagagtgtccattgctggccatggtcactaaatttgaagttccagtcctccctttggagtggacatttaaaatctgcagccattccttgcttcagttcccttccaccacccagggctggctttcctataagccacctccagggtccaggggctttctctctctctccgaagcccctggacctgtttccttgtcatttgaccctcgtctgtgcccgcggagacctcctctgaccaaggggcactagtatgccttgcgctatcatgactgactggcccagtatgattctgttgtcgctgatctcccggaggaggaggctgttgacctgaaaacagtggcgtggctcccctgtgcccagatctggccatgggtgaggcctgcacagatgttgaatgaacatctgtttggggcattggagggaaaaggaaaggaccctgaagccaatatctgattctcggctgcaccttctcttggccaccctggccctgaccgggccagcacgtgcacactggcctcttttcatttcactagtggccgagacaccctctctggcatttatcactgttggccggtgtgatgagtatagagtgccacccaaggcaccagtcacacaagctgatgggcgtcttggctctgccgtcatgtggatgttattgtcgcgcgcgtctataattacaaggttttattcctatttaatgttattgactatagcagattttggaaatcagtgttttccatgtgaccctctttccttgcatccctattccttgtcccccacccactcttccccccatcaagaaaagaaccagcatttgtaaagctgtggacaccatcagggaagcttgttgtaacggcttttgaaggccagtaaccattgttgtggttgtgttttgtattgcttgataccatgaaagtgtaaatactgtaatgcctaatctatttatcaaaactgactactggaccggagcccagaaaccatgggtcaagttacacgtgaatttgttttgtgaagaagggaagctggggcaggtaacacgcagagccgccacgtggaacggtctgtccgccggtctgtcccgcttgccgggcttctgttgcaagtcttggcttaaggagacttcctgtgggttgccatgtcgcacgtccgttagatcttgattttacaggtgagggtggttgccaaaggtgataagaaaagcagccaacaggctccctctcacttaagagagttctaattaataacactaaattcttcctgagaaatgactcctcttggtttggtttgaagtttttcagtgaaggaaaaggcctgagataggaagcagtgccctcgcttcatgaggtggcacatcttcggtggccgttggcctggtcgagctttggtcagctgcgtgggtgcctgtctcctgtctccagcggcagggcatggttcttggcagcctggtgtccacacggtgcattcctgtccccctcggccccaggctggctcagctctccagtgctgcggcgctgtctttgcagcattgccatgtcaccgtagcccccttcactcttggaagtttggggcttcaaggtttattctggcaagaacacctcggagccactgcattgttttgccaaaaacttactgcagattaagtaaagaacttagatgctaaattacatctaattttgtatgtttttttaaatgtgtctttgatgcatactttagaagcacactggctcgcggtttccatccctcttgccttgggacactcttgaggctggcagccctcctgcaatgagttgctctcagttccttctgtttggattttgctcaacatctccagtttctctgctctgaaaaatggggaaaactgctaaacatcccagagatttgcaatcttctagctctccaggtgagcagaaagaccaaatatccaaataaaagcctgaaagccattggtgatccaggggcaccttctcttcagcttgactgggcgtcttccgctgcataacactcaaggtgtctgctctagtcatccagaaacccactcccttctgaagcccctccttgggccgggttgtatcaggaggattcaaccccgctaacatgtggggtgccctctgtaggccttcacacagggaaggaagccctaccctttcaactcctgttggagtgagagtttcctgttctgattccactgtggccaacccaataattctgtccgaggaggggtaagggaataggaggtggggagcaaagagggcagcctgactagatgcccctgctgaatctggtactttctgcacagccttgagtgattggagtcccctaatgactaataaacttgaacatgtaacacacacacacacacacacacacaccattttaggaagtggttctcctactggaaaatatgctacagaatgaaagtttgtaattgaaagaaaaagaatgtattcatctgcttcttgggtttaagcacacacctgaaggggagatattgggggacacggtggccactcgcggtctgtgtcatgacacttcccattcacatcattggcctgcgttgctggggctttgaaccaccaccccgtactttgttttgcctgtagagtgttgtaaaatattttggatgtgaatgtccttgcaggccggttagtctccagtttccacagagaccacctacccaccaccttcccaggtcacctgcctggtccctgaaagaaagcatttgtgtgggcaatcccaacatgaaatgtagacagcgtgaatacggacaggaggtgatgccatattcacagtgggggatggagggcccccacccctgcttcacagaataatgggaagtgactctagtctttgtaagcaattttcattctcattaggaagttaaatgtagattcacagatacatttactttcagaatcctcaagaggatttcaaatgctaacttttagtttcttgggattgatcaaggcaagagaagtggctttaaccatgccagccagaatgaagcatcatgggtcctgatggtttcccgttttcatggtaacaaattcgcacagaggttttgctttatactgtagaataccgactttcatgatgacaacttggtttatgcatgaatattgcagtatttccatatagcaaaataacatttctacccaggataatagtcacagttttccagggagggaatgatataattttcatgacaatgtcatgtgatgatagaatttctccattgatgaatctctagtatgtgtgtatactttatttacccatacgtatattttatgaccatgagctaagttgttatttctttcattcatatccctgctgaaatattggtactagcaacttaaagttggcaagtctcatcttcagtaatacggatgccatgggagtggccaggccagattgaaggtgaatatggagcagtagcagaagcctcattccagaacccatctggccagagaagcagcagcatcctgggggatggccgtgcatggggtgtacactcgctataggcataggcccggcatggctgtcgctggacgccagctgtgcacacccagccacacctgctgcacgccgcgttagtgtgcggctccgggcctgagcattcgcaaagctcgcttctccagggagcctcctcttggctttggaaaagagcccagggacttaacgtgctgcctgttgtactctgtcccctcatgactttttagacacagggactaggacatcgaccaccctctgcccctcctgcagtcagaacccgagtagtgcaagaacggccacccggttttgccagcgttcagcgtctgcccatggacccataaggcacattagcgttgggggtctcttttcagcagcctcacagacattcccgtcctttctggttggtgttgactgtgtttcagcatcactctaccctcccatgtccttagcattgctgtgcgtgtttccaggcacttaggacacccttccccacgttgccatcttactgacagttcaaatgactctccttttttgttcgttagtaacaatcttcatttgacaccttaatacatttctgactgttcttaaaacagtggggatgcctatattttccttgagtttttgtgactgactttggctatatatacctttctggggttttgtttgttttttatttttattttgattaccgagggtatttggggtggggttgttttttgagatgtgtaattcttttatggagtttttaaaaagaattttcatattgtttttctaacatggcttcattaaacgtttaagtattttaaaaatatgtaatatttggaccagatgttgtgaataatagtagagataaagctattttattctgtatttttaaaactgttccgtacaaataaaagctctcctggacacagttttgctcttcacgtgcctcct

SEQ ID NO: 446630 - DNA, 359 bp, Homo sapiens
  misc_feature (77)..(77): n is a, c, g, or t
cttccccttgaccactccagatcatcctggccatcctggtatcctggctgctctgcttcatcttcacggtgacagangtcttccctcccgacagcacaaagtatggcttctatgctcgcacagatgccaggcaaggcgtgcttctggtagccccgtggtttaaggttccatacccatgtaagtattctgatggctagaggggtcaagagcccacgagggcccaactgagaggggtgggaatttggcagaacagccgtctttgtcccagactgtctcctgaaggccttgccattctggtcaggagaggattagacagcaagtaagggaggccctgtccccagagggcagaaaccaacaca

SEQ ID NO: 446631 - DNA, 802 bp, Homo sapiens
ggaagatggcaaccacttgataaagttgtttttctgtaatagtggcctgtacatggccgagctaacactggtcttcacgtttaatgagcaccttcttttctccttctggctcgcagagctctctcgctgagaccctggatagcactggcagtctggacccccagcgatcagacatgatttataccatagaagatgttcctccctggtacctgtgtatatttctggggctacaggtaagatggttcctgtaggatgtgtaactaccagcaggtgtttgcattgtctaccatctggaattgtttaaaaattccactttggtttttgtttattgaagacttttataaattcctcttttaagagtgatgagtaggggctgagcacagtggctgatgcctgtaatcctagcagttttggaggctgaggtgggcagatcactggagcctaggagctcaagaccagcctgggtaacatggcaaaagtccatctctacaaaaaatacaaaaattagccatgtgtggtggtgtgtgcccacagtcccagctactcaagaggctgaggcaggaggatcgcttgaggttgaggttgcagtgagctgtgatcacaccactccacttcagcctggttgacatagtgagaccctgtctcaaaaaacaaatgatgaatgggaattgttgacatcacagcaggaggaagaaaagaacaggtagaatggattaccagggaaaagaaagaagatgttcagggcacaagcaagagcagtgacataaaggaagggaaaggaaatagagttatagaaagaagg

SEQ ID NO: 446632 - DNA, 2350 bp, Homo sapiens
  misc_feature (1298)..(1298): n is a, c, g, or t
ggcttcctcactccttctctagctcgagacgcgtcgacccgatccattgtgtcagttactcagggaccttggtgcataagcaaatgtaactcagcgaattgtaatggaaagcatatggacaggtctacgccacatcacttaggtgctaagagatgccgtttgcaggcctcatctctgcttgagaatcgggggctccaggcactagaagagccggctgatcctgggctcctagcttgaataagccttcacttccagctgctctccccaacggctgtgtaaactactcgtttctcttaatgatgggtattggtaagaataccacatccaaatcaatggaggctggaagttcaacagaaggcaaatacgaagacgaggcaaagcacccagctttcttcactcttccggtggtgataaatggaggcgccacctccagcggtgagcaggacaatgaggacactgagctcatggcgatctacactacggaaaacggcattgcagaaaagagctctctcgctgagaccctggatagcactggcagtctggacccccagcgatcagacatgatttataccatagaagatgttcctccctggtacctgtgtatatttctggggctacagcactacctgacatgcttcagcggcacgatcgcagtgcccttcctgttggccgatgccatgtgtgtggggtacgaccagtgggccaccagccagctcattgggaccattttcttctgtgtgggaatcactactttgctacagacaacgtttggatgcaggttacccctgtttcaggccagtgcttttgcatttttggcccctgctcgagccatcctgtctttagataaatggaaatgtaacaccacagatgtttcagttgccaatggaacagcagagctgttgcacacagaacacatctggtatccccggatccgagagatccagggggccatcatcatgtcctcactgatagaagtagtcatcggcctcctcggcctgcctggggctctactgaagtacatcggtcccttgaccattacacccacggtggccctaattggcctctctggtttccaggcagcgggggagagagccgggaagcactggggcattgccatgctgacaatattcctagtattactgttttctcaatacgccagaaatgttaaatttcctctcccgatttataaatccaagaaaggatggactgcgtacaagttacagctgttcaaaatgttccctatcatcctggccatcctggtatcctggctgctctgcttcatcttcacggtgacagangtcttccctcccgacagcacaaagtatggcttctatgctcgcacagatgccaggcaaggcgtgcttctggtagccccgtggtttaaggttccatacccatttcagtggggactgcccaccgtgtctgcggccggtgtcatcggcatgctcagtgccgtggtcgccagcatcatcgagtctattggtgactactacgcctgtgcacggctgtcctgtgccccacccccccccatccacgcaataaacaggggaattttcgtggaaggcctctcctgtgttcttgatggcatatttggtactgggaatggctctacttcatccagtcccaacattggagttttgggaattacaaaggtcggcagccgccgcgtgatacagtgcggagcagccctcatgctcgctctgggcatgatcgggaagttcagcgccctctttgcgtcccttccggatcctgtgctgggagccctgttctgcacgctctttggaatgatcacagctgttggcctctctaacctgcagttcattgatttaaattcttcccggaacctctttgtgcttggattttcgatcttctttgggctcgtccttccaagttacctcagacagaaccctctggtcacagggataacaggaatcgatcaagtgttgaacgtccttctcacaactgctatgtttgtagggggctgtgtggcttttatcctggataacaccatcccaggcactccagaggaaagaggaatccggaaatggaagaagggtgtgggcaaagggaacaaatcactcgacggcatggagtcgtacaatttgccatttggcatgaacattataaaaaaatacagatgcttcagctacttacccatcagcccaacctttgtgggctacacatggaaaggcctcaggaagagcgacaacagccggagttcagatgaagactcccaggccacgggatagcctttgctgtgccctgtggcctggccgcagtgaggcatgtatctgtagttccttgctgagtaacaagaagtaaaatacatgtttgtatatctacatttaca

SEQ ID NO: 446633 - DNA, 6321 bp, Homo sapiens
  misc_feature (733)..(733): n is a, c, g, or t
taccagggaggaacatcttctatggtataaatcatgtctgatcgctgggggtccacactacctgacatgcttcagcggcacgatcgcagtgcccttcctgttggccgatgccatgtgtgtggggtacgaccagtgggccaccagccagctcattgggaccattttcttctgtgtgggaatcactactttgctacagacaacgtttggatgcaggttacccctgtttcaggccagtgcttttgcatttttggcccctgctcgagccatcctgtctttagataaatggaaatgtaacaccacagatgtttcagttgccaatggaacagcagagctgttgcacacagaacacatctggtatccccggatccgagagatccagggggccatcatcatgtcctcactgatagaagtagtcatcggcctcctcggcctgcctggggctctactgaagtacatcggtcccttgaccattacacccacggtggccctaattggcctctctggtttccaggcagcgggggagagagccgggaagcactggggcattgccatgctgacaatattcctagtattactgttttctcaatacgccagaaatgttaaatttcctctcccgatttataaatccaagaaaggatggactgcgtacaagttacagctgttcaaaatgttccctatcatcctggccatcctggtatcctggctgctctgcttcatcttcacggtgacagangtcttccctcccgacagcacaaagtatggcttctatgctcgcacagatgccaggcaaggcgtgcttctggtagccccgtggtttaaggttccatacccatttcagtggggactgcccaccgtgtctgcggccggtgtcatcggcatgctcagtgccgtggtcgccagcatcatcgagtctattggtgactactacgcctgtgcacggctgtcctgtgccccacccccccccatccacgcaataaacaggggaattttcgtggaaggcctctcctgtgttcttgatggcatatttggtactgggaatggctctacttcatccagtcccaacattggagttttgggaattacaaaggtcggcagccgccgcgtgatacagtgcggagcagccctcatgctcgctctgggcatgatcgggaagttcagcgccctctttgcgtcccttccggatcctgtgctgggagccctgttctgcacgctctttggaatgatcacagctgttggcctctctaacctgcagttcattgatttaaattcttcccggaacctctttgtgcttggattttcgatcttctttgggctcgtccttccaagttacctcagacagaaccctctggtcacagggataacaggaatcgatcaagtgttgaacgtccttctcacaactgctatgtttgtagggggctgtgtggcttttatcctggataacaccatcccaggcactccagaggaaagaggaatccggaaatggaagaagggtgtgggcaaagggaacaaatcactcgacggcatggagtcgtacaatttgccatttggcatgaacattataaaaaaatacagatgcttcagctacttacccatcagcccaacctttgtgggctacacatggaaaggcctcaggaagagcgacaacagccggagttcagatgaagactcccaggccacgggatagcctttgctgtgccctgtggcctggccgcagtgaggcatgtatctgtagttccttgctgagtaacaagaagtaaaatacatgtttgtatatctacatttacattctgcgccccagagctaagacagactgcgaatcacttttctgctgtgagggtgatggtgcctgatgcggtgtctcgcctatctccttatttaagcccttaactccttgccctttgagagtgtccattgctggccatggtcactaaatttgaagttccagtcctccctttggagtggacatttaaaatctgcagccattccttgcttcagttcccttccaccacccagggctggctttcctataagccacctccagggtccaggggctttctctctctctccgaagcccctggacctgtttccttgtcatttgaccctcgtctgtgcccgcggagacctcctctgaccaaggggcactagtatgccttgcgctatcatgactgactggcccagtatgattctgttgtcgctgatctcccggaggaggaggctgttgacctgaaaacagtggcgtggctcccctgtgcccagatctggccatgggtgaggcctgcacagatgttgaatgaacatctgtttggggcattggagggaaaaggaaaggaccctgaagccaatatctgattctcggctgcaccttctcttggccaccctggccctgaccgggccagcacgtgcacactggcctcttttcatttcactagtggccgagacaccctctctggcatttatcactgttggccggtgtgatgagtatagagtgccacccaaggcaccagtcacacaagctgatgggcgtcttggctctgccgtcatgtggatgttattgtcgcgcgcgtctataattacaaggttttattcctatttaatgttattgactatagcagattttggaaatcagtgttttccatgtgaccctctttccttgcatccctattccttgtcccccacccactcttccccccatcaagaaaagaaccagcatttgtaaagctgtggacaccatcagggaagcttgttgtaacggcttttgaaggccagtaaccattgttgtggttgtgttttgtattgcttgataccatgaaagtgtaaatactgtaatgcctaatctatttatcaaaactgactactggaccggagcccagaaaccatgggtcaagttacacgtgaatttgttttgtgaagaagggaagctggggcaggtaacacgcagagccgccacgtggaacggtctgtccgccggtctgtcccgcttgccgggcttctgttgcaagtcttggcttaaggagacttcctgtgggttgccatgtcgcacgtccgttagatcttgattttacaggtgagggtggttgccaaaggtgataagaaaagcagccaacaggctccctctcacttaagagagttctaattaataacactaaattcttcctgagaaatgactcctcttggtttggtttgaagtttttcagtgaaggaaaaggcctgagataggaagcagtgccctcgcttcatgaggtggcacatcttcggtggccgttggcctggtcgagctttggtcagctgcgtgggtgcctgtctcctgtctccagcggcagggcatggttcttggcagcctggtgtccacacggtgcattcctgtccccctcggccccaggctggctcagctctccagtgctgcggcgctgtctttgcagcattgccatgtcaccgtagcccccttcactcttggaagtttggggcttcaaggtttattctggcaagaacacctcggagccactgcattgttttgccaaaaacttactgcagattaagtaaagaacttagatgctaaattacatctaattttgtatgtttttttaaatgtgtctttgatgcatactttagaagcacactggctcgcggtttccatccctcttgccttgggacactcttgaggctggcagccctcctgcaatgagttgctctcagttccttctgtttggattttgctcaacatctccagtttctctgctctgaaaaatggggaaaactgctaaacatcccagagatttgcaatcttctagctctccaggtgagcagaaagaccaaatatccaaataaaagcctgaaagccattggtgatccaggggcaccttctcttcagcttgactgggcgtcttccgctgcataacactcaaggtgtctgctctagtcatccagaaacccactcccttctgaagcccctccttgggccgggttgtatcaggaggattcaaccccgctaacatgtggggtgccctctgtaggccttcacacagggaaggaagccctaccctttcaactcctgttggagtgagagtttcctgttctgattccactgtggccaacccaataattctgtccgaggaggggtaagggaataggaggtggggagcaaagagggcagcctgactagatgcccctgctgaatctggtactttctgcacagccttgagtgattggagtcccctaatgactaataaacttgaacatgtaacacacacacacacacacacacacaccattttaggaagtggttctcctactggaaaatatgctacagaatgaaagtttgtaattgaaagaaaaagaatgtattcatctgcttcttgggtttaagcacacacctgaaggggagatattgggggacacggtggccactcgcggtctgtgtcatgacacttcccattcacatcattggcctgcgttgctggggctttgaaccaccaccccgtactttgttttgcctgtagagtgttgtaaaatattttggatgtgaatgtccttgcaggccggttagtctccagtttccacagagaccacctacccaccaccttcccaggtcacctgcctggtccctgaaagaaagcatttgtgtgggcaatcccaacatgaaatgtagacagcgtgaatacggacaggaggtgatgccatattcacagtgggggatggagggcccccacccctgcttcacagaataatgggaagtgactctagtctttgtaagcaattttcattctcattaggaagttaaatgtagattcacagatacatttactttcagaatcctcaagaggatttcaaatgctaacttttagtttcttgggattgatcaaggcaagagaagtggctttaaccatgccagccagaatgaagcatcatgggtcctgatggtttcccgttttcatggtaacaaattcgcacagaggttttgctttatactgtagaataccgactttcatgatgacaacttggtttatgcatgaatattgcagtatttccatatagcaaaataacatttctacccaggataatagtcacagttttccagggagggaatgatataattttcatgacaatgtcatgtgatgatagaatttctccattgatgaatctctagtatgtgtgtatactttatttacccatacgtatattttatgaccatgagctaagttgttatttctttcattcatatccctgctgaaatattggtactagcaacttaaagttggcaagtctcatcttcagtaatacggatgccatgggagtggccaggccagattgaaggtgaatatggagcagtagcagaagcctcattccagaacccatctggccagagaagcagcagcatcctgggggatggccgtgcatggggtgtacactcgctataggcataggcccggcatggctgtcgctggacgccagctgtgcacacccagccacacctgctgcacgccgcgttagtgtgcggctccgggcctgagcattcgcaaagctcgcttctccagggagcctcctcttggctttggaaaagagcccagggacttaacgtgctgcctgttgtactctgtcccctcatgactttttagacacagggactaggacatcgaccaccctctgcccctcctgcagtcagaacccgagtagtgcaagaacggccacccggttttgccagcgttcagcgtctgcccatggacccataaggcacattagcgttgggggtctcttttcagcagcctcacagacattcccgtcctttctggttggtgttgactgtgtttcagcatcactctaccctcccatgtccttagcattgctgtgcgtgtttccaggcacttaggacacccttccccacgttgccatcttactgacagttcaaatgactctccttttttgttcgttagtaacaatcttcatttgacaccttaatacatttctgactgttcttaaaacagtggggatgcctatattttccttgagtttttgtgactgactttggctatatatacctttctggggttttgtttgttttttatttttattttgattaccgagggtatttggggtggggttgttttttgagatgtgtaattcttttatggagtttttaaaaagaattttcatattgtttttctaacatggcttcattaaacgtttaagtattttaaaaatatgtaatatttggaccagatgttgtgaataatagtagagataaagctattttattctgtatttttaaaactgttccgtacaaataaaagctctcctggacacagttttgctcttcacgtgcctcct

SEQ ID NO: 446634 - DNA, 6197 bp, Homo sapiens
  misc_feature (609)..(609): n is a, c, g, or t
ctatggaaaagactgttaagctgtcaaatagtgaactacctcggtagttcccgatgccgtgatcatggttttggtctcgtttcttttaggttacccctgtttcaggccagtgcttttgcatttttggcccctgctcgagccatcctgtctttagataaatggaaatgtaacaccacagatgtttcagttgccaatggaacagcagagctgttgcacacagaacacatctggtatccccggatccgagagatccagggggccatcatcatgtcctcactgatagaagtagtcatcggcctcctcggcctgcctggggctctactgaagtacatcggtcccttgaccattacacccacggtggccctaattggcctctctggtttccaggcagcgggggagagagccgggaagcactggggcattgccatgctgacaatattcctagtattactgttttctcaatacgccagaaatgttaaatttcctctcccgatttataaatccaagaaaggatggactgcgtacaagttacagctgttcaaaatgttccctatcatcctggccatcctggtatcctggctgctctgcttcatcttcacggtgacagangtcttccctcccgacagcacaaagtatggcttctatgctcgcacagatgccaggcaaggcgtgcttctggtagccccgtggtttaaggttccatacccatttcagtggggactgcccaccgtgtctgcggccggtgtcatcggcatgctcagtgccgtggtcgccagcatcatcgagtctattggtgactactacgcctgtgcacggctgtcctgtgccccacccccccccatccacgcaataaacaggggaattttcgtggaaggcctctcctgtgttcttgatggcatatttggtactgggaatggctctacttcatccagtcccaacattggagttttgggaattacaaaggtcggcagccgccgcgtgatacagtgcggagcagccctcatgctcgctctgggcatgatcgggaagttcagcgccctctttgcgtcccttccggatcctgtgctgggagccctgttctgcacgctctttggaatgatcacagctgttggcctctctaacctgcagttcattgatttaaattcttcccggaacctctttgtgcttggattttcgatcttctttgggctcgtccttccaagttacctcagacagaaccctctggtcacagggataacaggaatcgatcaagtgttgaacgtccttctcacaactgctatgtttgtagggggctgtgtggcttttatcctggataacaccatcccaggcactccagaggaaagaggaatccggaaatggaagaagggtgtgggcaaagggaacaaatcactcgacggcatggagtcgtacaatttgccatttggcatgaacattataaaaaaatacagatgcttcagctacttacccatcagcccaacctttgtgggctacacatggaaaggcctcaggaagagcgacaacagccggagttcagatgaagactcccaggccacgggatagcctttgctgtgccctgtggcctggccgcagtgaggcatgtatctgtagttccttgctgagtaacaagaagtaaaatacatgtttgtatatctacatttacattctgcgccccagagctaagacagactgcgaatcacttttctgctgtgagggtgatggtgcctgatgcggtgtctcgcctatctccttatttaagcccttaactccttgccctttgagagtgtccattgctggccatggtcactaaatttgaagttccagtcctccctttggagtggacatttaaaatctgcagccattccttgcttcagttcccttccaccacccagggctggctttcctataagccacctccagggtccaggggctttctctctctctccgaagcccctggacctgtttccttgtcatttgaccctcgtctgtgcccgcggagacctcctctgaccaaggggcactagtatgccttgcgctatcatgactgactggcccagtatgattctgttgtcgctgatctcccggaggaggaggctgttgacctgaaaacagtggcgtggctcccctgtgcccagatctggccatgggtgaggcctgcacagatgttgaatgaacatctgtttggggcattggagggaaaaggaaaggaccctgaagccaatatctgattctcggctgcaccttctcttggccaccctggccctgaccgggccagcacgtgcacactggcctcttttcatttcactagtggccgagacaccctctctggcatttatcactgttggccggtgtgatgagtatagagtgccacccaaggcaccagtcacacaagctgatgggcgtcttggctctgccgtcatgtggatgttattgtcgcgcgcgtctataattacaaggttttattcctatttaatgttattgactatagcagattttggaaatcagtgttttccatgtgaccctctttccttgcatccctattccttgtcccccacccactcttccccccatcaagaaaagaaccagcatttgtaaagctgtggacaccatcagggaagcttgttgtaacggcttttgaaggccagtaaccattgttgtggttgtgttttgtattgcttgataccatgaaagtgtaaatactgtaatgcctaatctatttatcaaaactgactactggaccggagcccagaaaccatgggtcaagttacacgtgaatttgttttgtgaagaagggaagctggggcaggtaacacgcagagccgccacgtggaacggtctgtccgccggtctgtcccgcttgccgggcttctgttgcaagtcttggcttaaggagacttcctgtgggttgccatgtcgcacgtccgttagatcttgattttacaggtgagggtggttgccaaaggtgataagaaaagcagccaacaggctccctctcacttaagagagttctaattaataacactaaattcttcctgagaaatgactcctcttggtttggtttgaagtttttcagtgaaggaaaaggcctgagataggaagcagtgccctcgcttcatgaggtggcacatcttcggtggccgttggcctggtcgagctttggtcagctgcgtgggtgcctgtctcctgtctccagcggcagggcatggttcttggcagcctggtgtccacacggtgcattcctgtccccctcggccccaggctggctcagctctccagtgctgcggcgctgtctttgcagcattgccatgtcaccgtagcccccttcactcttggaagtttggggcttcaaggtttattctggcaagaacacctcggagccactgcattgttttgccaaaaacttactgcagattaagtaaagaacttagatgctaaattacatctaattttgtatgtttttttaaatgtgtctttgatgcatactttagaagcacactggctcgcggtttccatccctcttgccttgggacactcttgaggctggcagccctcctgcaatgagttgctctcagttccttctgtttggattttgctcaacatctccagtttctctgctctgaaaaatggggaaaactgctaaacatcccagagatttgcaatcttctagctctccaggtgagcagaaagaccaaatatccaaataaaagcctgaaagccattggtgatccaggggcaccttctcttcagcttgactgggcgtcttccgctgcataacactcaaggtgtctgctctagtcatccagaaacccactcccttctgaagcccctccttgggccgggttgtatcaggaggattcaaccccgctaacatgtggggtgccctctgtaggccttcacacagggaaggaagccctaccctttcaactcctgttggagtgagagtttcctgttctgattccactgtggccaacccaataattctgtccgaggaggggtaagggaataggaggtggggagcaaagagggcagcctgactagatgcccctgctgaatctggtactttctgcacagccttgagtgattggagtcccctaatgactaataaacttgaacatgtaacacacacacacacacacacacacaccattttaggaagtggttctcctactggaaaatatgctacagaatgaaagtttgtaattgaaagaaaaagaatgtattcatctgcttcttgggtttaagcacacacctgaaggggagatattgggggacacggtggccactcgcggtctgtgtcatgacacttcccattcacatcattggcctgcgttgctggggctttgaaccaccaccccgtactttgttttgcctgtagagtgttgtaaaatattttggatgtgaatgtccttgcaggccggttagtctccagtttccacagagaccacctacccaccaccttcccaggtcacctgcctggtccctgaaagaaagcatttgtgtgggcaatcccaacatgaaatgtagacagcgtgaatacggacaggaggtgatgccatattcacagtgggggatggagggcccccacccctgcttcacagaataatgggaagtgactctagtctttgtaagcaattttcattctcattaggaagttaaatgtagattcacagatacatttactttcagaatcctcaagaggatttcaaatgctaacttttagtttcttgggattgatcaaggcaagagaagtggctttaaccatgccagccagaatgaagcatcatgggtcctgatggtttcccgttttcatggtaacaaattcgcacagaggttttgctttatactgtagaataccgactttcatgatgacaacttggtttatgcatgaatattgcagtatttccatatagcaaaataacatttctacccaggataatagtcacagttttccagggagggaatgatataattttcatgacaatgtcatgtgatgatagaatttctccattgatgaatctctagtatgtgtgtatactttatttacccatacgtatattttatgaccatgagctaagttgttatttctttcattcatatccctgctgaaatattggtactagcaacttaaagttggcaagtctcatcttcagtaatacggatgccatgggagtggccaggccagattgaaggtgaatatggagcagtagcagaagcctcattccagaacccatctggccagagaagcagcagcatcctgggggatggccgtgcatggggtgtacactcgctataggcataggcccggcatggctgtcgctggacgccagctgtgcacacccagccacacctgctgcacgccgcgttagtgtgcggctccgggcctgagcattcgcaaagctcgcttctccagggagcctcctcttggctttggaaaagagcccagggacttaacgtgctgcctgttgtactctgtcccctcatgactttttagacacagggactaggacatcgaccaccctctgcccctcctgcagtcagaacccgagtagtgcaagaacggccacccggttttgccagcgttcagcgtctgcccatggacccataaggcacattagcgttgggggtctcttttcagcagcctcacagacattcccgtcctttctggttggtgttgactgtgtttcagcatcactctaccctcccatgtccttagcattgctgtgcgtgtttccaggcacttaggacacccttccccacgttgccatcttactgacagttcaaatgactctccttttttgttcgttagtaacaatcttcatttgacaccttaatacatttctgactgttcttaaaacagtggggatgcctatattttccttgagtttttgtgactgactttggctatatatacctttctggggttttgtttgttttttatttttattttgattaccgagggtatttggggtggggttgttttttgagatgtgtaattcttttatggagtttttaaaaagaattttcatattgtttttctaacatggcttcattaaacgtttaagtattttaaaaatatgtaatatttggaccagatgttgtgaataatagtagagataaagctattttattctgtatttttaaaactgttccgtacaaataaaagctctcctggacacagttttgctcttcacgtgcctcct

SEQ ID NO: 446635 - DNA, 6499 bp, Homo sapiens
  misc_feature (1395)..(1395): n is a, c, g, or t
cattcatcttctcctgcccttggacatcacagctccaggaactcagatcttcagactcagggtgaaggacaccaccagctttccaggttccccagcttgcagacggcatacgctaggtcttgactccactaacggggacttctcatacggctttgaacttggaccttggtgcataagcaaatgtaactcagcgaattgtaatggaaagcatatggacaggtctacgccacatcacttaggtgctaagagatgccgtttgcaggcctcatctctgcttgagaatcgggggctccaggcactagaagagccggctgatcctgggctcctagcttgaataagccttcacttccagctgctctccccaacggctgtgtaaactactcgtttctcttaatgatgggtattggtaagaataccacatccaaatcaatggaggctggaagttcaacagaaggcaaatacgaagacgaggcaaagcacccagctttcttcactcttccggtggtgataaatggaggcgccacctccagcggtgagcaggacaatgaggacactgagctcatggcgatctacactacggaaaacggcattgcagaaaagagctctctcgctgagaccctggatagcactggcagtctggacccccagcgatcagacatgatttataccatagaagatgttcctccctggtacctgtgtatatttctggggctacagcactacctgacatgcttcagcggcacgatcgcagtgcccttcctgttggccgatgccatgtgtgtggggtacgaccagtgggccaccagccagctcattgggaccattttcttctgtgtgggaatcactactttgctacagacaacgtttggatgcaggttacccctgtttcaggccagtgcttttgcatttttggcccctgctcgagccatcctgtctttagataaatggaaatgtaacaccacagatgtttcagttgccaatggaacagcagagctgttgcacacagaacacatctggtatccccggatccgagagatccagggggccatcatcatgtcctcactgatagaagtagtcatcggcctcctcggcctgcctggggctctactgaagtacatcggtcccttgaccattacacccacggtggccctaattggcctctctggtttccaggcagcgggggagagagccgggaagcactggggcattgccatgctgacaatattcctagtattactgttttctcaatacgccagaaatgttaaatttcctctcccgatttataaatccaagaaaggatggactgcgtacaagttacagctgttcaaaatgttccctatcatcctggccatcctggtatcctggctgctctgcttcatcttcacggtgacagangtcttccctcccgacagcacaaagtatggcttctatgctcgcacagatgccaggcaaggcgtgcttctggtagccccgtggtttaaggttccatacccatttcagtggggactgcccaccgtgtctgcggccggtgtcatcggcatgctcagtgccgtggtcgccagcatcatcgagtctattggtgactactacgcctgtgcacggctgtcctgtgccccacccccccccatccacgcaataaacaggggaattttcgtggaaggcctctcctgtgttcttgatggcatatttggtactgggaatggctctacttcatccagtcccaacattggagttttgggaattacaaaggtcggcagccgccgcgtgatacagtgcggagcagccctcatgctcgctctgggcatgatcgggaagttcagcgccctctttgcgtcccttccggatcctgtgctgggagccctgttctgcacgctctttggaatgatcacagctgttggcctctctaacctgcagttcattgatttaaattcttcccggaacctctttgtgcttggattttcgatcttctttgggctcgtccttccaagttacctcagacagaaccctctggtcacagggataacaggaatcgatcaagtgttgaacgtccttctcacaactgctatgtttgtagggggctgtgtggcttttatcctggataacaccatcccaggcactccagaggaaagaggaatccggaaatggaagaagggtgtgggcaaagggaacaaatcactcgacggcatggagtcgtacaatttgccatttggcatgaacattataaaaaaatacagatgcttcagctacttacccatcagcccaacctttgtgggctacacatggaaaggcctcaggaagagcgacaacagccggagttcagatgaagactcccaggccacgggatagcctttgctgtgccctgtggcctggccgcagtgaggcatgtatctgtagttccttgctgagtaacaagaagtaaaatacatgtttgtatatctacatttacattctgcgccccagagctaagacagactgcgaatcacttttctgctgtgagggtgatggtgcctgatgcggtgtctcgcctatctccttatttaagcccttaactccttgccctttgagagtgtccattgctggccatggtcactaaatttgaagttccagtcctccctttggagtggacatttaaaatctgcagccattccttgcttcagttcccttccaccacccagggctggctttcctataagccacctccagggtccaggggctttctctctctctccgaagcccctggacctgtttccttgtcatttgaccctcgtctgtgcccgcggagacctcctctgaccaaggggcactagtatgccttgcgctatcatgactgactggcccagtatgattctgttgtcgctgatctcccggaggaggaggctgttgacctgaaaacagtggcgtggctcccctgtgcccagatctggccatgggtgaggcctgcacagatgttgaatgaacatctgtttggggcattggagggaaaaggaaaggaccctgaagccaatatctgattctcggctgcaccttctcttggccaccctggccctgaccgggccagcacgtgcacactggcctcttttcatttcactagtggccgagacaccctctctggcatttatcactgttggccggtgtgatgagtatagagtgccacccaaggcaccagtcacacaagctgatgggcgtcttggctctgccgtcatgtggatgttattgtcgcgcgcgtctataattacaaggttttattcctatttaatgttattgactatagcagattttggaaatcagtgttttccatgtgaccctctttccttgcatccctattccttgtcccccacccactcttccccccatcaagaaaagaaccagcatttgtaaagctgtggacaccatcagggaagcttgttgtaacggcttttgaaggccagtaaccattgttgtggttgtgttttgtattgcttgataccatgaaagtgtaaatactgtaatgcctaatctatttatcaaaactgactactggaccggagcccagaaaccatgggtcaagttacacgtgaatttgttttgtgaagaagggaagctggggcaggtaacacgcagagccgccacgtggaacggtctgtccgccggtctgtcccgcttgccgggcttctgttgcaagtcttggcttaaggagacttcctgtgggttgccatgtcgcacgtccgttagatcttgattttacaggtgagggtggttgccaaaggtgataagaaaagcagccaacaggctccctctcacttaagagagttctaattaataacactaaattcttcctgagaaatgactcctcttggtttggtttgaagtttttcagtgaaggaaaaggcctgagataggaagcagtgccctcgcttcatgaggtggcacatcttcggtggccgttggcctggtcgagctttggtcagctgcgtgggtgcctgtctcctgtctccagcggcagggcatggttcttggcagcctggtgtccacacggtgcattcctgtccccctcggccccaggctggctcagctctccagtgctgcggcgctgtctttgcagcattgccatgtcaccgtagcccccttcactcttggaagtttggggcttcaaggtttattctggcaagaacacctcggagccactgcattgttttgccaaaaacttactgcagattaagtaaagaacttagatgctaaattacatctaattttgtatgtttttttaaatgtgtctttgatgcatactttagaagcacactggctcgcggtttccatccctcttgccttgggacactcttgaggctggcagccctcctgcaatgagttgctctcagttccttctgtttggattttgctcaacatctccagtttctctgctctgaaaaatggggaaaactgctaaacatcccagagatttgcaatcttctagctctccaggtgagcagaaagaccaaatatccaaataaaagcctgaaagccattggtgatccaggggcaccttctcttcagcttgactgggcgtcttccgctgcataacactcaaggtgtctgctctagtcatccagaaacccactcccttctgaagcccctccttgggccgggttgtatcaggaggattcaaccccgctaacatgtggggtgccctctgtaggccttcacacagggaaggaagccctaccctttcaactcctgttggagtgagagtttcctgttctgattccactgtggccaacccaataattctgtccgaggaggggtaagggaataggaggtggggagcaaagagggcagcctgactagatgcccctgctgaatctggtactttctgcacagccttgagtgattggagtcccctaatgactaataaacttgaacatgtaacacacacacacacacacacacacaccattttaggaagtggttctcctactggaaaatatgctacagaatgaaagtttgtaattgaaagaaaaagaatgtattcatctgcttcttgggtttaagcacacacctgaaggggagatattgggggacacggtggccactcgcggtctgtgtcatgacacttcccattcacatcattggcctgcgttgctggggctttgaaccaccaccccgtactttgttttgcctgtagagtgttgtaaaatattttggatgtgaatgtccttgcaggccggttagtctccagtttccacagagaccacctacccaccaccttcccaggtcacctgcctggtccctgaaagaaagcatttgtgtgggcaatcccaacatgaaatgtagacagcgtgaatacggacaggaggtgatgccatattcacagtgggggatggagggcccccacccctgcttcacagaataatgggaagtgactctagtctttgtaagcaattttcattctcattaggaagttaaatgtagattcacagatacatttactttcagaatcctcaagaggatttcaaatgctaacttttagtttcttgggattgatcaaggcaagagaagtggctttaaccatgccagccagaatgaagcatcatgggtcctgatggtttcccgttttcatggtaacaaattcgcacagaggttttgctttatactgtagaataccgactttcatgatgacaacttggtttatgcatgaatattgcagtatttccatatagcaaaataacatttctacccaggataatagtcacagttttccagggagggaatgatataattttcatgacaatgtcatgtgatgatagaatttctccattgatgaatctctagtatgtgtgtatactttatttacccatacgtatattttatgaccatgagctaagttgttatttctttcattcatatccctgctgaaatatggacccataaggcacattagcgttgggggtctcttttcagcagcctcacagacattcccgtcctttctggttggtgttgactgtgtttcagcatcactctaccctcccatgtccttagcattgctgtgcgtgtttccaggcacttaggacacccttccccacgttgccatcttactgacagttcaaatgactctccttttttgttcgttagtaacaatcttcatttgacaccttaatacatttctgactgttcttaaaacagtggggatgcctatattttccttgagtttttgtgactgactttggctatatatacctttctggggttttgtttgttttttatttttattttgattaccgagggtatttggggtggggttgttttttgagatgtgtaattcttttatggagtttttaaaaagaattttcatattgtttttctaacatggcttcattaaacgtttaagtattttaaaaatatgtaatatttggaccagatgttgtgaataatagtagagataaagctattttattctgtatttttaaaactgttccgtacaaataaaagctctcctggacacagttttgctcttcacgtgcctcct

SEQ ID NO: 446636 - DNA, 5925 bp, Homo sapiens
  misc_feature (1395)..(1395): n is a, c, g, or t
cattcatcttctcctgcccttggacatcacagctccaggaactcagatcttcagactcagggtgaaggacaccaccagctttccaggttccccagcttgcagacggcatacgctaggtcttgactccactaacggggacttctcatacggctttgaacttggaccttggtgcataagcaaatgtaactcagcgaattgtaatggaaagcatatggacaggtctacgccacatcacttaggtgctaagagatgccgtttgcaggcctcatctctgcttgagaatcgggggctccaggcactagaagagccggctgatcctgggctcctagcttgaataagccttcacttccagctgctctccccaacggctgtgtaaactactcgtttctcttaatgatgggtattggtaagaataccacatccaaatcaatggaggctggaagttcaacagaaggcaaatacgaagacgaggcaaagcacccagctttcttcactcttccggtggtgataaatggaggcgccacctccagcggtgagcaggacaatgaggacactgagctcatggcgatctacactacggaaaacggcattgcagaaaagagctctctcgctgagaccctggatagcactggcagtctggacccccagcgatcagacatgatttataccatagaagatgttcctccctggtacctgtgtatatttctggggctacagcactacctgacatgcttcagcggcacgatcgcagtgcccttcctgttggccgatgccatgtgtgtggggtacgaccagtgggccaccagccagctcattgggaccattttcttctgtgtgggaatcactactttgctacagacaacgtttggatgcaggttacccctgtttcaggccagtgcttttgcatttttggcccctgctcgagccatcctgtctttagataaatggaaatgtaacaccacagatgtttcagttgccaatggaacagcagagctgttgcacacagaacacatctggtatccccggatccgagagatccagggggccatcatcatgtcctcactgatagaagtagtcatcggcctcctcggcctgcctggggctctactgaagtacatcggtcccttgaccattacacccacggtggccctaattggcctctctggtttccaggcagcgggggagagagccgggaagcactggggcattgccatgctgacaatattcctagtattactgttttctcaatacgccagaaatgttaaatttcctctcccgatttataaatccaagaaaggatggactgcgtacaagttacagctgttcaaaatgttccctatcatcctggccatcctggtatcctggctgctctgcttcatcttcacggtgacagangtcttccctcccgacagcacaaagtatggcttctatgctcgcacagatgccaggcaaggcgtgcttctggtagccccgtggtttaaggttccatacccatttcagtggggactgcccaccgtgtctgcggccggtgtcatcggcatgctcagtgccgtggtcgccagcatcatcgagtctattggtgactactacgcctgtgcacggctgtcctgtgccccacccccccccatccacgcaataaacaggggaattttcgtggaaggcctctcctgtgttcttgatggcatatttggtactgggaatggctctacttcatccagtcccaacattggagttttgggaattacaaaggtcggcagccgccgcgtgatacagtgcggagcagccctcatgctcgctctgggcatgatcgggaagttcagcgccctctttgcgtcccttccggatcctgtgctgggagccctgttctgcacgctctttggaatgatcacagctgttggcctctctaacctgcagttcattgatttaaattcttcccggaacctctttgtgcttggattttcgatcttctttgggctcgtccttccaagttacctcagacagaaccctctggtcacagggataacaggaatcgatcaagtgttgaacgtccttctcacaactgctatgtttgtagggggctgtgtggcttttatcctggataacaccatcccaggcactccagaggaaagaggaatccggaaatggaagaagggtgtgggcaaagggaacaaatcactcgacggcatggagtcgtacaatttgccatttggcatgaacattataaaaaaatacagatgcttcagctacttacccatcagcccaacctttgtgggctacacatggaaaggcctcaggaagagcgacaacagccggagttcagatgaagactcccaggccacgggatagcctttgctgtgccctgtggcctggccgcagtgaggcatgtatctgtagttccttgctgagtaacaagaagtaaaatacatgtttgtatatctacatttacattctgcgccccagagctaagacagactgcgaatcacttttctgctgtgagggtgatggtgcctgatgcggtgtctcgcctatctccttatttaagcccttaactccttgccctttgagagtgtccattgctggccatggtcactaaatttgaagttccagtcctccctttggagtggacatttaaaatctgcagccattccttgcttcagttcccttccaccacccagggctggctttcctataagccacctccagggtccaggggctttctctctctctccgaagcccctggacctgtttccttgtcatttgaccctcgtctgtgcccgcggagacctcctctgaccaaggggcactagtatgccttgcgctatcatgactgactggcccagtatgattctgttgtcgctgatctcccggaggaggaggctgttgacctgaaaacagtggcgtggctcccctgtgcccagatctggccatgggtgaggcctgcacagatgttgaatgaacatctgtttggggcattggagggaaaaggaaaggaccctgaagccaatatctgattctcggctgcaccttctcttggccaccctggccctgaccgggccagcacgtgcacactggcctcttttcatttcactagtggccgagacaccctctctggcatttatcactgttggccggtgtgatgagtatagagtgccacccaaggcaccagtcacacaagctgatgggcgtcttggctctgccgtcatgtggatgttattgtcgcgcgcgtctataattacaaggttttattcctatttaatgttattgactatagcagattttggaaatcagtgttttccatgtgaccctctttccttgcatccctattccttgtcccccacccactcttccccccatcaagaaaagaaccagcatttgtaaagctgtggacaccatcagggaagcttgttgtaacggcttttgaaggccagtaaccattgttgtggttgtgttttgtattgcttgataccatgaaagtgtaaatactgtaatgcctaatctatttatcaaaactgactactggaccggagcccagaaaccatgggtcaagttacacgtgaatttgttttgtgaagaagggaagctggggcaggtaacacgcagagccgccacgtggaacggtctgtccgccggtctgtcccgcttgccgggcttctgttgcaagtcttggcttaaggagacttcctgtgggttgccatgtcgcacgtccgttagatcttgattttacaggtgagggtggttgccaaaggtgataagaaaagcagccaacaggctccctctcacttaagagagttctaattaataacactaaattcttcctgagaaatgactcctcttggtttggtttgaagtttttcagtgaaggaaaaggcctgagataggaagcagtgccctcgcttcatgaggtggcacatcttcggtggccgttggcctggtcgagctttggtcagctgcgtgggtgcctgtctcctgtctccagcggcagggcatggttcttggcagcctggccactcgcggtctgtgtcatgacacttcccattcacatcattggcctgcgttgctggggctttgaaccaccaccccgtactttgttttgcctgtagagtgttgtaaaatattttggatgtgaatgtccttgcaggccggttagtctccagtttccacagagaccacctacccaccaccttcccaggtcacctgcctggtccctgaaagaaagcatttgtgtgggcaatcccaacatgaaatgtagacagcgtgaatacggacaggaggtgatgccatattcacagtgggggatggagggcccccacccctgcttcacagaataatgggaagtgactctagtctttgtaagcaattttcattctcattaggaagttaaatgtagattcacagatacatttactttcagaatcctcaagaggatttcaaatgctaacttttagtttcttgggattgatcaaggcaagagaagtggctttaaccatgccagccagaatgaagcatcatgggtcctgatggtttcccgttttcatggtaacaaattcgcacagaggttttgctttatactgtagaataccgactttcatgatgacaacttggtttatgcatgaatattgcagtatttccatatagcaaaataacatttctacccaggataatagtcacagttttccagggagggaatgatataattttcatgacaatgtcatgtgatgatagaatttctccattgatgaatctctagtatgtgtgtatactttatttacccatacgtatattttatgaccatgagctaagttgttatttctttcattcatatccctgctgaaatattggtactagcaacttaaagttggcaagtctcatcttcagtaatacggatgccatgggagtggccaggccagattgaaggtgaatatggagcagtagcagaagcctcattccagaacccatctggccagagaagcagcagcatcctgggggatggccgtgcatggggtgtacactcgctataggcataggcccggcatggctgtcgctggacgccagctgtgcacacccagccacacctgctgcacgccgcgttagtgtgcggctccgggcctgagcattcgcaaagctcgcttctccagggagcctcctcttggctttggaaaagagcccagggacttaacgtgctgcctgttgtactctgtcccctcatgactttttagacacagggactaggacatcgaccaccctctgcccctcctgcagtcagaacccgagtagtgcaagaacggccacccggttttgccagcgttcagcgtctgcccatggacccataaggcacattagcgttgggggtctcttttcagcagcctcacagacattcccgtcctttctggttggtgttgactgtgtttcagcatcactctaccctcccatgtccttagcattgctgtgcgtgtttccaggcacttaggacacccttccccacgttgccatcttactgacagttcaaatgactctccttttttgttcgttagtaacaatcttcatttgacaccttaatacatttctgactgttcttaaaacagtggggatgcctatattttccttgagtttttgtgactgactttggctatatatacctttctggggttttgtttgttttttatttttattttgattaccgagggtatttggggtggggttgttttttgagatgtgtaattcttttatggagtttttaaaaagaattttcatattgtttttctaacatggcttcattaaacgtttaagtattttaaaaatatgtaatatttggaccagatgttgtgaataatagtagagataaagctattttattctgtatttttaaaactgttccgtacaaataaaagctctcctggacacagttttgctcttcacgtgcctcct

SEQ ID NO: 446637 - DNA, 1554 bp, Homo sapiens
  misc_feature (1395)..(1395): n is a, c, g, or t
cattcatcttctcctgcccttggacatcacagctccaggaactcagatcttcagactcagggtgaaggacaccaccagctttccaggttccccagcttgcagacggcatacgctaggtcttgactccactaacggggacttctcatacggctttgaacttggaccttggtgcataagcaaatgtaactcagcgaattgtaatggaaagcatatggacaggtctacgccacatcacttaggtgctaagagatgccgtttgcaggcctcatctctgcttgagaatcgggggctccaggcactagaagagccggctgatcctgggctcctagcttgaataagccttcacttccagctgctctccccaacggctgtgtaaactactcgtttctcttaatgatgggtattggtaagaataccacatccaaatcaatggaggctggaagttcaacagaaggcaaatacgaagacgaggcaaagcacccagctttcttcactcttccggtggtgataaatggaggcgccacctccagcggtgagcaggacaatgaggacactgagctcatggcgatctacactacggaaaacggcattgcagaaaagagctctctcgctgagaccctggatagcactggcagtctggacccccagcgatcagacatgatttataccatagaagatgttcctccctggtacctgtgtatatttctggggctacagcactacctgacatgcttcagcggcacgatcgcagtgcccttcctgttggccgatgccatgtgtgtggggtacgaccagtgggccaccagccagctcattgggaccattttcttctgtgtgggaatcactactttgctacagacaacgtttggatgcaggttacccctgtttcaggccagtgcttttgcatttttggcccctgctcgagccatcctgtctttagataaatggaaatgtaacaccacagatgtttcagttgccaatggaacagcagagctgttgcacacagaacacatctggtatccccggatccgagagatccagggggccatcatcatgtcctcactgatagaagtagtcatcggcctcctcggcctgcctggggctctactgaagtacatcggtcccttgaccattacacccacggtggccctaattggcctctctggtttccaggcagcgggggagagagccgggaagcactggggcattgccatgctgacaatattcctagtattactgttttctcaatacgccagaaatgttaaatttcctctcccgatttataaatccaagaaaggatggactgcgtacaagttacagctgttcaaaatgttccctatcatcctggccatcctggtatcctggctgctctgcttcatcttcacggtgacagangtcttccctcccgacagcacaaagtatggcttctatgctcgcacagatgccaggcaaggcgtgcttctggtagccccgtggtttaaggttccatacccatgtaagtattctgatggctagaggggtcaagagcccacgagggcccaactgagaggggtg

SEQ ID NO: 446638 - DNA, 514 bp, Homo sapiens
  misc_feature (497)..(497): n is a, c, g, or t
ccagttcgacggagactctccagtacagtttccgctgtatatgccccgagggaccccatcaccccagctgctactcacaggtgaacgaatgcctgagcaatccctgcatccatggaaactgtactggaggtctcagtggatataagtgtctctgtgatgcaggctgggttggcatcaactgtgaagtggacaaaaatgaatgcctttcgaatccatgccagaatggaggaacttgtgacaatctggtgaatggatacaggtgtacttgcaagaagggctttaaaggctataactgccaggtgaatattgatgaatgtgcctcaaatccatgcctgaaccaaggaacctgctttgatgacataagtggctacacttgccactgtgtgctgccatacacaggcaagaattgtcagacagtattggctccctgttccccaaacccttgtgagaatgctgctgtttgcaaagagtcaccaaattttgagagtctccgtcanactggtaccgagctcga

SEQ ID NO: 446639 - DNA, 11426 bp, Homo sapiens
  misc_feature (4805)..(4805): n is a, c, g, or t
agcgggttgcacacccgagaaagtttcagccaaacttcgggcggcggctgaggcggcggccgaggagcggcggactcggggcgcggggagtcgaggcatttgcgcctgggcttcggagcgtagcgccaggcctgagcctttgaagcaggaggaggggaggagagagtggggctcctctatcgggaccccctccccatgtggatctgcccaggcggcggcggcggcggcggaggaggaggcgaccgagaagatgcccgccctgcgccccgctctgctgtgggcgctgctggcgctctggctgtgctgcgcggcccccgcgcatgcattgcagtgtcgagatggctatgaaccctgtgtaaatgaaggaatgtgtgttacctaccacaatggcacaggatactgcaaatgtccagaaggcttcttgggggaatattgtcaacatcgagacccctgtgagaagaaccgctgccagaatggtgggacttgtgtggcccaggccatgctggggaaagccacgtgccgatgtgcctcagggtttacaggagaggactgccagtactcaacatctcatccatgctttgtgtctcgaccctgcctgaatggcggcacatgccatatgctcagccgggatacctatgagtgcacctgtcaagtcgggtttacaggtaaggagtgccaatggacggatgcctgcctgtctcatccctgtgcaaatggaagtacctgtaccactgtggccaaccagttctcctgcaaatgcctcacaggcttcacagggcagaaatgtgagactgatgtcaatgagtgtgacattccaggacactgccagcatggtggcacctgcctcaacctgcctggttcctaccagtgccagtgccctcagggcttcacaggccagtactgtgacagcctgtatgtgccctgtgcaccctcaccttgtgtcaatggaggcacctgtcggcagactggtgacttcacttttgagtgcaactgccttccaggttttgaagggagcacctgtgagaggaatattgatgactgccctaaccacaggtgtcagaatggaggggtttgtgtggatggggtcaacacttacaactgccgctgtcccccacaatggacaggacagttctgcacagaggatgtggatgaatgcctgctgcagcccaatgcctgtcaaaatgggggcacctgtgccaaccgcaatggaggctatggctgtgtatgtgtcaacggctggagtggagatgactgcagtgagaacattgatgattgtgccttcgcctcctgtactccaggctccacctgcatcgaccgtgtggcctccttctcttgcatgtgcccagaggggaaggcaggtctcctgtgtcatctggatgatgcatgcatcagcaatccttgccacaagggggcactgtgtgacaccaaccccctaaatgggcaatatatttgcacctgcccacaaggctacaaaggggctgactgcacagaagatgtggatgaatgtgccatggccaatagcaatccttgtgagcatgcaggaaaatgtgtgaacacggatggcgccttccactgtgagtgtctgaagggttatgcaggacctcgttgtgagatggacatcaatgagtgccattcagacccctgccagaatgatgctacctgtctggataagattggaggcttcacatgtctgtgcatgccaggtttcaaaggtgtgcattgtgaattagaaataaatgaatgtcagagcaacccttgtgtgaacaatgggcagtgtgtggataaagtcaatcgtttccagtgcctgtgtcctcctggtttcactgggccagtttgccagattgatattgatgactgttccagtactccgtgtctgaatggggcaaagtgtatcgatcacccgaatggctatgaatgccagtgtgccacaggtttcactggtgtgttgtgtgaggagaacattgacaactgtgaccccgatccttgccaccatggtcagtgtcaggatggtattgattcctacacctgcatctgcaatcccgggtacatgggcgccatctgcagtgaccagattgatgaatgttacagcagcccttgcctgaacgatggtcgctgcattgacctggtcaatggctaccagtgcaactgccagccaggcacgtcaggggttaattgtgaaattaattttgatgactgtgcaagtaacccttgtatccatggaatctgtatggatggcattaatcgctacagttgtgtctgctcaccaggattcacagggcagagatgtaacattgacattgatgagtgtgcctccaatccctgtcgcaagggtgcaacatgtatcaacggtgtgaatggtttccgctgtatatgccccgagggaccccatcaccccagctgctactcacaggtgaacgaatgcctgagcaatccctgcatccatggaaactgtactggaggtctcagtggatataagtgtctctgtgatgcaggctgggttggcatcaactgtgaagtggacaaaaatgaatgcctttcgaatccatgccagaatggaggaacttgtgacaatctggtgaatggatacaggtgtacttgcaagaagggctttaaaggctataactgccaggtgaatattgatgaatgtgcctcaaatccatgcctgaaccaaggaacctgctttgatgacataagtggctacacttgccactgtgtgctgccatacacaggcaagaattgtcagacagtattggctccctgttccccaaacccttgtgagaatgctgctgtttgcaaagagtcaccaaattttgagagttatacttgcttgtgtgctcctggctggcaaggtcagcggtgtaccattgacattgacgagtgtatctccaagccctgcatgaaccatggtctctgccataacacccagggcagctacatgtgtgaatgtccaccaggcttcagtggtatggactgtgaggaggacattgatgactgccttgccaatccttgccagaatggaggttcctgtatggatggagtgaatactttctcctgcctctgccttccgggtttcactggggataagtgccagacagacatgaatgagtgtctgagtgaaccctgtaagaatggagggacctgctctgactacgtcaacagttacacttgcaagtgccaggcaggatttgatggagtccattgtgagaacaacatcaatgagtgcactgagagctcctgtttcaatggtggcacatgtgttgatgggattaactccttctcttgcttgtgccctgtgggtttcactggatccttctgcctccatgagatcaatgaatgcagctctcatccatgcctgaatgagggaacgtgtgttgatggcctgggtacctaccgctgcagctgccccctgggctacactgggaaaaactgtcagaccctggtgaatctctgcagtcggtctccatgtaaaaacaaaggtacttgcgttcagaaaaaagcagagtcccagtgcctatgtccatctggatgggctggtgcctattgtgacgtgcccaatgtctcttgtgacatagcagcctccaggagaggtgtgcttgttgaacacttgtgccagcactcaggtgtctgcatcaatgctggcaacacgcattactgtcagtgccccctgggctatactgggagctactgtgaggagcaactcgatgagtgtgcgtccaacccctgccagcacggggcaacatgcagtgacttcattggtggatacagatgcgagtgtgtcccaggctatcagggtgtcaactgtgagtatgaagtggatgagtgccagaatcagccctgccagaatggaggcacctgtattgaccttgtgaaccatttcaagtgctcttgcccaccaggcactcggggcctactctgtgaagagaacattgatgactgtgcccggggtccccattgccttaatggtggtcagtgcatggataggattggaggctacagttgtcgctgcttgcctggctttgctggggagcgttgtgagggagacatcaacgagtgcctctccaacccctgcagctctgagggcagcctggactgtatacagctcaccaatgactacctgtgtgtttgccgtagtgcctttactggccggcactgtgaaaccttcgtcgatgtgtgtccccagatgccctgcctgaatggagggacttgtgctgtggccagtaacatgcctgatggtttcatttgccgttgtcccccgggattttccggggcaaggtgccagagcagctgtggacaagtgaaatgtaggaagggggagcagtgtgtgcacaccgcctctggaccccgctgcttctgccccagtccccgggactgcgagtcaggctgtgccagtagcccctgccagcacgggggcagctgccaccctcagcgccagcctccttattactcctgccagtgtgccccaccattctcgggtagccgctgtgaactctacacggcaccccccagcacccctcctgccacctgtctgagccagtattgtgccgacaaagctcgggatggcgtctgtgatgaggcctgcaacagccatgcctgccagtgggatgggggtgactgttctctcaccatggagaacccctgggccaactgctcctccccacttccctgctgggattatatcaacaaccagtgtgatgagctgtgcaacacggtcgagtgcctgtttgacaactttgaatgccaggggaacagcaagacatgcaagtatgacaaatactgtgcagaccacttcaaagacaaccactgtnaccaggggtgcaacagtgaggagtgtggttgggatgggctggactgtgctgctgaccaacctgagaacctggcagaaggtaccctggttattgtggtattgatgccacctgaacaactgctccaggatgctcgcagcttcttgcgggcactgggtaccctgctccacaccaacctgcgcattaagcgggactcccagggggaactcatggtgtacccctattatggtgagaagtcagctgctatgaagaaacagaggatgacacgcagatcccttcctggtgaacaagaacaggaggtggctggctctaaagtctttctggaaattgacaaccgccagtgtgttcaagactcagaccactgcttcaagaacacggatgcagcagcagctctcctggcctctcacgccatacaggggaccctgtcataccctcttgtgtctgtcgtcagtgaatccctgactccagaacgcactcagctcctctatctccttgctgttgctgttgtcatcattctgtttattattctgctgggggtaatcatggcaaaacgaaagcgtaagcatggctctctctggctgcctgaaggtttcactcttcgccgagatgcaagcaatcacaagcgtcgtgagccagtgggacaggatgctgtggggctgaaaaatctctcagtgcaagtctcagaagctaacctaattggtactggaacaagtgaacactgggtcgatgatgaagggccccagccaaagaaagtaaaggctgaagatgaggccttactctcagaagaagatgaccccattgatcgacggccatggacacagcagcaccttgaagctgcagacatccgtaggacaccatcgctggctctcacccctcctcaggcagagcaggaggtggatgtgttagatgtgaatgtccgtggcccagatggctgcaccccattgatgttggcttctctccgaggaggcagctcagatttgagtgatgaagatgaagatgcagaggactcttctgctaacatcatcacagacttggtctaccagggtgccagcctccaggcccagacagaccggactggtgagatggccctgcaccttgcagcccgctactcacgggctgatgctgccaagcgtctcctggatgcaggtgcagatgccaatgcccaggacaacatgggccgctgtccactccatgctgcagtggcagctgatgcccaaggtgtcttccagattctgattcgcaaccgagtaactgatctagatgccaggatgaatgatggtactacacccctgatcctggctgcccgcctggctgtggagggaatggtggcagaactgatcaactgccaagcggatgtgaatgcagtggatgaccatggaaaatctgctcttcactgggcagctgctgtcaataatgtggaggcaactcttttgttgttgaaaaatggggccaaccgagacatgcaggacaacaaggaagagacacctctgtttcttgctgcccgggaggggagctatgaagcagccaagatcctgttagaccattttgccaatcgagacatcacagaccatatggatcgtcttccccgggatgtggctcgggatcgcatgcaccatgacattgtgcgccttctggatgaatacaatgtgaccccaagccctccaggcaccgtgttgacttctgctctctcacctgtcatctgtgggcccaacagatctttcctcagcctgaagcacaccccaatgggcaagaagtctagacggcccagtgccaagagtaccatgcctactagcctccctaaccttgccaaggaggcaaaggatgccaagggtagtaggaggaagaagtctctgagtgagaaggtccaactgtctgagagttcagtaactttatcccctgttgattccctagaatctcctcacacgtatgtttccgacaccacatcctctccaatgattacatccctgggatcttacaggcctcacccaaccctatgttggccactgccgcccctcctgccccagtccatgcccagcatgcactatctttttctaaccttcatgaaatgcagcctttggcacatggggccagcactgtgcttccctcagtgagccagttgctatcccaccaccacattgtgtctccaggcagtggcagtgctggaagcttgagtaggctccatccagtcccagtcccagcagattggatgaaccgcatggaggtgaatgagacccagtacaatgagatgtttggtatggtcctggctccagctgagggcacccatcctggcatagctccccagagcaggccacctgaagggaagcacataaccacccctcgggagcccttgccccccattgtgactttccagctcatccctaaaggcagtattgcccaaccagcgggggctccccagcctcagtccacctgccctccagctgttgcgggccccctgcccaccatgtaccagattccagaaatggcccgtttgcccagtgtggctttccccactgccatgatgccccagcaggacgggcaggtagctcagaccattctcccagcctatcatcctttcccagcctctgtgggcaagtaccccacacccccttcacagcacagttatgcttcctcaaatgctgctgagcgaacacccagtcacagtggtcacctccagggtgagcatccctacctgacaccatccccagagtctcctgaccagtggtcaagttcatcaccccactctgcttctgactggtcagatgtgaccaccagccctacccctgggggtgctggaggaggtcagcggggacctgggacacacatgtctgagccaccacacaacaacatgcaggtttatgcgtgagagagtccacctccagtgtagagacataactgacttttgtaaatgctgctgaggaacaaatgaaggtcatccgggagagaaatgaagaaatctctggagccagcttctagaggtaggaaagagaagatgttcttattcagataatgcaagagaagcaattcgtcagtttcactgggtatctgcaaggcttattgattattctaatctaataagacaagtttgtggaaatgcaagatgaatacaagccttgggtccatgtttactctcttctatttggagaataagatggatgcttattgaagcccagacattcttgcagcttggactgcattttaagccctgcaggcttctgccatatccatgagaagattctacactagcgtcctgttgggaattatgccctggaattctgcctgaattgacctacgcatctcctcctccttggacattcttttgtcttcatttggtgcttttggttttgcacctctccgtgattgtagccctaccagcatgttatagggcaagacctttgtgcttttgatcattctggcccatgaaagcaactttggtctcctttcccctcctgtcttcccggtatcccttggagtctcacaaggtttactttggtatggttctcagcacaaacctttcaagtatgttgtttctttggaaaatggacatactgtattgtgttctcctgcatatatcattcctggagagagaaggggagaagaatacttttcttcaacaaattttgggggcaggagatcccttcaagaggctgcaccttaatttttcttgtctgtgtgcaggtcttcatataaactttaccaggaagaagggtgtgagtttgttgtttttctgtgtatgggcctggtcagtgtaaagttttatccttgatagtctagttactatgaccctccccacttttttaaaaccagaaaaaggtttggaatgttggaatgaccaagagacaagttaactcgtgcaagagccagttacccacccacaggtccccctacttcctgccaagcattccattgactgcctgtatggaacacatttgtcccagatctgagcattctaggcctgtttcactcactcacccagcatatgaaactagtcttaactgttgagcctttcctttcatatccacagaagacactgtctcaaatgttgtacccttgccatttaggactgaactttccttagcccaagggacccagtgacagttgtcttccgtttgtcagatgatcagtctctactgattatcttgctgcttaaaggcctgctcaccaatctttctttcacaccgtgtggtccgtgttactggtatacccagtatgttctcactgaagacatggactttatatgttcaagtgcaggaattggaaagttggacttgttttctatgatccaaaacagccctataagaaggttggaaaaggaggaactatatagcagcctttgctattttctgctaccatttcttttcctctgaagcggccatgacattccctttggcaactaacgtagaaactcaacagaacattttcctttcctagagtcaccttttagatgataatggacaactatagacttgctcattgttcagactgattgcccctcacctgaatccactctctgtattcatgctcttggcaatttctttgactttcttttaagggcagaagcattttagttaattgtagataaagaatagttttcttcctcttctccttgggccagttaataattggtccatggctacactgcaacttccgtccagtgctgtgatgcccatgacacctgcaaaataagttctgcctgggcattttgtagatattaacaggtgaattcccgactcttttggtttgaatgacagttctcattccttctatggctgcaagtatgcatcagtgcttcccacttacctgatttgtctgtcggtggccccatatggaaaccctgcgtgtctgttggcataatagtttacaaatggttttttcagtcctatccaaatttattgaaccaacaaaaataattacttctgccctgagataagcagattaagtttgttcattctctgctttattctctccatgtggcaacattctgtcagcctctttcatagtgtgcaaacattttatcattctaaatggtgactctctgcccttggacccatttattattcacagatggggagaacctatctgcatggacctctgtggaccacagcgtacctgcccctttctgccctcctgctccagccccacttctgaaagtatcagctactgatccagccactggatattttatatcctcccttttccttaagcacaatgtcagaccaaattgcttgtttctttttcttggactactttaatttggatcctttgggtttggagaaagggaatgtgaaagctgtcattacagacaacaggtttcagtgatgaggaggacaacactgcctttcaaactttttactgatctcttagattttaagaactcttgaattgtgtggtatctaataaaagggaaggtaagatggataatcactttctcatttgggttctgaattggagactcagtttttatgagacacatcttttatgccatgtatagatcctcccctgctatttttggtttatttttattgttataaatgctttctttctttgactcctcttctgcctgcctttggggataggtttttttgtttgtttatttgcttcctctgttttgttttaagcatcattttcttatgtgaggtggggaagggaaaggtatgagggaaagagagtctgagaattaaaatattttagtataagcaattggctgtgatgctcaaatccattgcatcctcttattgaatttgccaatttgtaatttttgcataataaagaaccaaaggtgtaatgttttgttgagaggtggtttagggattttggccctaaccaatacattgaatgtatgatgactatttgggaggacacatttatgtacccagaggcccccactaataagtggtactatggttacttccttgtgtacatttctcttaaaagtgatattatatctgtttgtatgagaaacccagtaaccaataaaatgaccgcatattcctgactaaacgtagtaaggaaaatgcacactttgtttttacttttccgtttcattctaaaggtagttaagatgaaatttatatgaaagcatttttatcacaaaataaaaaaggtttgccaagctcagtggtgttgtattttttattttccaatactgcatccatggcctggcagtgttacctcatgatgtcataatttgctgagagagcaaattttcttttctttctgaatcccacaaagcctagcaccaaacttctttttttcttcctttaattagatcataaataaatgatcctggggaaaaagcatctgtcaaataggaaacatcacaaaactgagcactcttctgtgcactagccatagctggtgacaaacagatggttgctcagggacaaggtgccttccaatggaaatgcgaagtagttgctatagcaagaattgggaactgggatataagtcataatattaattatgctgttatgtaaatgattggtttgtaacattccttaagtgaaatttgtgtagaacttaatatacaggattataaaataatattttgtgtataaatttgttataagttcacattcatacatttatttataaagtcagtgagatatttgaacatgaaaaaaaaaa

SEQ ID NO: 446640 - DNA, 8835 bp, Homo sapiens
  misc_feature (2214)..(2214): n is a, c, g, or t
aaagatcatgggcttctccattttcaaagcctcttaatcaggacttttgacttgaattcagagaacatccttgggataaggaaaattttcgttttcttacctgttcatctgccataaactctgtcatttactttctaggcaagaattgtcagacagtattggctccctgttccccaaacccttgtgagaatgctgctgtttgcaaagagtcaccaaattttgagagttatacttgcttgtgtgctcctggctggcaaggtcagcggtgtaccattgacattgacgagtgtatctccaagccctgcatgaaccatggtctctgccataacacccagggcagctacatgtgtgaatgtccaccaggcttcagtggtatggactgtgaggaggacattgatgactgccttgccaatccttgccagaatggaggttcctgtatggatggagtgaatactttctcctgcctctgccttccgggtttcactggggataagtgccagacagacatgaatgagtgtctgagtgaaccctgtaagaatggagggacctgctctgactacgtcaacagttacacttgcaagtgccaggcaggatttgatggagtccattgtgagaacaacatcaatgagtgcactgagagctcctgtttcaatggtggcacatgtgttgatgggattaactccttctcttgcttgtgccctgtgggtttcactggatccttctgcctccatgagatcaatgaatgcagctctcatccatgcctgaatgagggaacgtgtgttgatggcctgggtacctaccgctgcagctgccccctgggctacactgggaaaaactgtcagaccctggtgaatctctgcagtcggtctccatgtaaaaacaaaggtacttgcgttcagaaaaaagcagagtcccagtgcctatgtccatctggatgggctggtgcctattgtgacgtgcccaatgtctcttgtgacatagcagcctccaggagaggtgtgcttgttgaacacttgtgccagcactcaggtgtctgcatcaatgctggcaacacgcattactgtcagtgccccctgggctatactgggagctactgtgaggagcaactcgatgagtgtgcgtccaacccctgccagcacggggcaacatgcagtgacttcattggtggatacagatgcgagtgtgtcccaggctatcagggtgtcaactgtgagtatgaagtggatgagtgccagaatcagccctgccagaatggaggcacctgtattgaccttgtgaaccatttcaagtgctcttgcccaccaggcactcggggcctactctgtgaagagaacattgatgactgtgcccggggtccccattgccttaatggtggtcagtgcatggataggattggaggctacagttgtcgctgcttgcctggctttgctggggagcgttgtgagggagacatcaacgagtgcctctccaacccctgcagctctgagggcagcctggactgtatacagctcaccaatgactacctgtgtgtttgccgtagtgcctttactggccggcactgtgaaaccttcgtcgatgtgtgtccccagatgccctgcctgaatggagggacttgtgctgtggccagtaacatgcctgatggtttcatttgccgttgtcccccgggattttccggggcaaggtgccagagcagctgtggacaagtgaaatgtaggaagggggagcagtgtgtgcacaccgcctctggaccccgctgcttctgccccagtccccgggactgcgagtcaggctgtgccagtagcccctgccagcacgggggcagctgccaccctcagcgccagcctccttattactcctgccagtgtgccccaccattctcgggtagccgctgtgaactctacacggcaccccccagcacccctcctgccacctgtctgagccagtattgtgccgacaaagctcgggatggcgtctgtgatgaggcctgcaacagccatgcctgccagtgggatgggggtgactgttctctcaccatggagaacccctgggccaactgctcctccccacttccctgctgggattatatcaacaaccagtgtgatgagctgtgcaacacggtcgagtgcctgtttgacaactttgaatgccaggggaacagcaagacatgcaagtatgacaaatactgtgcagaccacttcaaagacaaccactgtnaccaggggtgcaacagtgaggagtgtggttgggatgggctggactgtgctgctgaccaacctgagaacctggcagaaggtaccctggttattgtggtattgatgccacctgaacaactgctccaggatgctcgcagcttcttgcgggcactgggtaccctgctccacaccaacctgcgcattaagcgggactcccagggggaactcatggtgtacccctattatggtgagaagtcagctgctatgaagaaacagaggatgacacgcagatcccttcctggtgaacaagaacaggaggtggctggctctaaagtctttctggaaattgacaaccgccagtgtgttcaagactcagaccactgcttcaagaacacggatgcagcagcagctctcctggcctctcacgccatacaggggaccctgtcataccctcttgtgtctgtcgtcagtgaatccctgactccagaacgcactcagctcctctatctccttgctgttgctgttgtcatcattctgtttattattctgctgggggtaatcatggcaaaacgaaagcgtaagcatggctctctctggctgcctgaaggtttcactcttcgccgagatgcaagcaatcacaagcgtcgtgagccagtgggacaggatgctgtggggctgaaaaatctctcagtgcaagtctcagaagctaacctaattggtactggaacaagtgaacactgggtcgatgatgaagggccccagccaaagaaagtaaaggctgaagatgaggccttactctcagaagaagatgaccccattgatcgacggccatggacacagcagcaccttgaagctgcagacatccgtaggacaccatcgctggctctcacccctcctcaggcagagcaggaggtggatgtgttagatgtgaatgtccgtggcccagatggctgcaccccattgatgttggcttctctccgaggaggcagctcagatttgagtgatgaagatgaagatgcagaggactcttctgctaacatcatcacagacttggtctaccagggtgccagcctccaggcccagacagaccggactggtgagatggccctgcaccttgcagcccgctactcacgggctgatgctgccaagcgtctcctggatgcaggtgcagatgccaatgcccaggacaacatgggccgctgtccactccatgctgcagtggcagctgatgcccaaggtgtcttccagattctgattcgcaaccgagtaactgatctagatgccaggatgaatgatggtactacacccctgatcctggctgcccgcctggctgtggagggaatggtggcagaactgatcaactgccaagcggatgtgaatgcagtggatgaccatggaaaatctgctcttcactgggcagctgctgtcaataatgtggaggcaactcttttgttgttgaaaaatggggccaaccgagacatgcaggacaacaaggaagagacacctctgtttcttgctgcccgggaggggagctatgaagcagccaagatcctgttagaccattttgccaatcgagacatcacagaccatatggatcgtcttccccgggatgtggctcgggatcgcatgcaccatgacattgtgcgccttctggatgaatacaatgtgaccccaagccctccaggcaccgtgttgacttctgctctctcacctgtcatctgtgggcccaacagatctttcctcagcctgaagcacaccccaatgggcaagaagtctagacggcccagtgccaagagtaccatgcctactagcctccctaaccttgccaaggaggcaaaggatgccaagggtagtaggaggaagaagtctctgagtgagaaggtccaactgtctgagagttcagtaactttatcccctgttgattccctagaatctcctcacacgtatgtttccgacaccacatcctctccaatgattacatccctgggatcttacaggcctcacccaaccctatgttggccactgccgcccctcctgccccagtccatgcccagcatgcactatctttttctaaccttcatgaaatgcagcctttggcacatggggccagcactgtgcttccctcagtgagccagttgctatcccaccaccacattgtgtctccaggcagtggcagtgctggaagcttgagtaggctccatccagtcccagtcccagcagattggatgaaccgcatggaggtgaatgagacccagtacaatgagatgtttggtatggtcctggctccagctgagggcacccatcctggcatagctccccagagcaggccacctgaagggaagcacataaccacccctcgggagcccttgccccccattgtgactttccagctcatccctaaaggcagtattgcccaaccagcgggggctccccagcctcagtccacctgccctccagctgttgcgggccccctgcccaccatgtaccagattccagaaatggcccgtttgcccagtgtggctttccccactgccatgatgccccagcaggacgggcaggtagctcagaccattctcccagcctatcatcctttcccagcctctgtgggcaagtaccccacacccccttcacagcacagttatgcttcctcaaatgctgctgagcgaacacccagtcacagtggtcacctccagggtgagcatccctacctgacaccatccccagagtctcctgaccagtggtcaagttcatcaccccactctgcttctgactggtcagatgtgaccaccagccctacccctgggggtgctggaggaggtcagcggggacctgggacacacatgtctgagccaccacacaacaacatgcaggtttatgcgtgagagagtccacctccagtgtagagacataactgacttttgtaaatgctgctgaggaacaaatgaaggtcatccgggagagaaatgaagaaatctctggagccagcttctagaggtaggaaagagaagatgttcttattcagataatgcaagagaagcaattcgtcagtttcactgggtatctgcaaggcttattgattattctaatctaataagacaagtttgtggaaatgcaagatgaatacaagccttgggtccatgtttactctcttctatttggagaataagatggatgcttattgaagcccagacattcttgcagcttggactgcattttaagccctgcaggcttctgccatatccatgagaagattctacactagcgtcctgttgggaattatgccctggaattctgcctgaattgacctacgcatctcctcctccttggacattcttttgtcttcatttggtgcttttggttttgcacctctccgtgattgtagccctaccagcatgttatagggcaagacctttgtgcttttgatcattctggcccatgaaagcaactttggtctcctttcccctcctgtcttcccggtatcccttggagtctcacaaggtttactttggtatggttctcagcacaaacctttcaagtatgttgtttctttggaaaatggacatactgtattgtgttctcctgcatatatcattcctggagagagaaggggagaagaatacttttcttcaacaaattttgggggcaggagatcccttcaagaggctgcaccttaatttttcttgtctgtgtgcaggtcttcatataaactttaccaggaagaagggtgtgagtttgttgtttttctgtgtatgggcctggtcagtgtaaagttttatccttgatagtctagttactatgaccctccccacttttttaaaaccagaaaaaggtttggaatgttggaatgaccaagagacaagttaactcgtgcaagagccagttacccacccacaggtccccctacttcctgccaagcattccattgactgcctgtatggaacacatttgtcccagatctgagcattctaggcctgtttcactcactcacccagcatatgaaactagtcttaactgttgagcctttcctttcatatccacagaagacactgtctcaaatgttgtacccttgccatttaggactgaactttccttagcccaagggacccagtgacagttgtcttccgtttgtcagatgatcagtctctactgattatcttgctgcttaaaggcctgctcaccaatctttctttcacaccgtgtggtccgtgttactggtatacccagtatgttctcactgaagacatggactttatatgttcaagtgcaggaattggaaagttggacttgttttctatgatccaaaacagccctataagaaggttggaaaaggaggaactatatagcagcctttgctattttctgctaccatttcttttcctctgaagcggccatgacattccctttggcaactaacgtagaaactcaacagaacattttcctttcctagagtcaccttttagatgataatggacaactatagacttgctcattgttcagactgattgcccctcacctgaatccactctctgtattcatgctcttggcaatttctttgactttcttttaagggcagaagcattttagttaattgtagataaagaatagttttcttcctcttctccttgggccagttaataattggtccatggctacactgcaacttccgtccagtgctgtgatgcccatgacacctgcaaaataagttctgcctgggcattttgtagatattaacaggtgaattcccgactcttttggtttgaatgacagttctcattccttctatggctgcaagtatgcatcagtgcttcccacttacctgatttgtctgtcggtggccccatatggaaaccctgcgtgtctgttggcataatagtttacaaatggttttttcagtcctatccaaatttattgaaccaacaaaaataattacttctgccctgagataagcagattaagtttgttcattctctgctttattctctccatgtggcaacattctgtcagcctctttcatagtgtgcaaacattttatcattctaaatggtgactctctgcccttggacccatttattattcacagatggggagaacctatctgcatggacctctgtggaccacagcgtacctgcccctttctgccctcctgctccagccccacttctgaaagtatcagctactgatccagccactggatattttatatcctcccttttccttaagcacaatgtcagaccaaattgcttgtttctttttcttggactactttaatttggatcctttgggtttggagaaagggaatgtgaaagctgtcattacagacaacaggtttcagtgatgaggaggacaacactgcctttcaaactttttactgatctcttagattttaagaactcttgaattgtgtggtatctaataaaagggaaggtaagatggataatcactttctcatttgggttctgaattggagactcagtttttatgagacacatcttttatgccatgtatagatcctcccctgctatttttggtttatttttattgttataaatgctttctttctttgactcctcttctgcctgcctttggggataggtttttttgtttgtttatttgcttcctctgttttgttttaagcatcattttcttatgtgaggtggggaagggaaaggtatgagggaaagagagtctgagaattaaaatattttagtataagcaattggctgtgatgctcaaatccattgcatcctcttattgaatttgccaatttgtaatttttgcataataaagaaccaaaggtgtaatgttttgttgagaggtggtttagggattttggccctaaccaatacattgaatgtatgatgactatttgggaggacacatttatgtacccagaggcccccactaataagtggtactatggttacttccttgtgtacatttctcttaaaagtgatattatatctgtttgtatgagaaacccagtaaccaataaaatgaccgcatattcctgactaaacgtagtaaggaaaatgcacactttgtttttacttttccgtttcattctaaaggtagttaagatgaaatttatatgaaagcatttttatcacaaaataaaaaaggtttgccaagctcagtggtgttgtattttttattttccaatactgcatccatggcctggcagtgttacctcatgatgtcataatttgctgagagagcaaattttcttttctttctgaatcccacaaagcctagcaccaaacttctttttttcttcctttaattagatcataaataaatgatcctggggaaaaagcatctgtcaaataggaaacatcacaaaactgagcactcttctgtgcactagccatagctggtgacaaacagatggttgctcagggacaaggtgccttccaatggaaatgcgaagtagttgctatagcaagaattgggaactgggatataagtcataatattaattatgctgttatgtaaatgattggtttgtaacattccttaagtgaaatttgtgtagaacttaatatacaggattataaaataatattttgtgtataaatttgttataagttcacattcatacatttatttataaagtcagtgagatatttgaacatgaaaaaaaaaa

SEQ ID NO: 446641 - DNA, 8011 bp, Homo sapiens
  misc_feature (1390)..(1390): n is a, c, g, or t
cccctgcctctgtttcagaccctggtgaatctctgcagtcggtctccatgtaaaaacaaaggtacttgcgttcagaaaaaagcagagtcccagtgcctatgtccatctggatgggctggtgcctattgtgacgtgcccaatgtctcttgtgacatagcagcctccaggagaggtgtgcttgttgaacacttgtgccagcactcaggtgtctgcatcaatgctggcaacacgcattactgtcagtgccccctgggctatactgggagctactgtgaggagcaactcgatgagtgtgcgtccaacccctgccagcacggggcaacatgcagtgacttcattggtggatacagatgcgagtgtgtcccaggctatcagggtgtcaactgtgagtatgaagtggatgagtgccagaatcagccctgccagaatggaggcacctgtattgaccttgtgaaccatttcaagtgctcttgcccaccaggcactcggggcctactctgtgaagagaacattgatgactgtgcccggggtccccattgccttaatggtggtcagtgcatggataggattggaggctacagttgtcgctgcttgcctggctttgctggggagcgttgtgagggagacatcaacgagtgcctctccaacccctgcagctctgagggcagcctggactgtatacagctcaccaatgactacctgtgtgtttgccgtagtgcctttactggccggcactgtgaaaccttcgtcgatgtgtgtccccagatgccctgcctgaatggagggacttgtgctgtggccagtaacatgcctgatggtttcatttgccgttgtcccccgggattttccggggcaaggtgccagagcagctgtggacaagtgaaatgtaggaagggggagcagtgtgtgcacaccgcctctggaccccgctgcttctgccccagtccccgggactgcgagtcaggctgtgccagtagcccctgccagcacgggggcagctgccaccctcagcgccagcctccttattactcctgccagtgtgccccaccattctcgggtagccgctgtgaactctacacggcaccccccagcacccctcctgccacctgtctgagccagtattgtgccgacaaagctcgggatggcgtctgtgatgaggcctgcaacagccatgcctgccagtgggatgggggtgactgttctctcaccatggagaacccctgggccaactgctcctccccacttccctgctgggattatatcaacaaccagtgtgatgagctgtgcaacacggtcgagtgcctgtttgacaactttgaatgccaggggaacagcaagacatgcaagtatgacaaatactgtgcagaccacttcaaagacaaccactgtnaccaggggtgcaacagtgaggagtgtggttgggatgggctggactgtgctgctgaccaacctgagaacctggcagaaggtaccctggttattgtggtattgatgccacctgaacaactgctccaggatgctcgcagcttcttgcgggcactgggtaccctgctccacaccaacctgcgcattaagcgggactcccagggggaactcatggtgtacccctattatggtgagaagtcagctgctatgaagaaacagaggatgacacgcagatcccttcctggtgaacaagaacaggaggtggctggctctaaagtctttctggaaattgacaaccgccagtgtgttcaagactcagaccactgcttcaagaacacggatgcagcagcagctctcctggcctctcacgccatacaggggaccctgtcataccctcttgtgtctgtcgtcagtgaatccctgactccagaacgcactcagctcctctatctccttgctgttgctgttgtcatcattctgtttattattctgctgggggtaatcatggcaaaacgaaagcgtaagcatggctctctctggctgcctgaaggtttcactcttcgccgagatgcaagcaatcacaagcgtcgtgagccagtgggacaggatgctgtggggctgaaaaatctctcagtgcaagtctcagaagctaacctaattggtactggaacaagtgaacactgggtcgatgatgaagggccccagccaaagaaagtaaaggctgaagatgaggccttactctcagaagaagatgaccccattgatcgacggccatggacacagcagcaccttgaagctgcagacatccgtaggacaccatcgctggctctcacccctcctcaggcagagcaggaggtggatgtgttagatgtgaatgtccgtggcccagatggctgcaccccattgatgttggcttctctccgaggaggcagctcagatttgagtgatgaagatgaagatgcagaggactcttctgctaacatcatcacagacttggtctaccagggtgccagcctccaggcccagacagaccggactggtgagatggccctgcaccttgcagcccgctactcacgggctgatgctgccaagcgtctcctggatgcaggtgcagatgccaatgcccaggacaacatgggccgctgtccactccatgctgcagtggcagctgatgcccaaggtgtcttccagattctgattcgcaaccgagtaactgatctagatgccaggatgaatgatggtactacacccctgatcctggctgcccgcctggctgtggagggaatggtggcagaactgatcaactgccaagcggatgtgaatgcagtggatgaccatggaaaatctgctcttcactgggcagctgctgtcaataatgtggaggcaactcttttgttgttgaaaaatggggccaaccgagacatgcaggacaacaaggaagagacacctctgtttcttgctgcccgggaggggagctatgaagcagccaagatcctgttagaccattttgccaatcgagacatcacagaccatatggatcgtcttccccgggatgtggctcgggatcgcatgcaccatgacattgtgcgccttctggatgaatacaatgtgaccccaagccctccaggcaccgtgttgacttctgctctctcacctgtcatctgtgggcccaacagatctttcctcagcctgaagcacaccccaatgggcaagaagtctagacggcccagtgccaagagtaccatgcctactagcctccctaaccttgccaaggaggcaaaggatgccaagggtagtaggaggaagaagtctctgagtgagaaggtccaactgtctgagagttcagtaactttatcccctgttgattccctagaatctcctcacacgtatgtttccgacaccacatcctctccaatgattacatccctgggatcttacaggcctcacccaaccctatgttggccactgccgcccctcctgccccagtccatgcccagcatgcactatctttttctaaccttcatgaaatgcagcctttggcacatggggccagcactgtgcttccctcagtgagccagttgctatcccaccaccacattgtgtctccaggcagtggcagtgctggaagcttgagtaggctccatccagtcccagtcccagcagattggatgaaccgcatggaggtgaatgagacccagtacaatgagatgtttggtatggtcctggctccagctgagggcacccatcctggcatagctccccagagcaggccacctgaagggaagcacataaccacccctcgggagcccttgccccccattgtgactttccagctcatccctaaaggcagtattgcccaaccagcgggggctccccagcctcagtccacctgccctccagctgttgcgggccccctgcccaccatgtaccagattccagaaatggcccgtttgcccagtgtggctttccccactgccatgatgccccagcaggacgggcaggtagctcagaccattctcccagcctatcatcctttcccagcctctgtgggcaagtaccccacacccccttcacagcacagttatgcttcctcaaatgctgctgagcgaacacccagtcacagtggtcacctccagggtgagcatccctacctgacaccatccccagagtctcctgaccagtggtcaagttcatcaccccactctgcttctgactggtcagatgtgaccaccagccctacccctgggggtgctggaggaggtcagcggggacctgggacacacatgtctgagccaccacacaacaacatgcaggtttatgcgtgagagagtccacctccagtgtagagacataactgacttttgtaaatgctgctgaggaacaaatgaaggtcatccgggagagaaatgaagaaatctctggagccagcttctagaggtaggaaagagaagatgttcttattcagataatgcaagagaagcaattcgtcagtttcactgggtatctgcaaggcttattgattattctaatctaataagacaagtttgtggaaatgcaagatgaatacaagccttgggtccatgtttactctcttctatttggagaataagatggatgcttattgaagcccagacattcttgcagcttggactgcattttaagccctgcaggcttctgccatatccatgagaagattctacactagcgtcctgttgggaattatgccctggaattctgcctgaattgacctacgcatctcctcctccttggacattcttttgtcttcatttggtgcttttggttttgcacctctccgtgattgtagccctaccagcatgttatagggcaagacctttgtgcttttgatcattctggcccatgaaagcaactttggtctcctttcccctcctgtcttcccggtatcccttggagtctcacaaggtttactttggtatggttctcagcacaaacctttcaagtatgttgtttctttggaaaatggacatactgtattgtgttctcctgcatatatcattcctggagagagaaggggagaagaatacttttcttcaacaaattttgggggcaggagatcccttcaagaggctgcaccttaatttttcttgtctgtgtgcaggtcttcatataaactttaccaggaagaagggtgtgagtttgttgtttttctgtgtatgggcctggtcagtgtaaagttttatccttgatagtctagttactatgaccctccccacttttttaaaaccagaaaaaggtttggaatgttggaatgaccaagagacaagttaactcgtgcaagagccagttacccacccacaggtccccctacttcctgccaagcattccattgactgcctgtatggaacacatttgtcccagatctgagcattctaggcctgtttcactcactcacccagcatatgaaactagtcttaactgttgagcctttcctttcatatccacagaagacactgtctcaaatgttgtacccttgccatttaggactgaactttccttagcccaagggacccagtgacagttgtcttccgtttgtcagatgatcagtctctactgattatcttgctgcttaaaggcctgctcaccaatctttctttcacaccgtgtggtccgtgttactggtatacccagtatgttctcactgaagacatggactttatatgttcaagtgcaggaattggaaagttggacttgttttctatgatccaaaacagccctataagaaggttggaaaaggaggaactatatagcagcctttgctattttctgctaccatttcttttcctctgaagcggccatgacattccctttggcaactaacgtagaaactcaacagaacattttcctttcctagagtcaccttttagatgataatggacaactatagacttgctcattgttcagactgattgcccctcacctgaatccactctctgtattcatgctcttggcaatttctttgactttcttttaagggcagaagcattttagttaattgtagataaagaatagttttcttcctcttctccttgggccagttaataattggtccatggctacactgcaacttccgtccagtgctgtgatgcccatgacacctgcaaaataagttctgcctgggcattttgtagatattaacaggtgaattcccgactcttttggtttgaatgacagttctcattccttctatggctgcaagtatgcatcagtgcttcccacttacctgatttgtctgtcggtggccccatatggaaaccctgcgtgtctgttggcataatagtttacaaatggttttttcagtcctatccaaatttattgaaccaacaaaaataattacttctgccctgagataagcagattaagtttgttcattctctgctttattctctccatgtggcaacattctgtcagcctctttcatagtgtgcaaacattttatcattctaaatggtgactctctgcccttggacccatttattattcacagatggggagaacctatctgcatggacctctgtggaccacagcgtacctgcccctttctgccctcctgctccagccccacttctgaaagtatcagctactgatccagccactggatattttatatcctcccttttccttaagcacaatgtcagaccaaattgcttgtttctttttcttggactactttaatttggatcctttgggtttggagaaagggaatgtgaaagctgtcattacagacaacaggtttcagtgatgaggaggacaacactgcctttcaaactttttactgatctcttagattttaagaactcttgaattgtgtggtatctaataaaagggaaggtaagatggataatcactttctcatttgggttctgaattggagactcagtttttatgagacacatcttttatgccatgtatagatcctcccctgctatttttggtttatttttattgttataaatgctttctttctttgactcctcttctgcctgcctttggggataggtttttttgtttgtttatttgcttcctctgttttgttttaagcatcattttcttatgtgaggtggggaagggaaaggtatgagggaaagagagtctgagaattaaaatattttagtataagcaattggctgtgatgctcaaatccattgcatcctcttattgaatttgccaatttgtaatttttgcataataaagaaccaaaggtgtaatgttttgttgagaggtggtttagggattttggccctaaccaatacattgaatgtatgatgactatttgggaggacacatttatgtacccagaggcccccactaataagtggtactatggttacttccttgtgtacatttctcttaaaagtgatattatatctgtttgtatgagaaacccagtaaccaataaaatgaccgcatattcctgactaaacgtagtaaggaaaatgcacactttgtttttacttttccgtttcattctaaaggtagttaagatgaaatttatatgaaagcatttttatcacaaaataaaaaaggtttgccaagctcagtggtgttgtattttttattttccaatactgcatccatggcctggcagtgttacctcatgatgtcataatttgctgagagagcaaattttcttttctttctgaatcccacaaagcctagcaccaaacttctttttttcttcctttaattagatcataaataaatgatcctggggaaaaagcatctgtcaaataggaaacatcacaaaactgagcactcttctgtgcactagccatagctggtgacaaacagatggttgctcagggacaaggtgccttccaatggaaatgcgaagtagttgctatagcaagaattgggaactgggatataagtcataatattaattatgctgttatgtaaatgattggtttgtaacattccttaagtgaaatttgtgtagaacttaatatacaggattataaaataatattttgtgtataaatttgttataagttcacattcatacatttatttataaagtcagtgagatatttgaacatgaaaaaaaaaa

SEQ ID NO: 446642 - DNA, 8226 bp, Homo sapiens
  misc_feature (4805)..(4805): n is a, c, g, or t
agcgggttgcacacccgagaaagtttcagccaaacttcgggcggcggctgaggcggcggccgaggagcggcggactcggggcgcggggagtcgaggcatttgcgcctgggcttcggagcgtagcgccaggcctgagcctttgaagcaggaggaggggaggagagagtggggctcctctatcgggaccccctccccatgtggatctgcccaggcggcggcggcggcggcggaggaggaggcgaccgagaagatgcccgccctgcgccccgctctgctgtgggcgctgctggcgctctggctgtgctgcgcggcccccgcgcatgcattgcagtgtcgagatggctatgaaccctgtgtaaatgaaggaatgtgtgttacctaccacaatggcacaggatactgcaaatgtccagaaggcttcttgggggaatattgtcaacatcgagacccctgtgagaagaaccgctgccagaatggtgggacttgtgtggcccaggccatgctggggaaagccacgtgccgatgtgcctcagggtttacaggagaggactgccagtactcaacatctcatccatgctttgtgtctcgaccctgcctgaatggcggcacatgccatatgctcagccgggatacctatgagtgcacctgtcaagtcgggtttacaggtaaggagtgccaatggacggatgcctgcctgtctcatccctgtgcaaatggaagtacctgtaccactgtggccaaccagttctcctgcaaatgcctcacaggcttcacagggcagaaatgtgagactgatgtcaatgagtgtgacattccaggacactgccagcatggtggcacctgcctcaacctgcctggttcctaccagtgccagtgccctcagggcttcacaggccagtactgtgacagcctgtatgtgccctgtgcaccctcaccttgtgtcaatggaggcacctgtcggcagactggtgacttcacttttgagtgcaactgccttccaggttttgaagggagcacctgtgagaggaatattgatgactgccctaaccacaggtgtcagaatggaggggtttgtgtggatggggtcaacacttacaactgccgctgtcccccacaatggacaggacagttctgcacagaggatgtggatgaatgcctgctgcagcccaatgcctgtcaaaatgggggcacctgtgccaaccgcaatggaggctatggctgtgtatgtgtcaacggctggagtggagatgactgcagtgagaacattgatgattgtgccttcgcctcctgtactccaggctccacctgcatcgaccgtgtggcctccttctcttgcatgtgcccagaggggaaggcaggtctcctgtgtcatctggatgatgcatgcatcagcaatccttgccacaagggggcactgtgtgacaccaaccccctaaatgggcaatatatttgcacctgcccacaaggctacaaaggggctgactgcacagaagatgtggatgaatgtgccatggccaatagcaatccttgtgagcatgcaggaaaatgtgtgaacacggatggcgccttccactgtgagtgtctgaagggttatgcaggacctcgttgtgagatggacatcaatgagtgccattcagacccctgccagaatgatgctacctgtctggataagattggaggcttcacatgtctgtgcatgccaggtttcaaaggtgtgcattgtgaattagaaataaatgaatgtcagagcaacccttgtgtgaacaatgggcagtgtgtggataaagtcaatcgtttccagtgcctgtgtcctcctggtttcactgggccagtttgccagattgatattgatgactgttccagtactccgtgtctgaatggggcaaagtgtatcgatcacccgaatggctatgaatgccagtgtgccacaggtttcactggtgtgttgtgtgaggagaacattgacaactgtgaccccgatccttgccaccatggtcagtgtcaggatggtattgattcctacacctgcatctgcaatcccgggtacatgggcgccatctgcagtgaccagattgatgaatgttacagcagcccttgcctgaacgatggtcgctgcattgacctggtcaatggctaccagtgcaactgccagccaggcacgtcaggggttaattgtgaaattaattttgatgactgtgcaagtaacccttgtatccatggaatctgtatggatggcattaatcgctacagttgtgtctgctcaccaggattcacagggcagagatgtaacattgacattgatgagtgtgcctccaatccctgtcgcaagggtgcaacatgtatcaacggtgtgaatggtttccgctgtatatgccccgagggaccccatcaccccagctgctactcacaggtgaacgaatgcctgagcaatccctgcatccatggaaactgtactggaggtctcagtggatataagtgtctctgtgatgcaggctgggttggcatcaactgtgaagtggacaaaaatgaatgcctttcgaatccatgccagaatggaggaacttgtgacaatctggtgaatggatacaggtgtacttgcaagaagggctttaaaggctataactgccaggtgaatattgatgaatgtgcctcaaatccatgcctgaaccaaggaacctgctttgatgacataagtggctacacttgccactgtgtgctgccatacacaggcaagaattgtcagacagtattggctccctgttccccaaacccttgtgagaatgctgctgtttgcaaagagtcaccaaattttgagagttatacttgcttgtgtgctcctggctggcaaggtcagcggtgtaccattgacattgacgagtgtatctccaagccctgcatgaaccatggtctctgccataacacccagggcagctacatgtgtgaatgtccaccaggcttcagtggtatggactgtgaggaggacattgatgactgccttgccaatccttgccagaatggaggttcctgtatggatggagtgaatactttctcctgcctctgccttccgggtttcactggggataagtgccagacagacatgaatgagtgtctgagtgaaccctgtaagaatggagggacctgctctgactacgtcaacagttacacttgcaagtgccaggcaggatttgatggagtccattgtgagaacaacatcaatgagtgcactgagagctcctgtttcaatggtggcacatgtgttgatgggattaactccttctcttgcttgtgccctgtgggtttcactggatccttctgcctccatgagatcaatgaatgcagctctcatccatgcctgaatgagggaacgtgtgttgatggcctgggtacctaccgctgcagctgccccctgggctacactgggaaaaactgtcagaccctggtgaatctctgcagtcggtctccatgtaaaaacaaaggtacttgcgttcagaaaaaagcagagtcccagtgcctatgtccatctggatgggctggtgcctattgtgacgtgcccaatgtctcttgtgacatagcagcctccaggagaggtgtgcttgttgaacacttgtgccagcactcaggtgtctgcatcaatgctggcaacacgcattactgtcagtgccccctgggctatactgggagctactgtgaggagcaactcgatgagtgtgcgtccaacccctgccagcacggggcaacatgcagtgacttcattggtggatacagatgcgagtgtgtcccaggctatcagggtgtcaactgtgagtatgaagtggatgagtgccagaatcagccctgccagaatggaggcacctgtattgaccttgtgaaccatttcaagtgctcttgcccaccaggcactcggggcctactctgtgaagagaacattgatgactgtgcccggggtccccattgccttaatggtggtcagtgcatggataggattggaggctacagttgtcgctgcttgcctggctttgctggggagcgttgtgagggagacatcaacgagtgcctctccaacccctgcagctctgagggcagcctggactgtatacagctcaccaatgactacctgtgtgtttgccgtagtgcctttactggccggcactgtgaaaccttcgtcgatgtgtgtccccagatgccctgcctgaatggagggacttgtgctgtggccagtaacatgcctgatggtttcatttgccgttgtcccccgggattttccggggcaaggtgccagagcagctgtggacaagtgaaatgtaggaagggggagcagtgtgtgcacaccgcctctggaccccgctgcttctgccccagtccccgggactgcgagtcaggctgtgccagtagcccctgccagcacgggggcagctgccaccctcagcgccagcctccttattactcctgccagtgtgccccaccattctcgggtagccgctgtgaactctacacggcaccccccagcacccctcctgccacctgtctgagccagtattgtgccgacaaagctcgggatggcgtctgtgatgaggcctgcaacagccatgcctgccagtgggatgggggtgactgttctctcaccatggagaacccctgggccaactgctcctccccacttccctgctgggattatatcaacaaccagtgtgatgagctgtgcaacacggtcgagtgcctgtttgacaactttgaatgccaggggaacagcaagacatgcaagtatgacaaatactgtgcagaccacttcaaagacaaccactgtnaccaggggtgcaacagtgaggagtgtggttgggatgggctggactgtgctgctgaccaacctgagaacctggcagaaggtaccctggttattgtggtattgatgccacctgaacaactgctccaggatgctcgcagcttcttgcgggcactgggtaccctgctccacaccaacctgcgcattaagcgggactcccagggggaactcatggtgtacccctattatggtgagaagtcagctgctatgaagaaacagaggatgacacgcagatcccttcctggtgaacaagaacaggaggtggctggctctaaagtctttctggaaattgacaaccgccagtgtgttcaagactcagaccactgcttcaagaacacggatgcagcagcagctctcctggcctctcacgccatacaggggaccctgtcataccctcttgtgtctgtcgtcagtgaatccctgactccagaacgcactcagctcctctatctccttgctgttgctgttgtcatcattctgtttattattctgctgggggtaatcatggcaaaacgaaagcgtaagcatggctctctctggctgcctgaaggtttcactcttcgccgagatgcaagcaatcacaagcgtcgtgagccagtgggacaggatgctgtggggctgaaaaatctctcagtgcaagtctcagaagctaacctaattggtactggaacaagtgaacactgggtcgatgatgaagggccccagccaaagaaagtaaaggctgaagatgaggccttactctcagaagaagatgaccccattgatcgacggccatggacacagcagcaccttgaagctgcagacatccgtaggacaccatcgctggctctcacccctcctcaggcagagcaggaggtggatgtgttagatgtgaatgtccgtggcccagatggctgcaccccattgatgttggcttctctccgaggaggcagctcagatttgagtgatgaagatgaagatgcagaggactcttctgctaacatcatcacagacttggtctaccagggtgccagcctccaggcccagacagaccggactggtgagatggccctgcaccttgcagcccgctactcacgggctgatgctgccaagcgtctcctggatgcaggtgcagatgccaatgcccaggacaacatgggccgctgtccactccatgctgcagtggcagctgatgcccaaggtgtcttccagattctgattcgcaaccgagtaactgatctagatgccaggatgaatgatggtactacacccctgatcctggctgcccgcctggctgtggagggaatggtggcagaactgatcaactgccaagcggatgtgaatgcagtggatgaccatggaaaatctgctcttcactgggcagctgctgtcaataatgtggaggcaactcttttgttgttgaaaaatggggccaaccgagacatgcaggacaacaaggaagagacacctctgtttcttgctgcccgggaggggagctatgaagcagccaagatcctgttagaccattttgccaatcgagacatcacagaccatatggatcgtcttccccgggatgtggctcgggatcgcatgcaccatgacattgtgcgccttctggatgaatacaatgtgaccccaagccctccaggcaccgtgttgacttctgctctctcacctgtcatctgtgggcccaacagatctttcctcagcctgaagcacaccccaatgggcaagaagtctagacggcccagtgccaagagtaccatgcctactagcctccctaaccttgccaaggaggcaaaggatgccaagggtagtaggaggaagaagtctctgagtgagaaggtccaactgtctgagagttcagtaactttatcccctgttgattccctagaatctcctcacacgtatgtttccgacaccacatcctctccaatgattacatccctgggatcttacaggcctcacccaaccctatgttggccactgccgcccctcctgccccagtccatgcccagcatgcactatctttttctaaccttcatgaaatgcagcctttggcacatggggccagcactgtgcttccctcagtgagccagttgctatcccaccaccacattgtgtctccaggcagtggcagtgctggaagcttgagtaggctccatccagtcccagtcccagcagattggatgaaccgcatggaggtgaatgagacccagtacaatgagatgtttggtatggtcctggctccagctgagggcacccatcctggcatagctccccagagcaggccacctgaagggaagcacataaccacccctcgggagcccttgccccccattgtgactttccagctcatccctaaaggcagtattgcccaaccagcgggggctccccagcctcagtccacctgccctccagctgttgcgggccccctgcccaccatgtaccagattccagaaatggcccgtttgcccagtgtggctttccccactgccatgatgccccagcaggacgggcaggtagctcagaccattctcccagcctatcatcctttcccagcctctgtgggcaagtaccccacacccccttcacagcacagttatgcttcctcaaatgctgctgagcgaacacccagtcacagtggtcacctccagggtgagcatccctacctgacaccatccccagagtctcctgaccagtggtcaagttcatcaccccactctgcttctgactggtcagatgtgaccaccagccctacccctgggggtgctggaggaggtcagcggggacctgggacacacatgtctgagccaccacacaacaacatgcaggtttatgcgtgagagagtccacctccagtgtagagacataactgacttttgtaaatgctgctgaggaacaaatgaaggtcatccgggagagaaatgaagaaatctctggagccagcttctagaggtaggaaagagaagatgttcttattcagataatgcaagagaagcaattcgtcagtttcactgggtatctgcaaggcttattgattattctaatctaataagacaagtttgtggaaatgcaagatgaatacaagccttgggtccatgtttactctcttctatttggagaataagatggatgcttattgaagcccagacattcttgcagcttggactgcattttaagccctgcaggcttctgccatatccatgagaagattctacactagcgtcctgttgggaattatgccctggaattctgcctgaattgacctacgcatctcctcctccttggacatggtgttttcataatctggacacttggaaacgaaccgtcctccgtaagctacgcaactaccacagtatacatggtaaagacctctcgctacgtacacacatgtaagtaaagac

SEQ ID NO: 446643 - DNA, 4267 bp, Homo sapiens
agcgggttgcacacccgagaaagtttcagccaaacttcgggcggcggctgaggcggcggccgaggagcggcggactcggggcgcggggagtcgaggcatttgcgcctgggcttcggagcgtagcgccaggcctgagcctttgaagcaggaggaggggaggagagagtggggctcctctatcgggaccccctccccatgtggatctgcccaggcggcggcggcggcggcggaggaggaggcgaccgagaagatgcccgccctgcgccccgctctgctgtgggcgctgctggcgctctggctgtgctgcgcggcccccgcgcatgcattgcagtgtcgagatggctatgaaccctgtgtaaatgaaggaatgtgtgttacctaccacaatggcacaggatactgcaaatgtccagaaggcttcttgggggaatattgtcaacatcgagacccctgtgagaagaaccgctgccagaatggtgggacttgtgtggcccaggccatgctggggaaagccacgtgccgatgtgcctcagggtttacaggagaggactgccagtactcaacatctcatccatgctttgtgtctcgaccctgcctgaatggcggcacatgccatatgctcagccgggatacctatgagtgcacctgtcaagtcgggtttacaggtaaggagtgccaatggacggatgcctgcctgtctcatccctgtgcaaatggaagtacctgtaccactgtggccaaccagttctcctgcaaatgcctcacaggcttcacagggcagaaatgtgagactgatgtcaatgagtgtgacattccaggacactgccagcatggtggcacctgcctcaacctgcctggttcctaccagtgccagtgccctcagggcttcacaggccagtactgtgacagcctgtatgtgccctgtgcaccctcaccttgtgtcaatggaggcacctgtcggcagactggtgacttcacttttgagtgcaactgccttccaggttttgaagggagcacctgtgagaggaatattgatgactgccctaaccacaggtgtcagaatggaggggtttgtgtggatggggtcaacacttacaactgccgctgtcccccacaatggacaggacagttctgcacagaggatgtggatgaatgcctgctgcagcccaatgcctgtcaaaatgggggcacctgtgccaaccgcaatggaggctatggctgtgtatgtgtcaacggctggagtggagatgactgcagtgagaacattgatgattgtgccttcgcctcctgtactccaggctccacctgcatcgaccgtgtggcctccttctcttgcatgtgcccagaggggaaggcaggtctcctgtgtcatctggatgatgcatgcatcagcaatccttgccacaagggggcactgtgtgacaccaaccccctaaatgggcaatatatttgcacctgcccacaaggctacaaaggggctgactgcacagaagatgtggatgaatgtgccatggccaatagcaatccttgtgagcatgcaggaaaatgtgtgaacacggatggcgccttccactgtgagtgtctgaagggttatgcaggacctcgttgtgagatggacatcaatgagtgccattcagacccctgccagaatgatgctacctgtctggataagattggaggcttcacatgtctgtgcatgccaggtttcaaaggtgtgcattgtgaattagaaataaatgaatgtcagagcaacccttgtgtgaacaatgggcagtgtgtggataaagtcaatcgtttccagtgcctgtgtcctcctggtttcactgggccagtttgccagattgatattgatgactgttccagtactccgtgtctgaatggggcaaagtgtatcgatcacccgaatggctatgaatgccagtgtgccacaggtttcactggtgtgttgtgtgaggagaacattgacaactgtgaccccgatccttgccaccatggtcagtgtcaggatggtattgattcctacacctgcatctgcaatcccgggtacatgggcgccatctgcagtgaccagattgatgaatgttacagcagcccttgcctgaacgatggtcgctgcattgacctggtcaatggctaccagtgcaactgccagccaggcacgtcaggggttaattgtgaaattaattttgatgactgtgcaagtaacccttgtatccatggaatctgtatggatggcattaatcgctacagttgtgtctgctcaccaggattcacagggcagagatgtaacattgacattgatgagtgtgcctccaatccctgtcgcaagggtgcaacatgtatcaacggtgtgaatggtttccgctgtatatgccccgagggaccccatcaccccagctgctactcacaggtgaacgaatgcctgagcaatccctgcatccatggaaactgtactggaggtctcagtggatataagtgtctctgtgatgcaggctgggttggcatcaactgtgaagtggacaaaaatgaatgcctttcgaatccatgccagaatggaggaacttgtgacaatctggtgaatggatacaggtgtacttgcaagaagggctttaaaggctataactgccaggtgaatattgatgaatgtgcctcaaatccatgcctgaaccaaggaacctgctttgatgacataagtggctacacttgccactgtgtgctgccatacacaggcaagaattgtcagacagtattggctccctgttccccaaacccttgtgagaatgctgctgtttgcaaagagtcaccaaattttgagagttatacttgcttgtgtgctcctggctggcaaggtcagcggtgtaccattgacattgacgagtgtatctccaagccctgcatgaaccatggtctctgccataacacccagggcagctacatgtgtgaatgtccaccaggcttcagtggtatggactgtgaggaggacattgatgactgccttgccaatccttgccagaatggaggttcctgtatggatggagtgaatactttctcctgcctctgccttccgggtttcactggggataagtgccagacagacatgaatgagtgtctgagtgaaccctgtaagaatggagggacctgctctgactacgtcaacagttacacttgcaagtgccaggcaggatttgatggagtccattgtgagaacaacatcaatgagtgcactgagagctcctgtttcaatggtggcacatgtgttgatgggattaactccttctcttgcttgtgccctgtgggtttcactggatccttctgcctccatgagatcaatgaatgcagctctcatccatgcctgaatgagggaacgtgtgttgatggcctgggtacctaccgctgcagctgccccctgggctacactgggaaaaactgtcagaccctggtgaatctctgcagtcggtctccatgtaaaaacaaaggtacttgcgttcagaaaaaagcagagtcccagtgcctatgtccatctggatgggctggtgcctattgtgacgtgcccaatgtctcttgtgacatagcagcctccaggagaggtgtgcttgttgaacacttgtgccagcactcaggtgtctgcatcaatgctggcaacacgcattactgtcagtgccccctgggctatactgggagctactgtgaggagcaactcgatgagtgtgcgtccaacccctgccagcacggggcaacatgcagtgacttcattggtggatacagatgcgagtgtgtcccaggctatcagggtgtcaactgtgagtatgaagtggatgagtgccagaatcagccctgccagaatggaggcacctgtattgaccttgtgaaccatttcaagtgctcttgcccaccaggcactcggggtatgaaatcatccttatccattttccatccagggcattgtcttaagttataaatccattcttagtgttcaggggattttataaaattaaagataggaagactagcttcattccaagcatttagttctacatcctagtaattcaagccattttattctcccatctcttgctagctctgatgttgtggtttatgttgtcagttttatctggttgtttggcatcttgatattccatgaaacacagaatatggaagggatacaacattagcataacattaaaaaattagcctggtcagtaagatttcttgttgcttcacagaaaagcaactaatggcctctaaaataaacaatttacatttacct

SEQ ID NO: 446644 - DNA, 1257 bp, Homo sapiens
agcgggttgcacacccgagaaagtttcagccaaacttcgggcggcggctgaggcggcggccgaggagcggcggactcggggcgcggggagtcgaggcatttgcgcctgggcttcggagcgtagcgccaggcctgagcctttgaagcaggaggaggggaggagagagtggggctcctctatcgggaccccctccccatgtggatctgcccaggcggcggcggcggcggcggaggaggaggcgaccgagaagatgcccgccctgcgccccgctctgctgtgggcgctgctggcgctctggctgtgctgcgcggcccccgcgcatgcattgcagtgtcgagatggctatgaaccctgtgtaaatgaaggaatgtgtgttacctaccacaatggcacaggatactgcaaatgtccagaaggcttcttgggggaatattgtcaacatcgagacccctgtgagaagaaccgctgccagaatggtgggacttgtgtggcccaggccatgctggggaaagccacgtgccgatgtgcctcagggtttacaggagaggactgccagtactcaacatctcatccatgctttgtgtctcgaccctgcctgaatggcggcacatgccatatgctcagccgggatacctatgagtgcacctgtcaagtcgggtttacaggtaaggagtgccaatggacggatgcctgcctgtctcatccctgtgcaaatggaagtacctgtaccactgtggccaaccagttctcctgcaaatgcctcacaggcttcacagggcagaaatgtgagactgatgtcaatgagtgtgacattccaggacactgccagcatggtggcacctgcctcaacctgcctggttcctaccagtgccagtgccctcagggcttcacaggccagtactgtgacagcctgtatgtgccctgtgcaccctcaccttgtgtcaatggaggcacctgtcggcagactggtgacttcacttttgagtgcaactgccttccagaaacagtgagaaataagaggaacagagctctgggaaagggacaggcaagtctggaatggaaaagaacacgatgagaattagacactggaaaatatgtatgtgtggttaataaagtgctttaaactgaattgacattaacagtaggtgatcaactttcctatgtgcttgtgcttttgcttttgatggagtaattcattgttttcttatccacctaaatgcacccagctgcccttgattttctctgggctactggcct

SEQ ID NO: 446645 - DNA, 525 bp, Homo sapiens
gtttcactggtgtgttgtgtgaggagaacattgacaactgtgaccccgatccttgccaccatggtcagtgtcaggatggtattgattcctacacctgcatctgcaatcccgggtacatgggcgccatctgcagtgaccagattgatgaatgttacagcagcccttgcctgaacgatggtcgctgcattgacctggtcaatggctaccagtgcaactgccagccaggcacgtcaggtaagcccactctgtttatgtttggtatggggttttcactgtttctcaaatctgtttacacagatgtttcagactgttggcatatgctcagatacctaaaaaacagtcctgattctgagaagcacagccaaagccacaaacataaatgtctcaaggcaaatggccctagccagtggagaagtcagagacaatagctctgccaatctgatgattttgtgtgtgtgtttgtgtgtgttttgttaaatagaggcataccacttcaaaaattaaaattaatgatttaaaattgaa

SEQ ID NO: 446646 - DNA, 398 bp, Homo sapiens
ttatttattgagcatgtatttatttattcatgcaacaaatatttattgattgatcatgatagaatcttgggcacaaagataacaagactttccctctcctccaggaatctacactgtagcctcagctctgatgcccttgtttcttcactgagtttcattattttccttcatccaggtgactctcttttctgtactttctcctcttctagattctgattcgcaaccgagtaactgatctagatgccaggatgaatgatggtactacacccctgatcctggctgcccgcctggctgtggagggaatggtggcagaactgatcaactgccaagcggatgtgaatgcagtggatgaccatggtagggatgaaaggcagggatttggattcttacctgcaaag

SEQ ID NO: 446647 - DNA, 362 bp, Homo sapiens
gcagaatagccatagcatgactgtgttacctgaaagacttgatagcacattgttactttttcccctctagaagaaatagtaggccaggcacggtggctcaccctgtaatcccagcactttgggaggccgaggcaggcggatcacgaggtcaggagatcacagccatcctggctaacatggtgaaaccccgtctctactaaaaatataaaaaattagccgggcgtcgtggtgggtgcctgtagtcccagctactcgggaggcggaggcaggagaatggcatgaacctgggaggtggaggttgcagtgagccgagatcgcatcactgcactccagcctgagagtcagagtgagactccgtctca

SEQ ID NO: 446648 - DNA, 478 bp, Homo sapiens
atgctcgcagcttcttgcgggcactgggtaccctgctccacaccaacctgcgcattaagcgggactcccagggggaactcatggtgtacccctattatggtgagaagtcagctgctatgaagaaacagaggatgacacgcagatcccttcctggtgaacaagaacaggaggtggctgggtaggtgtttggtttctgaacttcaaggctaattttatgaagcctagcactttgacatatagcacaagtcataactcaacctatagaaatgcaaagatcagaaaaatagaatggcccaccacttaagataaacccgttaccccagtacttacgtttaaatgtaaagatatgccttcgtcttggctgaaaagtgggcaggggtacacaggaggcagaatgtctggaaggcctcctcagatgccagaatccataaccttttgccagagttgcctcaaatccctttattagtgacattccttt

SEQ ID NO: 446649 - DNA, 9959 bp, Homo sapiens
  misc_feature (4805)..(4805): n is a, c, g, or t
agcgggttgcacacccgagaaagtttcagccaaacttcgggcggcggctgaggcggcggccgaggagcggcggactcggggcgcggggagtcgaggcatttgcgcctgggcttcggagcgtagcgccaggcctgagcctttgaagcaggaggaggggaggagagagtggggctcctctatcgggaccccctccccatgtggatctgcccaggcggcggcggcggcggcggaggaggaggcgaccgagaagatgcccgccctgcgccccgctctgctgtgggcgctgctggcgctctggctgtgctgcgcggcccccgcgcatgcattgcagtgtcgagatggctatgaaccctgtgtaaatgaaggaatgtgtgttacctaccacaatggcacaggatactgcaaatgtccagaaggcttcttgggggaatattgtcaacatcgagacccctgtgagaagaaccgctgccagaatggtgggacttgtgtggcccaggccatgctggggaaagccacgtgccgatgtgcctcagggtttacaggagaggactgccagtactcaacatctcatccatgctttgtgtctcgaccctgcctgaatggcggcacatgccatatgctcagccgggatacctatgagtgcacctgtcaagtcgggtttacaggtaaggagtgccaatggacggatgcctgcctgtctcatccctgtgcaaatggaagtacctgtaccactgtggccaaccagttctcctgcaaatgcctcacaggcttcacagggcagaaatgtgagactgatgtcaatgagtgtgacattccaggacactgccagcatggtggcacctgcctcaacctgcctggttcctaccagtgccagtgccctcagggcttcacaggccagtactgtgacagcctgtatgtgccctgtgcaccctcaccttgtgtcaatggaggcacctgtcggcagactggtgacttcacttttgagtgcaactgccttccaggttttgaagggagcacctgtgagaggaatattgatgactgccctaaccacaggtgtcagaatggaggggtttgtgtggatggggtcaacacttacaactgccgctgtcccccacaatggacaggacagttctgcacagaggatgtggatgaatgcctgctgcagcccaatgcctgtcaaaatgggggcacctgtgccaaccgcaatggaggctatggctgtgtatgtgtcaacggctggagtggagatgactgcagtgagaacattgatgattgtgccttcgcctcctgtactccaggctccacctgcatcgaccgtgtggcctccttctcttgcatgtgcccagaggggaaggcaggtctcctgtgtcatctggatgatgcatgcatcagcaatccttgccacaagggggcactgtgtgacaccaaccccctaaatgggcaatatatttgcacctgcccacaaggctacaaaggggctgactgcacagaagatgtggatgaatgtgccatggccaatagcaatccttgtgagcatgcaggaaaatgtgtgaacacggatggcgccttccactgtgagtgtctgaagggttatgcaggacctcgttgtgagatggacatcaatgagtgccattcagacccctgccagaatgatgctacctgtctggataagattggaggcttcacatgtctgtgcatgccaggtttcaaaggtgtgcattgtgaattagaaataaatgaatgtcagagcaacccttgtgtgaacaatgggcagtgtgtggataaagtcaatcgtttccagtgcctgtgtcctcctggtttcactgggccagtttgccagattgatattgatgactgttccagtactccgtgtctgaatggggcaaagtgtatcgatcacccgaatggctatgaatgccagtgtgccacaggtttcactggtgtgttgtgtgaggagaacattgacaactgtgaccccgatccttgccaccatggtcagtgtcaggatggtattgattcctacacctgcatctgcaatcccgggtacatgggcgccatctgcagtgaccagattgatgaatgttacagcagcccttgcctgaacgatggtcgctgcattgacctggtcaatggctaccagtgcaactgccagccaggcacgtcaggggttaattgtgaaattaattttgatgactgtgcaagtaacccttgtatccatggaatctgtatggatggcattaatcgctacagttgtgtctgctcaccaggattcacagggcagagatgtaacattgacattgatgagtgtgcctccaatccctgtcgcaagggtgcaacatgtatcaacggtgtgaatggtttccgctgtatatgccccgagggaccccatcaccccagctgctactcacaggtgaacgaatgcctgagcaatccctgcatccatggaaactgtactggaggtctcagtggatataagtgtctctgtgatgcaggctgggttggcatcaactgtgaagtggacaaaaatgaatgcctttcgaatccatgccagaatggaggaacttgtgacaatctggtgaatggatacaggtgtacttgcaagaagggctttaaaggctataactgccaggtgaatattgatgaatgtgcctcaaatccatgcctgaaccaaggaacctgctttgatgacataagtggctacacttgccactgtgtgctgccatacacaggcaagaattgtcagacagtattggctccctgttccccaaacccttgtgagaatgctgctgtttgcaaagagtcaccaaattttgagagttatacttgcttgtgtgctcctggctggcaaggtcagcggtgtaccattgacattgacgagtgtatctccaagccctgcatgaaccatggtctctgccataacacccagggcagctacatgtgtgaatgtccaccaggcttcagtggtatggactgtgaggaggacattgatgactgccttgccaatccttgccagaatggaggttcctgtatggatggagtgaatactttctcctgcctctgccttccgggtttcactggggataagtgccagacagacatgaatgagtgtctgagtgaaccctgtaagaatggagggacctgctctgactacgtcaacagttacacttgcaagtgccaggcaggatttgatggagtccattgtgagaacaacatcaatgagtgcactgagagctcctgtttcaatggtggcacatgtgttgatgggattaactccttctcttgcttgtgccctgtgggtttcactggatccttctgcctccatgagatcaatgaatgcagctctcatccatgcctgaatgagggaacgtgtgttgatggcctgggtacctaccgctgcagctgccccctgggctacactgggaaaaactgtcagaccctggtgaatctctgcagtcggtctccatgtaaaaacaaaggtacttgcgttcagaaaaaagcagagtcccagtgcctatgtccatctggatgggctggtgcctattgtgacgtgcccaatgtctcttgtgacatagcagcctccaggagaggtgtgcttgttgaacacttgtgccagcactcaggtgtctgcatcaatgctggcaacacgcattactgtcagtgccccctgggctatactgggagctactgtgaggagcaactcgatgagtgtgcgtccaacccctgccagcacggggcaacatgcagtgacttcattggtggatacagatgcgagtgtgtcccaggctatcagggtgtcaactgtgagtatgaagtggatgagtgccagaatcagccctgccagaatggaggcacctgtattgaccttgtgaaccatttcaagtgctcttgcccaccaggcactcggggcctactctgtgaagagaacattgatgactgtgcccggggtccccattgccttaatggtggtcagtgcatggataggattggaggctacagttgtcgctgcttgcctggctttgctggggagcgttgtgagggagacatcaacgagtgcctctccaacccctgcagctctgagggcagcctggactgtatacagctcaccaatgactacctgtgtgtttgccgtagtgcctttactggccggcactgtgaaaccttcgtcgatgtgtgtccccagatgccctgcctgaatggagggacttgtgctgtggccagtaacatgcctgatggtttcatttgccgttgtcccccgggattttccggggcaaggtgccagagcagctgtggacaagtgaaatgtaggaagggggagcagtgtgtgcacaccgcctctggaccccgctgcttctgccccagtccccgggactgcgagtcaggctgtgccagtagcccctgccagcacgggggcagctgccaccctcagcgccagcctccttattactcctgccagtgtgccccaccattctcgggtagccgctgtgaactctacacggcaccccccagcacccctcctgccacctgtctgagccagtattgtgccgacaaagctcgggatggcgtctgtgatgaggcctgcaacagccatgcctgccagtgggatgggggtgactgttctctcaccatggagaacccctgggccaactgctcctccccacttccctgctgggattatatcaacaaccagtgtgatgagctgtgcaacacggtcgagtgcctgtttgacaactttgaatgccaggggaacagcaagacatgcaagtatgacaaatactgtgcagaccacttcaaagacaaccactgtnaccaggggtgcaacagtgaggagtgtggttgggatgggctggactgtgctgctgaccaacctgagaacctggcagaaggtaccctggttattgtggtattgatgccacctgaacaactgctccaggatgctcgcagcttcttgcgggcactgggtaccctgctccacaccaacctgcgcattaagcgggactcccagggggaactcatggtgtacccctattatggtgagaagtcagctgctatgaagaaacagaggatgacacgcagatcccttcctggtgaacaagaacaggaggtggctggctctaaagtctttctggaaattgacaaccgccagtgtgttcaagactcagaccactgcttcaagaacacggatgcagcagcagctctcctggcctctcacgccatacaggggaccctgtcataccctcttgtgtctgtcgtcagtgaatccctgactccagaacgcactcagctcctctatctccttgctgttgctgttgtcatcattctgtttattattctgctgggggtaatcatggcaaaacgaaagcgtaagcatggctctctctggctgcctgaaggtttcactcttcgccgagatgcaagcaatcacaagcgtcgtgagccagtgggacaggatgctgtggggctgaaaaatctctcagtgcaagtctcagaagctaacctaattggtactggaacaagtgaacactgggtcgatgatgaagggccccagccaaagaaagtaaaggctgaagatgaggccttactctcagaagaagatgaccccattgatcgacggccatggacacagcagcaccttgaagctgcagacatccgtaggacaccatcgctggctctcacccctcctcaggcagagcaggaggtggatgtgttagatgtgaatgtccgtggcccagatggctgcaccccattgatgttggcttctctccgaggaggcagctcagatttgagtgatgaagatgaagatgcagaggactcttctgctaacatcatcacagacttggtctaccagggtgccagcctccaggcccagacagaccggactggtgagatggccctgcaccttgcagcccgctactcacgggctgatgctgccaagcgtctcctggatgcaggtgcagatgccaatgcccaggacaacatgggccgctgtccactccatgctgcagtggcagctgatgcccaaggtgtcttccagattctgattcgcaaccgagtaactgatctagatgccaggatgaatgatggtactacacccctgatcctggctgcccgcctggctgtggagggaatggtggcagaactgatcaactgccaagcggatgtgaatgcagtggatgaccatggaaaatctgctcttcactgggcagctgctgtcaataatgtggaggcaactcttttgttgttgaaaaatggggccaaccgagacatgcaggacaacaaggaagagacacctctgtttcttgctgcccgggaggggagctatgaagcagccaagatcctgttagaccattttgccaatcgagacatcacagaccatatggatcgtcttccccgggatgtggctcgggatcgcatgcaccatgacattgtgcgccttctggatgaatacaatgtgaccccaagccctccaggcaccgtgttgacttctgctctctcacctgtcatctgtgggcccaacagatctttcctcagcctgaagcacaccccaatgggcaagaagtctagacggcccagtgccaagagtaccatgcctactagcctccctaaccttgccaaggaggcaaaggatgccaagggtagtaggaggaagaagtctctgagtgagaaggtccaactgtctgagagttcagtaactttatcccctgttgattccctagaatctcctcacacgtatgtttccgacaccacatcctctccaatgattacatccctgggatcttacaggcctcacccaaccctatgttggccactgccgcccctcctgccccagtccatgcccagcatgcactatctttttctaaccttcatgaaatgcagcctttggcacatggggccagcactgtgcttccctcagtgagccagttgctatcccaccaccacattgtgtctccaggcagtggcagtgctggaagcttgagtaggctccatccagtcccagtcccagcagattggatgaaccgcatggaggtgaatgagacccagtacaatgagatgtttggtatggtcctggctccagctgagggcacccatcctggcatagctccccagagcaggccacctgaagggaagcacataaccacccctcgggagcccttgccccccattgtgactttccagctcatccctaaaggcagtattgcccaaccagcgggggctccccagcctcagtccacctgccctccagctgttgcgggccccctgcccaccatgtaccagattccagaaatggcccgtttgcccagtgtggctttccccactgccatgatgccccagcaggacgggcaggtagctcagaccattctcccagcctatcatcctttcccagcctctgtgggcaagtaccccacacccccttcacagcacagttatgcttcctcaaatgctgctgagcgaacacccagtcacagtggtcacctccagggtgagcatccctacctgacaccatccccagagtctcctgaccagtggtcaagttcatcaccccactctgcttctgactggtcagatgtgaccaccagccctacccctgggggtgctggaggaggtcagcggggacctgggacacacatgtctgagccaccacacaacaacatgcaggtttatgcgtgagagagtccacctccagtgtagagacataactgacttttgtaaatgctgctgaggaacaaatgaaggtcatccgggagagaaatgaagaaatctctggagccagcttctagaggtaggaaagagaagatgttcttattcagataatgcaagagaagcaattcgtcagtttcactgggtatctgcaaggcttattgattattctaatctaataagacaagtttgtggaaatgcaagatgaatacaagccttgggtccatgtttactctcttctatttggagaataagatggatgcttattgaagcccagacattcttgcagcttggactgcattttaagccctgcaggcttctgccatatccatgagaagattctacactagcgtcctgttgggaattatgccctggaattctgcctgaattgacctacgcatctcctcctccttggacattcttttgtcttcatttggtgcttttggttttgcacctctccgtgattgtagccctaccagcatgttatagggcaagacctttgtgcttttgatcattctggcccatgaaagcaactttggtctcctttcccctcctgtcttcccggtatcccttggagtctcacaaggtttactttggtatggttctcagcacaaacctttcaagtatgttgtttctttggaaaatggacatactgtattgtgttctcctgcatatatcattcctggagagagaaggggagaagaatacttttcttcaacaaattttgggggcaggagatcccttcaagaggctgcaccttaatttttcttgtctgtgtgcaggtcttcatataaactttaccaggaagaagggtgtgagtttgttgtttttctgtgtatgggcctggtcagtgtaaagttttatccttgatagtctagttactatgaccctccccacttttttaaaaccagaaaaaggtttggaatgttggaatgaccaagagacaagttaactcgtgcaagagccagttacccacccacaggtccccctacttcctgccaagcattccattgactgcctgtatggaacacatttgtcccagatctgagcattctaggcctgtttcactcactcacccagcatatgaaactagtcttaactgttgagcctttcctttcatatccacagaagacactgtctcaaatgttgtacccttgccatttaggactgaactttccttagcccaagggacccagtgacagttgtcttccgtttgtcagatgatcagtctctactgattatcttgctgcttaaaggcctgctcaccaatctttctttcacaccgtgtggtccgtgttactggtatacccagtatgttctcactgaagacatggactttatatgttcaagtgcaggaattggaaagttggacttgttttctatgatccaaaacagccctataagaaggttggaaaaggaggaactatatagcagcctttgctattttctgctaccatttcttttcctctgaagcggccatgacattccctttggcaactaacgtagaaactcaacagaacattttcctttcctagagtcaccttttagatgataatggacaactatagacttgctcattgttcagactgattgcccctcacctgaatccactctctgtattcatgctcttggcaatttctttgactttcttttaagggcagaagcattttagttaattgtagataaagaatagttttcttcctcttctccttgggccagttaataattggtccatggctacactgcaacttccgtccagtgctgtgatgcccatgacacctgcaaaataagttctgcctgggcattttgtagatattaacaggtgaattcccgactcttttggtttgaatgacagttctcattccttctatggctgcaagtatgcatcagtgcttcccacttacctgatttgtctgtcggtggccccatatggaaaccctgcgtgtctgttggcataatagtttacaaatggttttttcagtcctatccaaatttattgaaccaacaaaaataattacttctgccctgagataagcagattaagtttgttcattctctgctttattctctccatgtggcaacattctgtcagcctctttcatagtgtgcaaacattttatcattctaaatggtgactctctgcccttggacccatttattattcacagatggggagaacctatctgcatggaccctcaccatcctctgtgcagcacacacagtgcagggagccagtggcgatggcgatgactttcttcccctgg

SEQ ID NO: 446650 - DNA, 607 bp, Homo sapiens
ctaacactgtcccccttctccacagggcagagatgtaacattgacattgatgagtgtgcctccaatccctgtcgcaagggtgcaacatgtatcaacggtgtgaatggtttccgctgtatatgccccgagggaccccatcaccccagctgctactcacaggtgaacgaatgcctgagcaatccctgcatccatggaaactgtactggaggtctcagtggatataagtgtctctgtgatgcaggctgggttggcatcaactgtgaagtggacaaaaatgaatgcctttcgaatccatgccagaatggaggaacttgtgacaatctggtgaatggatacaggtgtacttgcaagaagggctttaaaggctataactgccaggtgaatattgatgaatgtgcctcaaatccatgcctgaaccaaggaacctgctttgatgacataagtggctacacttgccactgtgtgctgccatacacaggtgggtcctggaggtaccagcagggaccagaggggatacttgaccttgctttgtcagtgcctgagtctcagtgcccaggtctgtggggctgtaatgctcctccgagggctcactcctcagttgtccttc

SEQ ID NO: 446651 - DNA, 9096 bp, Homo sapiens
  misc_feature (2475)..(2475): n is a, c, g, or t
ccagttcgacggagactctccagtacagtttccgctgtatatgccccgagggaccccatcaccccagctgctactcacaggtgaacgaatgcctgagcaatccctgcatccatggaaactgtactggaggtctcagtggatataagtgtctctgtgatgcaggctgggttggcatcaactgtgaagtggacaaaaatgaatgcctttcgaatccatgccagaatggaggaacttgtgacaatctggtgaatggatacaggtgtacttgcaagaagggctttaaaggctataactgccaggtgaatattgatgaatgtgcctcaaatccatgcctgaaccaaggaacctgctttgatgacataagtggctacacttgccactgtgtgctgccatacacaggcaagaattgtcagacagtattggctccctgttccccaaacccttgtgagaatgctgctgtttgcaaagagtcaccaaattttgagagttatacttgcttgtgtgctcctggctggcaaggtcagcggtgtaccattgacattgacgagtgtatctccaagccctgcatgaaccatggtctctgccataacacccagggcagctacatgtgtgaatgtccaccaggcttcagtggtatggactgtgaggaggacattgatgactgccttgccaatccttgccagaatggaggttcctgtatggatggagtgaatactttctcctgcctctgccttccgggtttcactggggataagtgccagacagacatgaatgagtgtctgagtgaaccctgtaagaatggagggacctgctctgactacgtcaacagttacacttgcaagtgccaggcaggatttgatggagtccattgtgagaacaacatcaatgagtgcactgagagctcctgtttcaatggtggcacatgtgttgatgggattaactccttctcttgcttgtgccctgtgggtttcactggatccttctgcctccatgagatcaatgaatgcagctctcatccatgcctgaatgagggaacgtgtgttgatggcctgggtacctaccgctgcagctgccccctgggctacactgggaaaaactgtcagaccctggtgaatctctgcagtcggtctccatgtaaaaacaaaggtacttgcgttcagaaaaaagcagagtcccagtgcctatgtccatctggatgggctggtgcctattgtgacgtgcccaatgtctcttgtgacatagcagcctccaggagaggtgtgcttgttgaacacttgtgccagcactcaggtgtctgcatcaatgctggcaacacgcattactgtcagtgccccctgggctatactgggagctactgtgaggagcaactcgatgagtgtgcgtccaacccctgccagcacggggcaacatgcagtgacttcattggtggatacagatgcgagtgtgtcccaggctatcagggtgtcaactgtgagtatgaagtggatgagtgccagaatcagccctgccagaatggaggcacctgtattgaccttgtgaaccatttcaagtgctcttgcccaccaggcactcggggcctactctgtgaagagaacattgatgactgtgcccggggtccccattgccttaatggtggtcagtgcatggataggattggaggctacagttgtcgctgcttgcctggctttgctggggagcgttgtgagggagacatcaacgagtgcctctccaacccctgcagctctgagggcagcctggactgtatacagctcaccaatgactacctgtgtgtttgccgtagtgcctttactggccggcactgtgaaaccttcgtcgatgtgtgtccccagatgccctgcctgaatggagggacttgtgctgtggccagtaacatgcctgatggtttcatttgccgttgtcccccgggattttccggggcaaggtgccagagcagctgtggacaagtgaaatgtaggaagggggagcagtgtgtgcacaccgcctctggaccccgctgcttctgccccagtccccgggactgcgagtcaggctgtgccagtagcccctgccagcacgggggcagctgccaccctcagcgccagcctccttattactcctgccagtgtgccccaccattctcgggtagccgctgtgaactctacacggcaccccccagcacccctcctgccacctgtctgagccagtattgtgccgacaaagctcgggatggcgtctgtgatgaggcctgcaacagccatgcctgccagtgggatgggggtgactgttctctcaccatggagaacccctgggccaactgctcctccccacttccctgctgggattatatcaacaaccagtgtgatgagctgtgcaacacggtcgagtgcctgtttgacaactttgaatgccaggggaacagcaagacatgcaagtatgacaaatactgtgcagaccacttcaaagacaaccactgtnaccaggggtgcaacagtgaggagtgtggttgggatgggctggactgtgctgctgaccaacctgagaacctggcagaaggtaccctggttattgtggtattgatgccacctgaacaactgctccaggatgctcgcagcttcttgcgggcactgggtaccctgctccacaccaacctgcgcattaagcgggactcccagggggaactcatggtgtacccctattatggtgagaagtcagctgctatgaagaaacagaggatgacacgcagatcccttcctggtgaacaagaacaggaggtggctggctctaaagtctttctggaaattgacaaccgccagtgtgttcaagactcagaccactgcttcaagaacacggatgcagcagcagctctcctggcctctcacgccatacaggggaccctgtcataccctcttgtgtctgtcgtcagtgaatccctgactccagaacgcactcagctcctctatctccttgctgttgctgttgtcatcattctgtttattattctgctgggggtaatcatggcaaaacgaaagcgtaagcatggctctctctggctgcctgaaggtttcactcttcgccgagatgcaagcaatcacaagcgtcgtgagccagtgggacaggatgctgtggggctgaaaaatctctcagtgcaagtctcagaagctaacctaattggtactggaacaagtgaacactgggtcgatgatgaagggccccagccaaagaaagtaaaggctgaagatgaggccttactctcagaagaagatgaccccattgatcgacggccatggacacagcagcaccttgaagctgcagacatccgtaggacaccatcgctggctctcacccctcctcaggcagagcaggaggtggatgtgttagatgtgaatgtccgtggcccagatggctgcaccccattgatgttggcttctctccgaggaggcagctcagatttgagtgatgaagatgaagatgcagaggactcttctgctaacatcatcacagacttggtctaccagggtgccagcctccaggcccagacagaccggactggtgagatggccctgcaccttgcagcccgctactcacgggctgatgctgccaagcgtctcctggatgcaggtgcagatgccaatgcccaggacaacatgggccgctgtccactccatgctgcagtggcagctgatgcccaaggtgtcttccagattctgattcgcaaccgagtaactgatctagatgccaggatgaatgatggtactacacccctgatcctggctgcccgcctggctgtggagggaatggtggcagaactgatcaactgccaagcggatgtgaatgcagtggatgaccatggaaaatctgctcttcactgggcagctgctgtcaataatgtggaggcaactcttttgttgttgaaaaatggggccaaccgagacatgcaggacaacaaggaagagacacctctgtttcttgctgcccgggaggggagctatgaagcagccaagatcctgttagaccattttgccaatcgagacatcacagaccatatggatcgtcttccccgggatgtggctcgggatcgcatgcaccatgacattgtgcgccttctggatgaatacaatgtgaccccaagccctccaggcaccgtgttgacttctgctctctcacctgtcatctgtgggcccaacagatctttcctcagcctgaagcacaccccaatgggcaagaagtctagacggcccagtgccaagagtaccatgcctactagcctccctaaccttgccaaggaggcaaaggatgccaagggtagtaggaggaagaagtctctgagtgagaaggtccaactgtctgagagttcagtaactttatcccctgttgattccctagaatctcctcacacgtatgtttccgacaccacatcctctccaatgattacatccctgggatcttacaggcctcacccaaccctatgttggccactgccgcccctcctgccccagtccatgcccagcatgcactatctttttctaaccttcatgaaatgcagcctttggcacatggggccagcactgtgcttccctcagtgagccagttgctatcccaccaccacattgtgtctccaggcagtggcagtgctggaagcttgagtaggctccatccagtcccagtcccagcagattggatgaaccgcatggaggtgaatgagacccagtacaatgagatgtttggtatggtcctggctccagctgagggcacccatcctggcatagctccccagagcaggccacctgaagggaagcacataaccacccctcgggagcccttgccccccattgtgactttccagctcatccctaaaggcagtattgcccaaccagcgggggctccccagcctcagtccacctgccctccagctgttgcgggccccctgcccaccatgtaccagattccagaaatggcccgtttgcccagtgtggctttccccactgccatgatgccccagcaggacgggcaggtagctcagaccattctcccagcctatcatcctttcccagcctctgtgggcaagtaccccacacccccttcacagcacagttatgcttcctcaaatgctgctgagcgaacacccagtcacagtggtcacctccagggtgagcatccctacctgacaccatccccagagtctcctgaccagtggtcaagttcatcaccccactctgcttctgactggtcagatgtgaccaccagccctacccctgggggtgctggaggaggtcagcggggacctgggacacacatgtctgagccaccacacaacaacatgcaggtttatgcgtgagagagtccacctccagtgtagagacataactgacttttgtaaatgctgctgaggaacaaatgaaggtcatccgggagagaaatgaagaaatctctggagccagcttctagaggtaggaaagagaagatgttcttattcagataatgcaagagaagcaattcgtcagtttcactgggtatctgcaaggcttattgattattctaatctaataagacaagtttgtggaaatgcaagatgaatacaagccttgggtccatgtttactctcttctatttggagaataagatggatgcttattgaagcccagacattcttgcagcttggactgcattttaagccctgcaggcttctgccatatccatgagaagattctacactagcgtcctgttgggaattatgccctggaattctgcctgaattgacctacgcatctcctcctccttggacattcttttgtcttcatttggtgcttttggttttgcacctctccgtgattgtagccctaccagcatgttatagggcaagacctttgtgcttttgatcattctggcccatgaaagcaactttggtctcctttcccctcctgtcttcccggtatcccttggagtctcacaaggtttactttggtatggttctcagcacaaacctttcaagtatgttgtttctttggaaaatggacatactgtattgtgttctcctgcatatatcattcctggagagagaaggggagaagaatacttttcttcaacaaattttgggggcaggagatcccttcaagaggctgcaccttaatttttcttgtctgtgtgcaggtcttcatataaactttaccaggaagaagggtgtgagtttgttgtttttctgtgtatgggcctggtcagtgtaaagttttatccttgatagtctagttactatgaccctccccacttttttaaaaccagaaaaaggtttggaatgttggaatgaccaagagacaagttaactcgtgcaagagccagttacccacccacaggtccccctacttcctgccaagcattccattgactgcctgtatggaacacatttgtcccagatctgagcattctaggcctgtttcactcactcacccagcatatgaaactagtcttaactgttgagcctttcctttcatatccacagaagacactgtctcaaatgttgtacccttgccatttaggactgaactttccttagcccaagggacccagtgacagttgtcttccgtttgtcagatgatcagtctctactgattatcttgctgcttaaaggcctgctcaccaatctttctttcacaccgtgtggtccgtgttactggtatacccagtatgttctcactgaagacatggactttatatgttcaagtgcaggaattggaaagttggacttgttttctatgatccaaaacagccctataagaaggttggaaaaggaggaactatatagcagcctttgctattttctgctaccatttcttttcctctgaagcggccatgacattccctttggcaactaacgtagaaactcaacagaacattttcctttcctagagtcaccttttagatgataatggacaactatagacttgctcattgttcagactgattgcccctcacctgaatccactctctgtattcatgctcttggcaatttctttgactttcttttaagggcagaagcattttagttaattgtagataaagaatagttttcttcctcttctccttgggccagttaataattggtccatggctacactgcaacttccgtccagtgctgtgatgcccatgacacctgcaaaataagttctgcctgggcattttgtagatattaacaggtgaattcccgactcttttggtttgaatgacagttctcattccttctatggctgcaagtatgcatcagtgcttcccacttacctgatttgtctgtcggtggccccatatggaaaccctgcgtgtctgttggcataatagtttacaaatggttttttcagtcctatccaaatttattgaaccaacaaaaataattacttctgccctgagataagcagattaagtttgttcattctctgctttattctctccatgtggcaacattctgtcagcctctttcatagtgtgcaaacattttatcattctaaatggtgactctctgcccttggacccatttattattcacagatggggagaacctatctgcatggacctctgtggaccacagcgtacctgcccctttctgccctcctgctccagccccacttctgaaagtatcagctactgatccagccactggatattttatatcctcccttttccttaagcacaatgtcagaccaaattgcttgtttctttttcttggactactttaatttggatcctttgggtttggagaaagggaatgtgaaagctgtcattacagacaacaggtttcagtgatgaggaggacaacactgcctttcaaactttttactgatctcttagattttaagaactcttgaattgtgtggtatctaataaaagggaaggtaagatggataatcactttctcatttgggttctgaattggagactcagtttttatgagacacatcttttatgccatgtatagatcctcccctgctatttttggtttatttttattgttataaatgctttctttctttgactcctcttctgcctgcctttggggataggtttttttgtttgtttatttgcttcctctgttttgttttaagcatcattttcttatgtgaggtggggaagggaaaggtatgagggaaagagagtctgagaattaaaatattttagtataagcaattggctgtgatgctcaaatccattgcatcctcttattgaatttgccaatttgtaatttttgcataataaagaaccaaaggtgtaatgttttgttgagaggtggtttagggattttggccctaaccaatacattgaatgtatgatgactatttgggaggacacatttatgtacccagaggcccccactaataagtggtactatggttacttccttgtgtacatttctcttaaaagtgatattatatctgtttgtatgagaaacccagtaaccaataaaatgaccgcatattcctgactaaacgtagtaaggaaaatgcacactttgtttttacttttccgtttcattctaaaggtagttaagatgaaatttatatgaaagcatttttatcacaaaataaaaaaggtttgccaagctcagtggtgttgtattttttattttccaatactgcatccatggcctggcagtgttacctcatgatgtcataatttgctgagagagcaaattttcttttctttctgaatcccacaaagcctagcaccaaacttctttttttcttcctttaattagatcataaataaatgatcctggggaaaaagcatctgtcaaataggaaacatcacaaaactgagcactcttctgtgcactagccatagctggtgacaaacagatggttgctcagggacaaggtgccttccaatggaaatgcgaagtagttgctatagcaagaattgggaactgggatataagtcataatattaattatgctgttatgtaaatgattggtttgtaacattccttaagtgaaatttgtgtagaacttaatatacaggattataaaataatattttgtgtataaatttgttataagttcacattcatacatttatttataaagtcagtgagatatttgaacatgaaaaaaaaaa

SEQ ID NO: 446652 - DNA, 10973 bp, Homo sapiens
  misc_feature (4805)..(4805): n is a, c, g, or t
agcgggttgcacacccgagaaagtttcagccaaacttcgggcggcggctgaggcggcggccgaggagcggcggactcggggcgcggggagtcgaggcatttgcgcctgggcttcggagcgtagcgccaggcctgagcctttgaagcaggaggaggggaggagagagtggggctcctctatcgggaccccctccccatgtggatctgcccaggcggcggcggcggcggcggaggaggaggcgaccgagaagatgcccgccctgcgccccgctctgctgtgggcgctgctggcgctctggctgtgctgcgcggcccccgcgcatgcattgcagtgtcgagatggctatgaaccctgtgtaaatgaaggaatgtgtgttacctaccacaatggcacaggatactgcaaatgtccagaaggcttcttgggggaatattgtcaacatcgagacccctgtgagaagaaccgctgccagaatggtgggacttgtgtggcccaggccatgctggggaaagccacgtgccgatgtgcctcagggtttacaggagaggactgccagtactcaacatctcatccatgctttgtgtctcgaccctgcctgaatggcggcacatgccatatgctcagccgggatacctatgagtgcacctgtcaagtcgggtttacaggtaaggagtgccaatggacggatgcctgcctgtctcatccctgtgcaaatggaagtacctgtaccactgtggccaaccagttctcctgcaaatgcctcacaggcttcacagggcagaaatgtgagactgatgtcaatgagtgtgacattccaggacactgccagcatggtggcacctgcctcaacctgcctggttcctaccagtgccagtgccctcagggcttcacaggccagtactgtgacagcctgtatgtgccctgtgcaccctcaccttgtgtcaatggaggcacctgtcggcagactggtgacttcacttttgagtgcaactgccttccaggttttgaagggagcacctgtgagaggaatattgatgactgccctaaccacaggtgtcagaatggaggggtttgtgtggatggggtcaacacttacaactgccgctgtcccccacaatggacaggacagttctgcacagaggatgtggatgaatgcctgctgcagcccaatgcctgtcaaaatgggggcacctgtgccaaccgcaatggaggctatggctgtgtatgtgtcaacggctggagtggagatgactgcagtgagaacattgatgattgtgccttcgcctcctgtactccaggctccacctgcatcgaccgtgtggcctccttctcttgcatgtgcccagaggggaaggcaggtctcctgtgtcatctggatgatgcatgcatcagcaatccttgccacaagggggcactgtgtgacaccaaccccctaaatgggcaatatatttgcacctgcccacaaggctacaaaggggctgactgcacagaagatgtggatgaatgtgccatggccaatagcaatccttgtgagcatgcaggaaaatgtgtgaacacggatggcgccttccactgtgagtgtctgaagggttatgcaggacctcgttgtgagatggacatcaatgagtgccattcagacccctgccagaatgatgctacctgtctggataagattggaggcttcacatgtctgtgcatgccaggtttcaaaggtgtgcattgtgaattagaaataaatgaatgtcagagcaacccttgtgtgaacaatgggcagtgtgtggataaagtcaatcgtttccagtgcctgtgtcctcctggtttcactgggccagtttgccagattgatattgatgactgttccagtactccgtgtctgaatggggcaaagtgtatcgatcacccgaatggctatgaatgccagtgtgccacaggtttcactggtgtgttgtgtgaggagaacattgacaactgtgaccccgatccttgccaccatggtcagtgtcaggatggtattgattcctacacctgcatctgcaatcccgggtacatgggcgccatctgcagtgaccagattgatgaatgttacagcagcccttgcctgaacgatggtcgctgcattgacctggtcaatggctaccagtgcaactgccagccaggcacgtcaggggttaattgtgaaattaattttgatgactgtgcaagtaacccttgtatccatggaatctgtatggatggcattaatcgctacagttgtgtctgctcaccaggattcacagggcagagatgtaacattgacattgatgagtgtgcctccaatccctgtcgcaagggtgcaacatgtatcaacggtgtgaatggtttccgctgtatatgccccgagggaccccatcaccccagctgctactcacaggtgaacgaatgcctgagcaatccctgcatccatggaaactgtactggaggtctcagtggatataagtgtctctgtgatgcaggctgggttggcatcaactgtgaagtggacaaaaatgaatgcctttcgaatccatgccagaatggaggaacttgtgacaatctggtgaatggatacaggtgtacttgcaagaagggctttaaaggctataactgccaggtgaatattgatgaatgtgcctcaaatccatgcctgaaccaaggaacctgctttgatgacataagtggctacacttgccactgtgtgctgccatacacaggcaagaattgtcagacagtattggctccctgttccccaaacccttgtgagaatgctgctgtttgcaaagagtcaccaaattttgagagttatacttgcttgtgtgctcctggctggcaaggtcagcggtgtaccattgacattgacgagtgtatctccaagccctgcatgaaccatggtctctgccataacacccagggcagctacatgtgtgaatgtccaccaggcttcagtggtatggactgtgaggaggacattgatgactgccttgccaatccttgccagaatggaggttcctgtatggatggagtgaatactttctcctgcctctgccttccgggtttcactggggataagtgccagacagacatgaatgagtgtctgagtgaaccctgtaagaatggagggacctgctctgactacgtcaacagttacacttgcaagtgccaggcaggatttgatggagtccattgtgagaacaacatcaatgagtgcactgagagctcctgtttcaatggtggcacatgtgttgatgggattaactccttctcttgcttgtgccctgtgggtttcactggatccttctgcctccatgagatcaatgaatgcagctctcatccatgcctgaatgagggaacgtgtgttgatggcctgggtacctaccgctgcagctgccccctgggctacactgggaaaaactgtcagaccctggtgaatctctgcagtcggtctccatgtaaaaacaaaggtacttgcgttcagaaaaaagcagagtcccagtgcctatgtccatctggatgggctggtgcctattgtgacgtgcccaatgtctcttgtgacatagcagcctccaggagaggtgtgcttgttgaacacttgtgccagcactcaggtgtctgcatcaatgctggcaacacgcattactgtcagtgccccctgggctatactgggagctactgtgaggagcaactcgatgagtgtgcgtccaacccctgccagcacggggcaacatgcagtgacttcattggtggatacagatgcgagtgtgtcccaggctatcagggtgtcaactgtgagtatgaagtggatgagtgccagaatcagccctgccagaatggaggcacctgtattgaccttgtgaaccatttcaagtgctcttgcccaccaggcactcggggcctactctgtgaagagaacattgatgactgtgcccggggtccccattgccttaatggtggtcagtgcatggataggattggaggctacagttgtcgctgcttgcctggctttgctggggagcgttgtgagggagacatcaacgagtgcctctccaacccctgcagctctgagggcagcctggactgtatacagctcaccaatgactacctgtgtgtttgccgtagtgcctttactggccggcactgtgaaaccttcgtcgatgtgtgtccccagatgccctgcctgaatggagggacttgtgctgtggccagtaacatgcctgatggtttcatttgccgttgtcccccgggattttccggggcaaggtgccagagcagctgtggacaagtgaaatgtaggaagggggagcagtgtgtgcacaccgcctctggaccccgctgcttctgccccagtccccgggactgcgagtcaggctgtgccagtagcccctgccagcacgggggcagctgccaccctcagcgccagcctccttattactcctgccagtgtgccccaccattctcgggtagccgctgtgaactctacacggcaccccccagcacccctcctgccacctgtctgagccagtattgtgccgacaaagctcgggatggcgtctgtgatgaggcctgcaacagccatgcctgccagtgggatgggggtgactgttctctcaccatggagaacccctgggccaactgctcctccccacttccctgctgggattatatcaacaaccagtgtgatgagctgtgcaacacggtcgagtgcctgtttgacaactttgaatgccaggggaacagcaagacatgcaagtatgacaaatactgtgcagaccacttcaaagacaaccactgtnaccaggggtgcaacagtgaggagtgtggttgggatgggctggactgtgctgctgaccaacctgagaacctggcagaaggtaccctggttattgtggtattgatgccacctgaacaactgctccaggatgctcgcagcttcttgcgggcactgggtaccctgctccacaccaacctgcgcattaagcgggactcccagggggaactcatggtgtacccctattatggtgagaagtcagctgctatgaagaaacagaggatgacacgcagatcccttcctggtgaacaagaacaggaggtggctggctctaaagtctttctggaaattgacaaccgccagtgtgttcaagactcagaccactgcttcaagaacacggatgcagcagcagctctcctggcctctcacgccatacaggggaccctgtcataccctcttgtgtctgtcgtcagtgaatccctgactccagaacgcactcagctcctctatctccttgctgttgctgttgtcatcattctgtttattattctgctgggggtaatcatggcaaaacgaaagcgtaagcatggctctctctggctgcctgaaggtttcactcttcgccgagatgcaagcaatcacaagcgtcgtgagccagtgggacaggatgctgtggggctgaaaaatctctcagtgcaagtctcagaagctaacctaattggtactggaacaagtgaacactgggtcgatgatgaagggccccagccaaagaaagtaaaggctgaagatgaggccttactctcagaagaagatgaccccattgatcgacggccatggacacagcagcaccttgaagctgcagacatccgtaggacaccatcgctggctctcacccctcctcaggcagagcaggaggtggatgtgttagatgtgaatgtccgtggcccagatggctgcaccccattgatgttggcttctctccgaggaggcagctcagatttgagtgatgaagatgaagatgcagaggactcttctgctaacatcatcacagacttggtctaccagggtgccagcctccaggcccagacagaccggactggtgagatggccctgcaccttgcagcccgctactcacgggctgatgctgccaagcgtctcctggatgcaggtgcagatgccaatgcccaggacaacatgggccgctgtccactccatgctgcagtggcagctgatgcccaaggtgtcttccagattctgattcgcaaccgagtaactgatctagatgccaggatgaatgatggtactacacccctgatcctggctgcccgcctggctgtggagggaatggtggcagaactgatcaactgccaagcggatgtgaatgcagtggatgaccatggaaaatctgctcttcactgggcagctgctgtcaataatgtggaggcaactcttttgttgttgaaaaatggggccaaccgagacatgcaggacaacaaggaagagacacctctgtttcttgctgcccgggaggggagctatgaagcagccaagatcctgttagaccattttgccaatcgagacatcacagaccatatggatcgtcttccccgggatgtggctcgggatcgcatgcaccatgacattgtgcgccttctggatgaatacaatgtgaccccaagccctccaggcaccgtgttgacttctgctctctcacctgtcatctgtgggcccaacagatctttcctcagcctgaagcacaccccaatgggcaagaagtctagacggcccagtgccaagagtaccatgcctactagcctccctaaccttgccaaggaggcaaaggatgccaagggtagtaggaggaagaagtctctgagtgagaaggtccaactgtctgagagttcagtaactttatcccctgttgattccctagaatctcctcacacgtatgtttccgacaccacatcctctccaatgattacatccctgggatcttacaggcctcacccaaccctatgttggccactgccgcccctcctgccccagtccatgcccagcatgcactatctttttctaaccttcatgaaatgcagcctttggcacatggggccagcactgtgcttccctcagtgagccagttgctatcccaccaccacattgtgtctccaggcagtggcagtgctggaagcttgagtaggctccatccagtcccagtcccagcagattggatgaaccgcatggaggtgaatgagacccagtacaatgagatgtttggtatggtcctggctccagctgagggcacccatcctggcatagctccccagagcaggccacctgaagggaagcacataaccacccctcgggagcccttgccccccattgtgactttccagctcatccctaaaggcagtattgcccaaccagcgggggctccccagcctcagtccacctgccctccagctgttgcgggccccctgcccaccatgtaccagattccagaaatggcccgtttgcccagtgtggctttccccactgccatgatgccccagcaggacgggcaggtagctcagaccattctcccagcctatcatcctttcccagcctctgtgggcaagtaccccacacccccttcacagcacagttatgcttcctcaaatgctgctgagcgaacacccagtcacagtggtcacctccagggtgagcatccctacctgacaccatccccagagtctcctgaccagtggtcaagttcatcaccccactctgcttctgactggtcagatgtgaccaccagccctacccctgggggtgctggaggaggtcagcggggacctgggacacacatgtctgagccaccacacaacaacatgcaggtttatgcgtgagagagtccacctccagtgtagagacataactgacttttgtaaatgctgctgaggaacaaatgaaggtcatccgggagagaaatgaagaaatctctggagccagcttctagaggtaggaaagagaagatgttcttattcagataatgcaagagaagcaattcgtcagtttcactgggtatctgcaaggcttattgattattctaatctaataagacaagtttgtggaaatgcaagatgaatacaagccttgggtccatgtttactctcttctatttggagaataagatggatgcttattgaagcccagacattcttgcagcttggactgcattttaagccctgcaggcttctgccatatccatgagaagattctacactagcgtcctgttgggaattatgccctggaattctgcctgaattgacctacgcatctcctcctccttggacattcttttgtcttcatttggtgcttttggttttgcacctctccgtgattgtagccctaccagcatgttatagggcaagacctttgtgcttttgatcattctggcccatgaaagcaactttggtctcctttcccctcctgtcttcccggtatcccttggagtctcacaaggtttactttggtatggttctcagcacaaacctttcaagtatgttgtttctttggaaaatggacatactgtattgtgttctcctgcatatatcattcctggagagagaaggggagaagaatacttttcttcaacaaattttgggggcaggagatcccttcaagaggctgcaccttaatttttcttgtctgtgtgcaggtcttcatataaactttaccaggaagaagggtgtgagtttgttgtttttctgtgtatgggcctggtcagtgtaaagttttatccttgatagtctagttactatgaccctccccacttttttaaaaccagaaaaaggtttggaatgttggaatgaccaagagacaagttaactcgtgcaagagccagttacccacccacaggtccccctacttcctgccaagcattccattgactgcctgtatggaacacatttgtcccagatctgagcattctaggcctgtttcactcactcacccagcatatgaaactagtcttaactgttgagcctttcctttcatatccacagaagacactgtctcaaatgttgtacccttgccatttaggactgaactttccttagcccaagggacccagtgacagttgtcttccgtttgtcagatgatcagtctctactgattatcttgctgcttaaaggcctgctcaccaatctttctttcacaccgtgtggtccgtgttactggtatacccagtatgttctcactgaagacatggactttatatgttcaagtgcaggaattggaaagttggacttgttttctatgatccaaaacagccctataagaaggttggaaaaggaggaactatatagcagcctttgctattttctgctaccatttcttttcctctgaagcggccatgacattccctttggcaactaacgtagaaactcaacagaacattttcctttcctagagtcaccttttagatgataatggacaactatagacttgctcattgttcagactgattgcccctcacctgaatccactctctgtattcatgctcttggcaatttctttgactttcttttaagggcagaagcattttagttaattgtagataaagaatagttttcttcctcttctccttgggccagttaataattggtccatggctacactgcaacttccgtccagtgctgtgatgcccatgacacctgcaaaataagttctgcctgggcattttgtagatattaacaggtgaattcccgactcttttggtttgaatgacagttctcattccttctatggctgcaagtatgcatcagtgcttcccacttacctgatttgtctgtcggtggccccatatggaaaccctgcgtgtctgttggcataatagtttacaaatggttttttcagtcctatccaaatttattgaaccaacaaaaataattacttctgccctgagataagcagattaagtttgttcattctctgctttattctctccatgtggcaacattctgtcagcctctttcatagtgtgcaaacattttatcattctaaatggtgactctctgcccttggacccatttattattcacagatggggagaacctatctgcatggacctctgtggaccacagcgtacctgcccctttctgccctcctgctccagccccacttctgaaagtatcagctactgatccagccactggatattttatatcctcccttttccttaagcacaatgtcagaccaaattgcttgtttctttttcttggactactttaatttggatcctttgggtttggagaaagggaatgtgaaagctgtcattacagacaacaggtttcagtgatgaggaggacaacactgcctttcaaactttttactgatctcttagattttaagaactcttgaattgtgtggtatctaataaaagggaaggtaagatggataatcactttctcatttgggttctgaattggagactcagtttttatgagacacatcttttatgccatgtatagatcctcccctgctatttttggtttatttttattgttataaatgctttctttctttgactcctcttctgcctgcctttggggataggtttttttgtttgtttatttgcttcctctgttttgttttaagcatcattttcttatgtgaggtggggaagggaaaggtatgagggaaagagagtctgagaattaaaatattttagtataagcaattggctgtgatgctcaaatccattgcatcctcttattgaatttgccaatttgtaatttttgcataataaagaaccaaaggtgtaatgttttgttgagaggtggtttagggattttggccctaaccaatacattgaatgtatgatgactatttgggaggacacatttatgtacccagaggcccccactaataagtggtactatggttacttccttgtgtacatttctcttaaaagtgatattatatctgtttgtatgagaaacccagtaaccaataaaatgaccgcatattcctgactaaacgtagtaaggaaaatgcacactttgtttttacttttccgtttcattctaaaggtagttaagatgaaatttatatgaaagcatttttatcacaaaataaaaaaggtttcatatacatttcatcttaactacctttagaatgaaacggaaaagtaaccaataaaatgaccgcatat

SEQ ID NO: 446653 - DNA, 4517 bp, Homo sapiens
agcgggttgcacacccgagaaagtttcagccaaacttcgggcggcggctgaggcggcggccgaggagcggcggactcggggcgcggggagtcgaggcatttgcgcctgggcttcggagcgtagcgccaggcctgagcctttgaagcaggaggaggggaggagagagtggggctcctctatcgggaccccctccccatgtggatctgcccaggcggcggcggcggcggcggaggaggaggcgaccgagaagatgcccgccctgcgccccgctctgctgtgggcgctgctggcgctctggctgtgctgcgcggcccccgcgcatgcattgcagtgtcgagatggctatgaaccctgtgtaaatgaaggaatgtgtgttacctaccacaatggcacaggatactgcaaatgtccagaaggcttcttgggggaatattgtcaacatcgagacccctgtgagaagaaccgctgccagaatggtgggacttgtgtggcccaggccatgctggggaaagccacgtgccgatgtgcctcagggtttacaggagaggactgccagtactcaacatctcatccatgctttgtgtctcgaccctgcctgaatggcggcacatgccatatgctcagccgggatacctatgagtgcacctgtcaagtcgggtttacaggtaaggagtgccaatggacggatgcctgcctgtctcatccctgtgcaaatggaagtacctgtaccactgtggccaaccagttctcctgcaaatgcctcacaggcttcacagggcagaaatgtgagactgatgtcaatgagtgtgacattccaggacactgccagcatggtggcacctgcctcaacctgcctggttcctaccagtgccagtgccctcagggcttcacaggccagtactgtgacagcctgtatgtgccctgtgcaccctcaccttgtgtcaatggaggcacctgtcggcagactggtgacttcacttttgagtgcaactgccttccaggttttgaagggagcacctgtgagaggaatattgatgactgccctaaccacaggtgtcagaatggaggggtttgtgtggatggggtcaacacttacaactgccgctgtcccccacaatggacaggacagttctgcacagaggatgtggatgaatgcctgctgcagcccaatgcctgtcaaaatgggggcacctgtgccaaccgcaatggaggctatggctgtgtatgtgtcaacggctggagtggagatgactgcagtgagaacattgatgattgtgccttcgcctcctgtactccaggctccacctgcatcgaccgtgtggcctccttctcttgcatgtgcccagaggggaaggcaggtctcctgtgtcatctggatgatgcatgcatcagcaatccttgccacaagggggcactgtgtgacaccaaccccctaaatgggcaatatatttgcacctgcccacaaggctacaaaggggctgactgcacagaagatgtggatgaatgtgccatggccaatagcaatccttgtgagcatgcaggaaaatgtgtgaacacggatggcgccttccactgtgagtgtctgaagggttatgcaggacctcgttgtgagatggacatcaatgagtgccattcagacccctgccagaatgatgctacctgtctggataagattggaggcttcacatgtctgtgcatgccaggtttcaaaggtgtgcattgtgaattagaaataaatgaatgtcagagcaacccttgtgtgaacaatgggcagtgtgtggataaagtcaatcgtttccagtgcctgtgtcctcctggtttcactgggccagtttgccagattgatattgatgactgttccagtactccgtgtctgaatggggcaaagtgtatcgatcacccgaatggctatgaatgccagtgtgccacaggtttcactggtgtgttgtgtgaggagaacattgacaactgtgaccccgatccttgccaccatggtcagtgtcaggatggtattgattcctacacctgcatctgcaatcccgggtacatgggcgccatctgcagtgaccagattgatgaatgttacagcagcccttgcctgaacgatggtcgctgcattgacctggtcaatggctaccagtgcaactgccagccaggcacgtcaggggttaattgtgaaattaattttgatgactgtgcaagtaacccttgtatccatggaatctgtatggatggcattaatcgctacagttgtgtctgctcaccaggattcacagggcagagatgtaacattgacattgatgagtgtgcctccaatccctgtcgcaagggtgcaacatgtatcaacggtgtgaatggtttccgctgtatatgccccgagggaccccatcaccccagctgctactcacaggtgaacgaatgcctgagcaatccctgcatccatggaaactgtactggaggtctcagtggatataagtgtctctgtgatgcaggctgggttggcatcaactgtgaagtggacaaaaatgaatgcctttcgaatccatgccagaatggaggaacttgtgacaatctggtgaatggatacaggtgtacttgcaagaagggctttaaaggctataactgccaggtgaatattgatgaatgtgcctcaaatccatgcctgaaccaaggaacctgctttgatgacataagtggctacacttgccactgtgtgctgccatacacaggcaagaattgtcagacagtattggctccctgttccccaaacccttgtgagaatgctgctgtttgcaaagagtcaccaaattttgagagttatacttgcttgtgtgctcctggctggcaaggtcagcggtgtaccattgacattgacgagtgtatctccaagccctgcatgaaccatggtctctgccataacacccagggcagctacatgtgtgaatgtccaccaggcttcagtggtatggactgtgaggaggacattgatgactgccttgccaatccttgccagaatggaggttcctgtatggatggagtgaatactttctcctgcctctgccttccgggtttcactggggataagtgccagacagacatgaatgagtgtctgagtgaaccctgtaagaatggagggacctgctctgactacgtcaacagttacacttgcaagtgccaggcaggatttgatggagtccattgtgagaacaacatcaatgagtgcactgagagctcctgtttcaatggtggcacatgtgttgatgggattaactccttctcttgcttgtgccctgtgggtttcactggatccttctgcctccatgagatcaatgaatgcagctctcatccatgcctgaatgagggaacgtgtgttgatggcctgggtacctaccgctgcagctgccccctgggctacactgggaaaaactgtcagaccctggtgaatctctgcagtcggtctccatgtaaaaacaaaggtacttgcgttcagaaaaaagcagagtcccagtgcctatgtccatctggatgggctggtgcctattgtgacgtgcccaatgtctcttgtgacatagcagcctccaggagaggtgtgcttgttgaacacttgtgccagcactcaggtgtctgcatcaatgctggcaacacgcattactgtcagtgccccctgggctatactgggagctactgtgaggagcaactcgatgagtgtgcgtccaacccctgccagcacggggcaacatgcagtgacttcattggtggatacagatgcgagtgtgtcccaggctatcagggtgtcaactgtgagtatgaagtggatgagtgccagaatcagccctgccagaatggaggcacctgtattgaccttgtgaaccatttcaagtgctcttgcccaccaggcactcggggcctactctgtgaagagaacattgatgactgtgcccggggtccccattgccttaatggtggtcagtgcatggataggattggaggctacagttgtcgctgcttgcctggctttgctggggagcgttgtgagggagacatcaacgagtgcctctccaacccctgcagctctgagggcagcctggactgtatacagctcaccaatgactacctgtgtgtttgccgtagtgcctttactggccggcactgtgaaaccttcgtcgatgtgtgtccccagatgccctgcctgaatggagggacttgtgctgtggccagtaacatgcctgatggtttcatttgccgttgtcccccgggattttccggggcaaggtgccagagcagctgtggacaagtgaaatgtaggaagggggagcagtgtgtgcacaccgcctctggaccccgctgcttctgccccagtccccgggactgcgagtcaggctgtgccagtagcccctgccagcactctgcatgccagcacccttgtcgagtgctgtctggatgctagggacagcagggccgtggacagcctccagaggtgttctcctgaaacctctgaatgtcccagccacaagaac

SEQ ID NO: 446654 - DNA, 3049 bp, Homo sapiens
agcgggttgcacacccgagaaagtttcagccaaacttcgggcggcggctgaggcggcggccgaggagcggcggactcggggcgcggggagtcgaggcatttgcgcctgggcttcggagcgtagcgccaggcctgagcctttgaagcaggaggaggggaggagagagtggggctcctctatcgggaccccctccccatgtggatctgcccaggcggcggcggcggcggcggaggaggaggcgaccgagaagatgcccgccctgcgccccgctctgctgtgggcgctgctggcgctctggctgtgctgcgcggcccccgcgcatgcattgcagtgtcgagatggctatgaaccctgtgtaaatgaaggaatgtgtgttacctaccacaatggcacaggatactgcaaatgtccagaaggcttcttgggggaatattgtcaacatcgagacccctgtgagaagaaccgctgccagaatggtgggacttgtgtggcccaggccatgctggggaaagccacgtgccgatgtgcctcagggtttacaggagaggactgccagtactcaacatctcatccatgctttgtgtctcgaccctgcctgaatggcggcacatgccatatgctcagccgggatacctatgagtgcacctgtcaagtcgggtttacaggtaaggagtgccaatggacggatgcctgcctgtctcatccctgtgcaaatggaagtacctgtaccactgtggccaaccagttctcctgcaaatgcctcacaggcttcacagggcagaaatgtgagactgatgtcaatgagtgtgacattccaggacactgccagcatggtggcacctgcctcaacctgcctggttcctaccagtgccagtgccctcagggcttcacaggccagtactgtgacagcctgtatgtgccctgtgcaccctcaccttgtgtcaatggaggcacctgtcggcagactggtgacttcacttttgagtgcaactgccttccaggttttgaagggagcacctgtgagaggaatattgatgactgccctaaccacaggtgtcagaatggaggggtttgtgtggatggggtcaacacttacaactgccgctgtcccccacaatggacaggacagttctgcacagaggatgtggatgaatgcctgctgcagcccaatgcctgtcaaaatgggggcacctgtgccaaccgcaatggaggctatggctgtgtatgtgtcaacggctggagtggagatgactgcagtgagaacattgatgattgtgccttcgcctcctgtactccaggctccacctgcatcgaccgtgtggcctccttctcttgcatgtgcccagaggggaaggcaggtctcctgtgtcatctggatgatgcatgcatcagcaatccttgccacaagggggcactgtgtgacaccaaccccctaaatgggcaatatatttgcacctgcccacaaggctacaaaggggctgactgcacagaagatgtggatgaatgtgccatggccaatagcaatccttgtgagcatgcaggaaaatgtgtgaacacggatggcgccttccactgtgagtgtctgaagggttatgcaggacctcgttgtgagatggacatcaatgagtgccattcagacccctgccagaatgatgctacctgtctggataagattggaggcttcacatgtctgtgcatgccaggtttcaaaggtgtgcattgtgaattagaaataaatgaatgtcagagcaacccttgtgtgaacaatgggcagtgtgtggataaagtcaatcgtttccagtgcctgtgtcctcctggtttcactgggccagtttgccagattgatattgatgactgttccagtactccgtgtctgaatggggcaaagtgtatcgatcacccgaatggctatgaatgccagtgtgccacaggtttcactggtgtgttgtgtgaggagaacattgacaactgtgaccccgatccttgccaccatggtcagtgtcaggatggtattgattcctacacctgcatctgcaatcccgggtacatgggcgccatctgcagtgaccagattgatgaatgttacagcagcccttgcctgaacgatggtcgctgcattgacctggtcaatggctaccagtgcaactgccagccaggcacgtcaggggttaattgtgaaattaattttgatgactgtgcaagtaacccttgtatccatggaatctgtatggatggcattaatcgctacagttgtgtctgctcaccaggattcacagggcagagatgtaacattgacattgatgagtgtgcctccaatccctgtcgcaagggtgcaacatgtatcaacggtgtgaatggtttccgctgtatatgccccgagggaccccatcaccccagctgctactcacaggtgaacgaatgcctgagcaatccctgcatccatggaaactgtactggaggtctcagtggatataagtgtctctgtgatgcaggctgggttggcatcaactgtgaagtggacaaaaatgaatgcctttcgaatccatgccagaatggaggaacttgtgacaatctggtgaatggatacaggtgtacttgcaagaagggctttaaaggctataactgccaggtgaatattgatgaatgtgcctcaaatccatgcctgaaccaaggaacctgctttgatgacataagtggctacacttgccactgtgtgctgccatacacagtaccgctacatctcactcagaggtgtcaccccttcgatggctgttacaactgagaagacaagaaatagtaggccaggcacggtggctcaccctgtaatcccagcactttgggaggccgaggcaggcggatcacgaggcaagaattgtcagacagtattggctccctgttccccaaacccttgtgagaatgctgctgtttgcaaagagtcaccaaattttgagagttatacttgcttgtgtgctcctggctggcaaggtcagcgtgtaccacttgacacttgatcgagtgtacctccacccccagcatcaccaaggctctt

SEQ ID NO: 446655 - DNA, 402 bp, Homo sapiens
ggccccctagcggctggaaggctgcaacctaagcctcacaagccatgatgttcattcttcagggagtttaagcaccttggcagcaacttcctaggccacagaagtcttcctggaacttcctaaagcagggggccaaccagtttgtctgtggaatagctccatgcaccccaactaagctcaggtcctgcgtagatttttgtgggaatcagcttccaaggactaggtcatttattggccctgtgttcctaggtcagcggtgtaccattgacattgacgagtgtatctccaagccctgcatgaaccatggtctctgccataacacccagggcagctacatgtgtgaatgtccaccaggcttcagtggtatggactgtgaggaggacattgatgactgccttgcca

SEQ ID NO: 446656 - DNA, 1334 bp, Homo sapiens
gagccggtccctactttccacagggggaatatccacccgtccctcatctgcgtctgttttggggattatctacagctcagtagcttaagaatttagacagccagcctttctagcctaaagttattcacggttatttgggtagagtctcagcccagaactggacattgcttccatcagcaacactaaggggagcttgaagtgcacatatgatgacctaggacttgcctcacaccaggcaaaacacactgcctcttgggagttctgcagaagctgccatttagttgagtgactttacctgaacatcaggaaaataaaccttcaggaggttggagctgggatatcgtgtgaagaaaaacattagtttggccttcttcaagtgaccagggtttagaccctcctggatttatctcagtgtcaaggaaaatgaacactttaaaatgccagtttatcaattaactagtgaattccttgttcctgtggtttctatttgatttcattttgtttttctgattggaattgtgtatttgctccatttttctgtctctggaaactctggtcaaataagctggatgacatatgtgcacagttaagtcacagaatgtaaaaatcatctcgatgtggaaaagttatgtagcatagatgatgtcaaatacaggttggtgtattttgtgtgtgtgtgtgtgtgtgtgtgtgtgtgtggtgtcttagatgtcaaatacaggttggtgtattgtgtgtgtgtgtgtgtgtgtgtgtgtgtgtgtgtgtgtgtgtggtgtccaagtgggatgggaagagatggcaattctatcccagataaaccatttcaaaaccccaagcagagatttacttcccctctctgcctcagtttcctcagctgtaaaacgagaagagtaaactaggtggtccccattctggctgtcactcttatcattgccttcacagtgttgcctttataaccagcaaacatctaagcaggctgaataccagctcatattttgctcttgctcaagaagcttgaatggttgggtggtacccactctccatttgcctggcagaactatccctcatctttcaggtctcagctcagaagctcccacctctgttaaacccttccttgccaaattaggccttccttaccctgggctatgaagactctttgtacaaactgttgcagcgatgaccttattggaatttttactgtatgtttgtctcgtctagactgtgagctccttgagagtgaggaccttatcttttcatctttgtgcctagcccagtgctaggaacatagcaggtgctcaataaatatttgttgtgtgaaggagtaagtgagt

SEQ ID NO: 446657 - DNA, 6081 bp, Homo sapiens
  misc_feature (2)..(2): n is a, c, g, or t
  misc_feature (4)..(4): n is a, c, g, or t
  misc_feature (7)..(7): n is a, c, g, or t
gncncgnggctggacggagctggcaggaggggccttgccagcttccgccgccgcgtcgtttcaggacccggacggcggattcgcgctgcctccgccgccgcggggcagccggggggcagggagcccagcgaggggcgcgcgtgggcgcggccatgggactgcgccggatccggtgacagcagggagccaagcggcccgggccctgagcgcgtcttctccggggggcctcgccctcctgctcgcggggccggggctcctgctccggttgctggcgctgttgctggctgtggcggcggccaggatcatgtcgggtcgccgctgcgccggcgggggagcggcctgcgcgagcgccgcggccgaggccgtggagccggccgcccgagagctgttcgaggcgtgccgcaacggggacgtggaacgagtcaagaggctggtgacgcctgagaaggtgaacagccgcgacacggcgggcaggaaatccaccccgctgcacttcgccgcaggttttgggcggaaagacgtagttgaatatttgcttcagaatggtgcaaatgtccaagcacgtgatgatgggggccttattcctcttcataatgcatgctcttttggtcatgctgaagtagtcaatctccttttgcgacatggtgcagaccccaatgctcgagataattggaattatactcctctccatgaagctgcaattaaaggaaagattgatgtttgcattgtgctgttacagcatggagctgagccaaccatccgaaatacagatggaaggacagcattggatttagcagatccatctgccaaagcagtgcttactggtgaatataagaaagatgaactcttagaaagtgccaggagtggcaatgaagaaaaaatgatggctctactcacaccattaaatgtcaactgccacgcaagtgatggcagaaagtcaactccattacatttggcagcaggatataacagagtaaagattgtacagctgttactgcaacatggagctgatgtccatgctaaagataaaggtgatctggtaccattacacaatgcctgttcttatggtcattatgaagtaactgaacttttggtcaagcatggtgcctgtgtaaatgcaatggacttgtggcaattcactcctcttcatgaggcagcttctaagaacagggttgaagtatgttctcttctcttaagttatggtgcagacccaacactgctcaattgtcacaataaaagtgctatagacttggctcccacaccacagttaaaagaaagattagcatatgaatttaaaggccactcgttgctgcaagctgcacgagaagctgatgttactcgaatcaaaaaacatctctctctggaaatggtgaatttcaagcatcctcaaacacatgaaacagcattgcattgtgctgctgcatctccatatcccaaaagaaagcaaatatgtgaactgttgctaagaaaaggagcaaacatcaatgaaaagactaaagaattcttgactcctctgcacgtggcatctgagaaagctcataatgatgttgttgaagtagtggtgaaacatgaagcaaaggttaatgctctggataatcttggtcagacttctctacacagagctgcatattgtggtcatctacaaacctgccgcctactcctgagctatgggtgtgatcctaacattatatcccttcagggctttactgctttacagatgggaaatgaaaatgtacagcaactcctccaagagggtatctcattaggtaattcagaggcagacagacaattgctggaagctgcaaaggctggagatgtcgaaactgtaaaaaaactgtgtactgttcagagtgtcaactgcagagacattgaagggcgtcagtctacaccacttcattttgcagctgggtataacagagtgtccgtggtggaatatctgctacagcatggagctgatgtgcatgctaaagataaaggaggccttgtacctttgcacaatgcatgttcttatggacattatgaagttgcagaacttcttgttaaacatggagcagtagttaatgtagctgatttatggaaatttacacctttacatgaagcagcagcaaaaggaaaatatgaaatttgcaaacttctgctccagcatggtgcagaccctacaaaaaaaaacagggatggaaatactcctttggatcttgttaaagatggagatacagatattcaagatctgcttaggggagatgcagctttgctagatgctgccaagaagggttgtttagccagagtgaagaagttgtcttctcctgataatgtaaattgccgcgatacccaaggcagacattcaacacctttacatttagcagctggttataataatttagaagttgcagagtatttgttacaacacggagctgatgtgaatgcccaagacaaaggaggacttattcctttacataatgcagcatcttacgggcatgtagatgtagcagctctactaataaagtataatgcatgtgtcaatgccacggacaaatgggctttcacacctttgcacgaagcagcccaaaagggacgaacacagctttgtgctttgttgctagcccatggagctgacccgactcttaaaaatcaggaaggacaaacacctttagatttagtttcagcggatgatgtcagcgctcttctgacagcagccatgcccccatctgctctgccctcttgttacaagcctcaagtgctcaatggtgtgagaagcccaggagccactgcagatgctctctcttcaggtccatctagcccatcaagcctttctgcagccagcagtcttgacaacttatctgggagtttttcagaactgtcttcagtagttagttcaagtggaacagagggtgcttccagtttggagaaaaaggaggttccaggagtagattttagcataactcaattcgtaaggaatcttggacttgagcacctaatggatatatttgagagagaacagatcactttggatgtattagttgagatggggcacaaggagctgaaggagattggaatcaatgcttatggacataggcacaaactaattaaaggagtcgagagacttatctccggacaacaaggtcttaacccatatttaactttgaacacctctggtagtggaacaattcttatagatctgtctcctgatgataaagagtttcagtctgtggaggaagagatgcaaagtacagttcgagagcacagagatggaggtcatgcaggtggaatcttcaacagatacaatattctcaagattcagaaggtttgtaacaagaaactatgggaaagatacactcaccggagaaaagaagtttctgaagaaaaccacaaccatgccaatgaacgaatgctatttcatgggtctccttttgtgaatgcaattatccacaaaggctttgatgaaaggcatgcgtacataggtggtatgtttggagctggcatttattttgctgaaaactcttccaaaagcaatcaatatgtatatggaattggaggaggtactgggtgtccagttcacaaagacagatcttgttacatttgccacaggcagctgctcttttgccgggtaaccttgggaaagtctttcctgcagttcagtgcaatgaaaatggcacattctcctccaggtcatcactcagtcactggtaggcccagtgtaaatggcctagcattagctgaatatgttatttacagaggagaacaggcttatcctgagtatttaattacttaccagattatgaggcctgaaggtatggtcgatggataaatagttattttaagaaactaattccactgaacctaaaatcatcaaagcagcagtggcctctacgttttactcctttgctgaaaaaaaatcatcttgcccacaggcctgtggcaaaaggataaaaatgtgaacgaagtttaacattctgacttgataaagctttaataatgtacagtgttttctaaatatttcctgttttttcagcactttaacagatgccattccaggttaaactgggttgtctgtactaaattataaacagagttaacttgaaccttttatatgttatgcattgattctaacaaactgtaatgccctcaacagaactaattttactaatacaatactgtgttctttaaaacacagcatttacactgaatacaatttcatttgtaaaactgtaaataagagcttttgtactagcccagtatttatttacattgctttgtaatataaatctgttttagaactgcagcggtttacaaaattttttcatatgtattgttcatctatacttcatcttacatcgtcatgattgagtgatctttacatttgattccagaggctatgttcagttgttagttgggaaagattgagttatcagatttaatttgccgatgggagcctttatctgtcattagaaatctttctcatttaagaacttatgaatatgctgaagatttaatttgtgatacctttgtatgtatgagacacattccaaagagctctaactatgataggtcctgattactaaagaagcttctttactggcctcaatttctagctttcatgttggaaaattttctgcagtccttctgtgaaaattagagcaaagtgctcctgttttttagagaaactaaatcttgctgttgaacaattattgtgttcttttcatggaacataagtaggatgttacatttccagggtgggaagggtaatcctaaatcatttcccaatctattctaattaccttaaatctaaaggggaaaaaaaaaatcacaaacaggactgggtagttttttatcctaagtatattttttcctgttctttttacttggttttattgctgtatttatagccaatctatacatcatgggtaaacttaacccagaactataaaatgtagttgtctcagtcccctccaggcctcctgaatgggcaagtgcagtgaaacaggtgcttcttgctcctgggttttctctccatgatgttatgcccaattggaaatatgctgtcagtttgtgcaccatatggtgaccaggcctgtgctcagtttggcagctatagaaggaaatgctgtcccataaaatgccattcctattttctaatataaaactcttttccaggaagcatgcttaagcatcttgttacagagacatacatccattatggcttggcaatctcttttatttgttgactctagctcccttcaaagtcgaggaaagatctttactcacttaatgaggacattccccatcactgtctgtaccagttcacctttattttacgttttattcagtctgtaaattaactggccctttgcagtaacttgtacataaagtgctagaaaatcatgttccttgtcctgagtaagagttaatcagagtaaatgcatttctggagttgtttctgtgatgtaaattatgatcattatttaagaagtcaaatcctgatcttgaagtgctttttatacagctctctaataattacaaatatccgaaagtcatttcttggaacacaagtggagtatgccaaattttatatgaatttttcagattatctaagcttccaggttttataattagaagataatgagagaattaatggggtttatatttacattatctctcaactatgtagcccatattactcaccctatgagtgaatctggaattgcttttcatgtgaaatcattgtggtctatgagtttacaatactgcaaactgtgttattttatctaatccattgcttaatgagtgtgtttttccatgaatgaatataccgtggttcatatgttagcatggcagcattttcagatagctttttgtttgttgggaagttggggttttggggggagggggagtattagtacgttgcatgaaatagcttactttataatgatggaattgctttttcttttgtcttgtgatttttttttttgaagtgaaatttaactttttgtgcaagtagtactattatacccatcttcagtgtcttacttgtactgtatcacattccataccctcatttaattcttaataaaactgttcacttgt

SEQ ID NO: 446658 - DNA, 1544 bp, Homo sapiens
ttctcactccatgtaagttgagacctcactgtccaaagaaaccaattactctatgtgtctttcaagtattttggaagtgataagccacaaatgctaacatggtgagaaaaagctttacttccactggctatcaggagtttctagtccatgcaagacaaaatatgacttgacctttgattggaagttgtgctgtgcatatttatgttagcttttatatctttcttgtagcctatctagaacacttaacattactgtgtccaagttgtctttgtaagtcacaaataatttgtatgcataaaatatttctgtccacttctgcagcgttaaataccatagccttgagacctagaaagacttttagattaatgtaatattttatggtagttttataattgtattcttctttaacttgatctttttaaattctttggctttaaatcctttagcaaaaggataaaaactataatagaaataagttttatttcatggctttaacagcacctaagttcctctactagacttgcagagatgtgtacctctgagttctctctagcaaaaaagcatgctcttgtggccttctggggaagaggactctgaggcccactctggtttgacttgtatgtgattgcagacctttgacttgcagcctctgagacccatgtacctgagttcaagaagtggtatgtaacacccatgaaggcagagactttggtaggaaggttttcataggaaagatacaagcaaatcagtcaatataattttgggaatctacaaagctaattgataacacaaaaagcttccaacttgaggcaagggggaaatgttttccagaaggtaaattgttaatagagtccaatgagctatttcagatttatacaaaatctctttttttatgttttcagtaatgtctatgccttataaatacatatatatatgtatacatgtaatgacttttttatgttaacaagtggaagtattatgacataggactaaaaaagaaaaaacaagtaaagtaattttacttcttttctaaattagctggttataataatttagaagttgcagagtatttgttacaacacggagctgatgtgaatgcccaagacaaaggaggacttattcctttacataatgcagcatcttacggggtaagttcttccgtgttacctttaaaaatttgtggaattttaaagtgaaagtcagtattgcagctcaaatggaatgtagtttgatgttctcattttacagagaagtaagtggcagagctaaagaagttaaataacttccaaatttcggttctgaatctgttctaagcttgctgtgtgatatgcggtgtattgttgtttgttttattatctgccttaacacctgtctcttattttcagtgagatgttggtgattgtgtttatttgttggtacccagaaaatccactggggcaccaacggggtagatggaatctgtacagattcagatgcattgttcctgacttatcatagtccaatgtgacattcaaaattgaccatcttcaatggtatagtttgaa

SEQ ID NO: 446659 - DNA, 866 bp, Homo sapiens
ctggtgatctagcggatccttacactgagttcgagttcactttattactagtatgttacattcagtaagaacaattgaagtaggctctgccagtccccatgtgctttgggaatcattattccaggtaatcattttattggtatcacctttggtaaacaagtttgaaaaatatgcctacttgagccagccttccttataggaagctaaagctttctatttttcctgatggtagctgctaagcacaagcaggaaaaaaaaaaaatctcaaaactctcagaagttacataagcctctcaccaaagttatctgtggtatgggttggtgagagttctcataacaaaataccaaagaccaggtggcttaaacaacagaaatttgttttctcacagttctggaggctaggagtccaagttcaaggtgttggcagagttggtttcttctgaaaccccctcttggcttgcagctgtctaccttctcagtgtgtcctccattggaacatggtgtctctttctatatgtcctagtctctacttttaaggaaaccagtcaaattagattagagcccaccctaatgggctcattttaacttttttagctctttaaaggctctgtctccaaatagagtcatattctaaggtactggggttagggcttcaacataagaattttgcagggtacaattcatttcgtgacatttgttttaaggtttcactcataaaactggcacagtgtacctttgttttcagtgcaaatatacaatatattgtggtttcagtacagctttttcagctgcattacagatgttaggaaatcattaaaatcactgagctatagctaatacctcagtggagttccatcatagacaca

SEQ ID NO: 446660 - DNA, 6555 bp, Homo sapiens
  misc_feature (2)..(2): n is a, c, g, or t
  misc_feature (4)..(4): n is a, c, g, or t
  misc_feature (7)..(7): n is a, c, g, or t
gncncgnggctggacggagctggcaggaggggccttgccagcttccgccgccgcgtcgtttcaggacccggacggcggattcgcgctgcctccgccgccgcggggcagccggggggcagggagcccagcgaggggcgcgcgtgggcgcggccatgggactgcgccggatccggtgacagcagggagccaagcggcccgggccctgagcgcgtcttctccggggggcctcgccctcctgctcgcggggccggggctcctgctccggttgctggcgctgttgctggctgtggcggcggccaggatcatgtcgggtcgccgctgcgccggcgggggagcggcctgcgcgagcgccgcggccgaggccgtggagccggccgcccgagagctgttcgaggcgtgccgcaacggggacgtggaacgagtcaagaggctggtgacgcctgagaaggtgaacagccgcgacacggcgggcaggaaatccaccccgctgcacttcgccgcaggttttgggcggaaagacgtagttgaatatttgcttcagaatggtgcaaatgtccaagcacgtgatgatgggggccttattcctcttcataatgcatgctcttttggtcatgctgaagtagtcaatctccttttgcgacatggtgcagaccccaatgctcgagataattggaattatactcctctccatgaagctgcaattaaaggaaagattgatgtttgcattgtgctgttacagcatggagctgagccaaccatccgaaatacagatggaaggacagcattggatttagcagatccatctgccaaagcagtgcttactggtgaatataagaaagatgaactcttagaaagtgccaggagtggcaatgaagaaaaaatgatggctctactcacaccattaaatgtcaactgccacgcaagtgatggcagaaagtcaactccattacatttggcagcaggatataacagagtaaagattgtacagctgttactgcaacatggagctgatgtccatgctaaagataaaggtgatctggtaccattacacaatgcctgttcttatggtcattatgaagtaactgaacttttggtcaagcatggtgcctgtgtaaatgcaatggacttgtggcaattcactcctcttcatgaggcagcttctaagaacagggttgaagtatgttctcttctcttaagttatggtgcagacccaacactgctcaattgtcacaataaaagtgctatagacttggctcccacaccacagttaaaagaaagattagcatatgaatttaaaggccactcgttgctgcaagctgcacgagaagctgatgttactcgaatcaaaaaacatctctctctggaaatggtgaatttcaagcatcctcaaacacatgaaacagcattgcattgtgctgctgcatctccatatcccaaaagaaagcaaatatgtgaactgttgctaagaaaaggagcaaacatcaatgaaaagactaaagaattcttgactcctctgcacgtggcatctgagaaagctcataatgatgttgttgaagtagtggtgaaacatgaagcaaaggttaatgctctggataatcttggtcagacttctctacacagagctgcatattgtggtcatctacaaacctgccgcctactcctgagctatgggtgtgatcctaacattatatcccttcagggctttactgctttacagatgggaaatgaaaatgtacagcaactcctccaagagggtatctcattaggtaattcagaggcagacagacaattgctggaagctgcaaaggctggagatgtcgaaactgtaaaaaaactgtgtactgttcagagtgtcaactgcagagacattgaagggcgtcagtctacaccacttcattttgcagctgggtataacagagtgtccgtggtggaatatctgctacagcatggagctgatgtgcatgctaaagataaaggaggccttgtacctttgcacaatgcatgttcttatggacattatgaagttgcagaacttcttgttaaacatggagcagtagttaatgtagctgatttatggaaatttacacctttacatgaagcagcagcaaaaggaaaatatgaaatttgcaaacttctgctccagcatggtgcagaccctacaaaaaaaaacagggatggaaatactcctttggatcttgttaaagatggagatacagatattcaagatctgcttaggggagatgcagctttgctagatgctgccaagaagggttgtttagccagagtgaagaagttgtcttctcctgataatgtaaattgccgcgatacccaaggcagacattcaacacctttacatttagcagctggttataataatttagaagttgcagagtatttgttacaacacggagctgatgtgaatgcccaagacaaaggaggacttattcctttacataatgcagcatcttacgggcatgtagatgtagcagctctactaataaagtataatgcatgtgtcaatgccacggacaaatgggctttcacacctttgcacgaagcagcccaaaagggacgaacacagctttgtgctttgttgctagcccatggagctgacccgactcttaaaaatcaggaaggacaaacacctttagatttagtttcagcggatgatgtcagcgctcttctgacagcagccatgcccccatctgctctgccctcttgttacaagcctcaagtgctcaatggtgtgagaagcccaggagccactgcagatgctctctcttcaggtccatctagcccatcaagcctttctgcagccagcagtcttgacaacttatctgggagtttttcagaactgtcttcagtagttagttcaagtggaacagagggtgcttccagtttggagaaaaaggaggttccaggagtagattttagcataactcaattcgtaaggaatcttggacttgagcacctaatggatatatttgagagagaacagatcactttggatgtattagttgagatggggcacaaggagctgaaggagattggaatcaatgcttatggacataggcacaaactaattaaaggagtcgagagacttatctccggacaacaaggtcttaacccatatttaactttgaacacctctggtagtggaacaattcttatagatctgtctcctgatgataaagagtttcagtctgtggaggaagagatgcaaagtacagttcgagagcacagagatggaggtcatgcaggtggaatcttcaacagatacaatattctcaagattcagaaggtttgtaacaagaaactatgggaaagatacactcaccggagaaaagaagtttctgaagaaaaccacaaccatgccaatgaacgaatgctatttcatgggtctccttttgtgaatgcaattatccacaaaggctttgatgaaaggcatgcgtacataggtggtatgtttggagctggcatttattttgctgaaaactcttccaaaagcaatcaatatgtatatggaattggaggaggtactgggtgtccagttcacaaagacagatcttgttacatttgccacaggcagctgctcttttgccgggtaaccttgggaaagtctttcctgcagttcagtgcaatgaaaatggcacattctcctccaggtcatcactcagtcactggtaggcccagtgtaaatggcctagcattagctgaatatgttatttacagaggagaacaggcttatcctgagtatttaattacttaccagattatgaggcctgaaggtatggtcgatggataaatagttattttaagaaactaattccactgaacctaaaatcatcaaagcagcagtggcctctacgttttactcctttgctgaaaaaaaatcatcttgcccacaggcctgtggcaaaaggataaaaatgtgaacgaagtttaacattctgacttgataaagctttaataatgtacagtgttttctaaatatttcctgttttttcagcactttaacagatgccattccaggttaaactgggttgtctgtactaaattataaacagagttaacttgaaccttttatatgttatgcattgattctaacaaactgtaatgccctcaacagaactaattttactaatacaatactgtgttctttaaaacacagcatttacactgaatacaatttcatttgtaaaactgtaaataagagcttttgtactagcccagtatttatttacattgctttgtaatataaatctgttttagaactgcagcggtttacaaaattttttcatatgtattgttcatctatacttcatcttacatcgtcatgattgagtgatctttacatttgattccagaggctatgttcagttgttagttgggaaagattgagttatcagatttaatttgccgatgggagcctttatctgtcattagaaatctttctcatttaagaacttatgaatatgctgaagatttaatttgtgatacctttgtatgtatgagacacattccaaagagctctaactatgataggtcctgattactaaagaagcttctttactggcctcaatttctagctttcatgttggaaaattttctgcagtccttctgtgaaaattagagcaaagtgctcctgttttttagagaaactaaatcttgctgttgaacaattattgtgttcttttcatggaacataagtaggatgttacatttccagggtgggaagggtaatcctaaatcatttcccaatctattctaattaccttaaatctaaaggggaaaaaaaaaatcacaaacaggactgggtagttttttatcctaagtatattttttcctgttctttttacttggttttattgctgtatttatagccaatctatacatcatgggtaaacttaacccagaactataaaatgtagttgtctcagtcccctccaggcctcctgaatgggcaagtgcagtgaaacaggtgcttcttgctcctgggttttctctccatgatgttatgcccaattggaaatatgctgtcagtttgtgcaccatatggtgaccaggcctgtgctcagtttggcagctatagaaggaaatgctgtcccataaaatgccattcctattttctaatataaaactcttttccaggaagcatgcttaagcatcttgttacagagacatacatccattatggcttggcaatctcttttatttgttgactctagctcccttcaaagtcgaggaaagatctttactcacttaatgaggacattccccatcactgtctgtaccagttcacctttattttacgttttattcagtctgtaaattaactggccctttgcagtaacttgtacataaagtgctagaaaatcatgttccttgtcctgagtaagagttaatcagagtaaatgcatttctggagttgtttctgtgatgtaaattatgatcattatttaagaagtcaaatcctgatcttgaagtgctttttatacagctctctaataattacaaatatccgaaagtcatttcttggaacacaagtggagtatgccaaattttatatgaatttttcagattatctaagcttccaggttttataattagaagataatgagagaattaatggggtttatatttacattatctctcaactatgtagcccatattactcaccctatgagtgaatctggaattgcttttcatgtgaaatcattgtggtctatgagtttacaatactgcaaactgtgttattttatctaatccattgcttaatgagtgtgtttttccatgaatgaatataccgtggttcatatgttagcatggcagcattttcagatagctttttgtttgttgggaagttggggttttggggggagggggagtattagtacgttgcatgaaatagcttactttataatgatggaattgctttttcttttgtcttgtgatttttttttttgaagtgaaatttaactttttgtgcaagtagtactattatacccatcttcagtgtcttacttgtactgtatcacattccataccctcatttaattcttaataaaactgttcacttgtttttctgggtagcatggtaattactggaatagtataaatgtgttgaatggtctttgagaaaatgaattaagattacaataaaccacaattgcaggaaaacaatgtagttctgagtctaatagtgataaagaatgcagtttgaagtttgaaatattgaatattgtagctgtacttgctcattaaaatgaaagtagctgtgagatgctttcaacatttagtctattcagcacaactggtaaaccttaaagctcattcctgggaaattaatcttcttaacttataaaaaggaatatatttttatttctgtgtcatatgaaaacattcttaataagtttccaaatctcaaagttagtggtatttattgctattaaaagaaagagtaatcgcatatgtatattagacttcagtatgttaagtttccttgtgtgtgagcaattccctgatttccataataagagaatgatggtgcaaata

SEQ ID NO: 446661 - DNA, 5230 bp, Homo sapiens
ttctcactccatgtaagttgagacctcactgtccaaagaaaccaattactctatgtgtctttcaagtattttggaagtgataagccacaaatgctaacatggtgagaaaaagctttacttccactggctatcaggagtttctagtccatgcaagacaaaatatgacttgacctttgattggaagttgtgctgtgcatatttatgttagcttttatatctttcttgtagcctatctagaacacttaacattactgtgtccaagttgtctttgtaagtcacaaataatttgtatgcataaaatatttctgtccacttctgcagcgttaaataccatagccttgagacctagaaagacttttagattaatgtaatattttatggtagttttataattgtattcttctttaacttgatctttttaaattctttggctttaaatcctttagcaaaaggataaaaactataatagaaataagttttatttcatggctttaacagcacctaagttcctctactagacttgcagagatgtgtacctctgagttctctctagcaaaaaagcatgctcttgtggccttctggggaagaggactctgaggcccactctggtttgacttgtatgtgattgcagacctttgacttgcagcctctgagacccatgtacctgagttcaagaagtggtatgtaacacccatgaaggcagagactttggtaggaaggttttcataggaaagatacaagcaaatcagtcaatataattttgggaatctacaaagctaattgataacacaaaaagcttccaacttgaggcaagggggaaatgttttccagaaggtaaattgttaatagagtccaatgagctatttcagatttatacaaaatctctttttttatgttttcagtaatgtctatgccttataaatacatatatatatgtatacatgtaatgacttttttatgttaacaagtggaagtattatgacataggactaaaaaagaaaaaacaagtaaagtaattttacttcttttctaaattagctggttataataatttagaagttgcagagtatttgttacaacacggagctgatgtgaatgcccaagacaaaggaggacttattcctttacataatgcagcatcttacgggcatgtagatgtagcagctctactaataaagtataatgcatgtgtcaatgccacggacaaatgggctttcacacctttgcacgaagcagcccaaaagggacgaacacagctttgtgctttgttgctagcccatggagctgacccgactcttaaaaatcaggaaggacaaacacctttagatttagtttcagcggatgatgtcagcgctcttctgacagcagccatgcccccatctgctctgccctcttgttacaagcctcaagtgctcaatggtgtgagaagcccaggagccactgcagatgctctctcttcaggtccatctagcccatcaagcctttctgcagccagcagtcttgacaacttatctgggagtttttcagaactgtcttcagtagttagttcaagtggaacagagggtgcttccagtttggagaaaaaggaggttccaggagtagattttagcataactcaattcgtaaggaatcttggacttgagcacctaatggatatatttgagagagaacagatcactttggatgtattagttgagatggggcacaaggagctgaaggagattggaatcaatgcttatggacataggcacaaactaattaaaggagtcgagagacttatctccggacaacaaggtcttaacccatatttaactttgaacacctctggtagtggaacaattcttatagatctgtctcctgatgataaagagtttcagtctgtggaggaagagatgcaaagtacagttcgagagcacagagatggaggtcatgcaggtggaatcttcaacagatacaatattctcaagattcagaaggtttgtaacaagaaactatgggaaagatacactcaccggagaaaagaagtttctgaagaaaaccacaaccatgccaatgaacgaatgctatttcatgggtctccttttgtgaatgcaattatccacaaaggctttgatgaaaggcatgcgtacataggtggtatgtttggagctggcatttattttgctgaaaactcttccaaaagcaatcaatatgtatatggaattggaggaggtactgggtgtccagttcacaaagacagatcttgttacatttgccacaggcagctgctcttttgccgggtaaccttgggaaagtctttcctgcagttcagtgcaatgaaaatggcacattctcctccaggtcatcactcagtcactggtaggcccagtgtaaatggcctagcattagctgaatatgttatttacagaggagaacaggcttatcctgagtatttaattacttaccagattatgaggcctgaaggtatggtcgatggataaatagttattttaagaaactaattccactgaacctaaaatcatcaaagcagcagtggcctctacgttttactcctttgctgaaaaaaaatcatcttgcccacaggcctgtggcaaaaggataaaaatgtgaacgaagtttaacattctgacttgataaagctttaataatgtacagtgttttctaaatatttcctgttttttcagcactttaacagatgccattccaggttaaactgggttgtctgtactaaattataaacagagttaacttgaaccttttatatgttatgcattgattctaacaaactgtaatgccctcaacagaactaattttactaatacaatactgtgttctttaaaacacagcatttacactgaatacaatttcatttgtaaaactgtaaataagagcttttgtactagcccagtatttatttacattgctttgtaatataaatctgttttagaactgcagcggtttacaaaattttttcatatgtattgttcatctatacttcatcttacatcgtcatgattgagtgatctttacatttgattccagaggctatgttcagttgttagttgggaaagattgagttatcagatttaatttgccgatgggagcctttatctgtcattagaaatctttctcatttaagaacttatgaatatgctgaagatttaatttgtgatacctttgtatgtatgagacacattccaaagagctctaactatgataggtcctgattactaaagaagcttctttactggcctcaatttctagctttcatgttggaaaattttctgcagtccttctgtgaaaattagagcaaagtgctcctgttttttagagaaactaaatcttgctgttgaacaattattgtgttcttttcatggaacataagtaggatgttacatttccagggtgggaagggtaatcctaaatcatttcccaatctattctaattaccttaaatctaaaggggaaaaaaaaaatcacaaacaggactgggtagttttttatcctaagtatattttttcctgttctttttacttggttttattgctgtatttatagccaatctatacatcatgggtaaacttaacccagaactataaaatgtagttgtctcagtcccctccaggcctcctgaatgggcaagtgcagtgaaacaggtgcttcttgctcctgggttttctctccatgatgttatgcccaattggaaatatgctgtcagtttgtgcaccatatggtgaccaggcctgtgctcagtttggcagctatagaaggaaatgctgtcccataaaatgccattcctattttctaatataaaactcttttccaggaagcatgcttaagcatcttgttacagagacatacatccattatggcttggcaatctcttttatttgttgactctagctcccttcaaagtcgaggaaagatctttactcacttaatgaggacattccccatcactgtctgtaccagttcacctttattttacgttttattcagtctgtaaattaactggccctttgcagtaacttgtacataaagtgctagaaaatcatgttccttgtcctgagtaagagttaatcagagtaaatgcatttctggagttgtttctgtgatgtaaattatgatcattatttaagaagtcaaatcctgatcttgaagtgctttttatacagctctctaataattacaaatatccgaaagtcatttcttggaacacaagtggagtatgccaaattttatatgaatttttcagattatctaagcttccaggttttataattagaagataatgagagaattaatggggtttatatttacattatctctcaactatgtagcccatattactcaccctatgagtgaatctggaattgcttttcatgtgaaatcattgtggtctatgagtttacaatactgcaaactgtgttattttatctaatccattgcttaatgagtgtgtttttccatgaatgaatataccgtggttcatatgttagcatggcagcattttcagatagctttttgtttgttgggaagttggggttttggggggagggggagtattagtacgttgcatgaaatagcttactttataatgatggaattgctttttcttttgtcttgtgatttttttttttgaagtgaaatttaactttttgtgcaagtagtactattatacccatcttcagtgtcttacttgtactgtatcacattccataccctcatttaattcttaataaaactgttcacttgtttttctgggtagcatggtaattactggaatagtataaatgtgttgaatggtctttgagaaaatgaattaagattacaataaaccacaattgcaggaaaacaatgtagttctgagtctaatagtgataaagaatgcagtttgaagtttgaaatattgaatattgtagctgtacttgctcattaaaatgaaagtagctgtgagatgctttcaacatttagtctattcagcacaactggtaaaccttaaagctcattcctgggaaattaatcttcttaacttataaaaaggaatatatttttatttctgtgtcatatgaaaacattcttaataagtttccaaatctcaaagttagtggtatttattgctattaaaagaaagagtaatcgcatatgtatattagacttcagtatgttaagtttccttgtgtgtgagcaattccctgatttccataataagagaatgatggtgcaaata

SEQ ID NO: 446662 - DNA, 4834 bp, Homo sapiens
  misc_feature (18)..(18): n is a, c, g, or t
  misc_feature (22)..(22): n is a, c, g, or t
  misc_feature (25)..(25): n is a, c, g, or t
ctgttctagaggatcccngctnccnacaagagggtatctcattaggtaattcagaggcagacagacaattgctggaagctgcaaaggctggagatgtcgaaactgtaaaaaaactgtgtactgttcagagtgtcaactgcagagacattgaagggcgtcagtctacaccacttcattttgcagctgggtataacagagtgtccgtggtggaatatctgctacagcatggagctgatgtgcatgctaaagataaaggaggccttgtacctttgcacaatgcatgttcttatggacattatgaagttgcagaacttcttgttaaacatggagcagtagttaatgtagctgatttatggaaatttacacctttacatgaagcagcagcaaaaggaaaatatgaaatttgcaaacttctgctccagcatggtgcagaccctacaaaaaaaaacagggatggaaatactcctttggatcttgttaaagatggagatacagatattcaagatctgcttaggggagatgcagctttgctagatgctgccaagaagggttgtttagccagagtgaagaagttgtcttctcctgataatgtaaattgccgcgatacccaaggcagacattcaacacctttacatttagcagctggttataataatttagaagttgcagagtatttgttacaacacggagctgatgtgaatgcccaagacaaaggaggacttattcctttacataatgcagcatcttacgggcatgtagatgtagcagctctactaataaagtataatgcatgtgtcaatgccacggacaaatgggctttcacacctttgcacgaagcagcccaaaagggacgaacacagctttgtgctttgttgctagcccatggagctgacccgactcttaaaaatcaggaaggacaaacacctttagatttagtttcagcggatgatgtcagcgctcttctgacagcagccatgcccccatctgctctgccctcttgttacaagcctcaagtgctcaatggtgtgagaagcccaggagccactgcagatgctctctcttcaggtccatctagcccatcaagcctttctgcagccagcagtcttgacaacttatctgggagtttttcagaactgtcttcagtagttagttcaagtggaacagagggtgcttccagtttggagaaaaaggaggttccaggagtagattttagcataactcaattcgtaaggaatcttggacttgagcacctaatggatatatttgagagagaacagatcactttggatgtattagttgagatggggcacaaggagctgaaggagattggaatcaatgcttatggacataggcacaaactaattaaaggagtcgagagacttatctccggacaacaaggtcttaacccatatttaactttgaacacctctggtagtggaacaattcttatagatctgtctcctgatgataaagagtttcagtctgtggaggaagagatgcaaagtacagttcgagagcacagagatggaggtcatgcaggtggaatcttcaacagatacaatattctcaagattcagaaggtttgtaacaagaaactatgggaaagatacactcaccggagaaaagaagtttctgaagaaaaccacaaccatgccaatgaacgaatgctatttcatgggtctccttttgtgaatgcaattatccacaaaggctttgatgaaaggcatgcgtacataggtggtatgtttggagctggcatttattttgctgaaaactcttccaaaagcaatcaatatgtatatggaattggaggaggtactgggtgtccagttcacaaagacagatcttgttacatttgccacaggcagctgctcttttgccgggtaaccttgggaaagtctttcctgcagttcagtgcaatgaaaatggcacattctcctccaggtcatcactcagtcactggtaggcccagtgtaaatggcctagcattagctgaatatgttatttacagaggagaacaggcttatcctgagtatttaattacttaccagattatgaggcctgaaggtatggtcgatggataaatagttattttaagaaactaattccactgaacctaaaatcatcaaagcagcagtggcctctacgttttactcctttgctgaaaaaaaatcatcttgcccacaggcctgtggcaaaaggataaaaatgtgaacgaagtttaacattctgacttgataaagctttaataatgtacagtgttttctaaatatttcctgttttttcagcactttaacagatgccattccaggttaaactgggttgtctgtactaaattataaacagagttaacttgaaccttttatatgttatgcattgattctaacaaactgtaatgccctcaacagaactaattttactaatacaatactgtgttctttaaaacacagcatttacactgaatacaatttcatttgtaaaactgtaaataagagcttttgtactagcccagtatttatttacattgctttgtaatataaatctgttttagaactgcagcggtttacaaaattttttcatatgtattgttcatctatacttcatcttacatcgtcatgattgagtgatctttacatttgattccagaggctatgttcagttgttagttgggaaagattgagttatcagatttaatttgccgatgggagcctttatctgtcattagaaatctttctcatttaagaacttatgaatatgctgaagatttaatttgtgatacctttgtatgtatgagacacattccaaagagctctaactatgataggtcctgattactaaagaagcttctttactggcctcaatttctagctttcatgttggaaaattttctgcagtccttctgtgaaaattagagcaaagtgctcctgttttttagagaaactaaatcttgctgttgaacaattattgtgttcttttcatggaacataagtaggatgttacatttccagggtgggaagggtaatcctaaatcatttcccaatctattctaattaccttaaatctaaaggggaaaaaaaaaatcacaaacaggactgggtagttttttatcctaagtatattttttcctgttctttttacttggttttattgctgtatttatagccaatctatacatcatgggtaaacttaacccagaactataaaatgtagttgtctcagtcccctccaggcctcctgaatgggcaagtgcagtgaaacaggtgcttcttgctcctgggttttctctccatgatgttatgcccaattggaaatatgctgtcagtttgtgcaccatatggtgaccaggcctgtgctcagtttggcagctatagaaggaaatgctgtcccataaaatgccattcctattttctaatataaaactcttttccaggaagcatgcttaagcatcttgttacagagacatacatccattatggcttggcaatctcttttatttgttgactctagctcccttcaaagtcgaggaaagatctttactcacttaatgaggacattccccatcactgtctgtaccagttcacctttattttacgttttattcagtctgtaaattaactggccctttgcagtaacttgtacataaagtgctagaaaatcatgttccttgtcctgagtaagagttaatcagagtaaatgcatttctggagttgtttctgtgatgtaaattatgatcattatttaagaagtcaaatcctgatcttgaagtgctttttatacagctctctaataattacaaatatccgaaagtcatttcttggaacacaagtggagtatgccaaattttatatgaatttttcagattatctaagcttccaggttttataattagaagataatgagagaattaatggggtttatatttacattatctctcaactatgtagcccatattactcaccctatgagtgaatctggaattgcttttcatgtgaaatcattgtggtctatgagtttacaatactgcaaactgtgttattttatctaatccattgcttaatgagtgtgtttttccatgaatgaatataccgtggttcatatgttagcatggcagcattttcagatagctttttgtttgttgggaagttggggttttggggggagggggagtattagtacgttgcatgaaatagcttactttataatgatggaattgctttttcttttgtcttgtgatttttttttttgaagtgaaatttaactttttgtgcaagtagtactattatacccatcttcagtgtcttacttgtactgtatcacattccataccctcatttaattcttaataaaactgttcacttgtttttctgggtagcatggtaattactggaatagtataaatgtgttgaatggtctttgagaaaatgaattaagattacaataaaccacaattgcaggaaaacaatgtagttctgagtctaatagtgataaagaatgcagtttgaagtttgaaatattgaatattgtagctgtacttgctcattaaaatgaaagtagctgtgagatgctttcaacatttagtctattcagcacaactggtaaaccttaaagctcattcctgggaaattaatcttcttaacttataaaaaggaatatatttttatttctgtgtcatatgaaaacattcttaataagtttccaaatctcaaagttagtggtatttattgctattaaaagaaagagtaatcgcatatgtatattagacttcagtatgttaagtttccttgtgtgtgagcaattccctgatttccataataagagaatgatggtgcaaata

SEQ ID NO: 446663 - DNA, 4068 bp, Homo sapiens
atttcctttgagcttcacgtcaacattttaaaattttcagatttgggatgtttgacctgtattaacctgtttgcttcactttttaaaatgaataatcctccattgtgatagtactggcacaaattgctgggttttctcatatttttaaatatattttattaggtataatagcattttaaaacttgcttatggcagatgttgtctctgacacgtaccctaggcggatgatgtcagcgctcttctgacagcagccatgcccccatctgctctgccctcttgttacaagcctcaagtgctcaatggtgtgagaagcccaggagccactgcagatgctctctcttcaggtccatctagcccatcaagcctttctgcagccagcagtcttgacaacttatctgggagtttttcagaactgtcttcagtagttagttcaagtggaacagagggtgcttccagtttggagaaaaaggagggacttgagcacctaatggatatatttgagagagaacagatcactttggatgtattagttgagatggggcacaaggagctgaaggagattggaatcaatgcttatggacataggcacaaactaattaaaggagtcgagagacttatctccggacaacaaggtcttaacccatatttaactttgaacacctctggtagtggaacaattcttatagatctgtctcctgatgataaagagtttcagtctgtggaggaagagatgcaaagtacagttcgagagcacagagatggaggtcatgcaggtggaatcttcaacagatacaatattctcaagattcagaaggtttgtaacaagaaactatgggaaagatacactcaccggagaaaagaagtttctgaagaaaaccacaaccatgccaatgaacgaatgctatttcatgggtctccttttgtgaatgcaattatccacaaaggctttgatgaaaggcatgcgtacataggtggtatgtttggagctggcatttattttgctgaaaactcttccaaaagcaatcaatatgtatatggaattggaggaggtactgggtgtccagttcacaaagacagatcttgttacatttgccacaggcagctgctcttttgccgggtaaccttgggaaagtctttcctgcagttcagtgcaatgaaaatggcacattctcctccaggtcatcactcagtcactggtaggcccagtgtaaatggcctagcattagctgaatatgttatttacagaggagaacaggcttatcctgagtatttaattacttaccagattatgaggcctgaaggtatggtcgatggataaatagttattttaagaaactaattccactgaacctaaaatcatcaaagcagcagtggcctctacgttttactcctttgctgaaaaaaaatcatcttgcccacaggcctgtggcaaaaggataaaaatgtgaacgaagtttaacattctgacttgataaagctttaataatgtacagtgttttctaaatatttcctgttttttcagcactttaacagatgccattccaggttaaactgggttgtctgtactaaattataaacagagttaacttgaaccttttatatgttatgcattgattctaacaaactgtaatgccctcaacagaactaattttactaatacaatactgtgttctttaaaacacagcatttacactgaatacaatttcatttgtaaaactgtaaataagagcttttgtactagcccagtatttatttacattgctttgtaatataaatctgttttagaactgcagcggtttacaaaattttttcatatgtattgttcatctatacttcatcttacatcgtcatgattgagtgatctttacatttgattccagaggctatgttcagttgttagttgggaaagattgagttatcagatttaatttgccgatgggagcctttatctgtcattagaaatctttctcatttaagaacttatgaatatgctgaagatttaatttgtgatacctttgtatgtatgagacacattccaaagagctctaactatgataggtcctgattactaaagaagcttctttactggcctcaatttctagctttcatgttggaaaattttctgcagtccttctgtgaaaattagagcaaagtgctcctgttttttagagaaactaaatcttgctgttgaacaattattgtgttcttttcatggaacataagtaggatgttacatttccagggtgggaagggtaatcctaaatcatttcccaatctattctaattaccttaaatctaaaggggaaaaaaaaaatcacaaacaggactgggtagttttttatcctaagtatattttttcctgttctttttacttggttttattgctgtatttatagccaatctatacatcatgggtaaacttaacccagaactataaaatgtagttgtctcagtcccctccaggcctcctgaatgggcaagtgcagtgaaacaggtgcttcttgctcctgggttttctctccatgatgttatgcccaattggaaatatgctgtcagtttgtgcaccatatggtgaccaggcctgtgctcagtttggcagctatagaaggaaatgctgtcccataaaatgccattcctattttctaatataaaactcttttccaggaagcatgcttaagcatcttgttacagagacatacatccattatggcttggcaatctcttttatttgttgactctagctcccttcaaagtcgaggaaagatctttactcacttaatgaggacattccccatcactgtctgtaccagttcacctttattttacgttttattcagtctgtaaattaactggccctttgcagtaacttgtacataaagtgctagaaaatcatgttccttgtcctgagtaagagttaatcagagtaaatgcatttctggagttgtttctgtgatgtaaattatgatcattatttaagaagtcaaatcctgatcttgaagtgctttttatacagctctctaataattacaaatatccgaaagtcatttcttggaacacaagtggagtatgccaaattttatatgaatttttcagattatctaagcttccaggttttataattagaagataatgagagaattaatggggtttatatttacattatctctcaactatgtagcccatattactcaccctatgagtgaatctggaattgcttttcatgtgaaatcattgtggtctatgagtttacaatactgcaaactgtgttattttatctaatccattgcttaatgagtgtgtttttccatgaatgaatataccgtggttcatatgttagcatggcagcattttcagatagctttttgtttgttgggaagttggggttttggggggagggggagtattagtacgttgcatgaaatagcttactttataatgatggaattgctttttcttttgtcttgtgatttttttttttgaagtgaaatttaactttttgtgcaagtagtactattatacccatcttcagtgtcttacttgtactgtatcacattccataccctcatttaattcttaataaaactgttcacttgtttttctgggtagcatggtaattactggaatagtataaatgtgttgaatggtctttgagaaaatgaattaagattacaataaaccacaattgcaggaaaacaatgtagttctgagtctaatagtgataaagaatgcagtttgaagtttgaaatattgaatattgtagctgtacttgctcattaaaatgaaagtagctgtgagatgctttcaacatttagtctattcagcacaactggtaaaccttaaagctcattcctgggaaattaatcttcttaacttataaaaaggaatatatttttatttctgtgtcatatgaaaacattcttaataagtttccaaatctcaaagttagtggtatttattgctattaaaagaaagagtaatcgcatatgtatattagacttcagtatgttaagtttccttgtgtgtgagcaattccctgatttccataataagagaatgatggtgcaaata

SEQ ID NO: 446664 - DNA, 2945 bp, Homo sapiens
tgtccctagatgattctgatctacaacagtaatttagaacctcctccctaagattaggaatacttccggaaagtctgtttatctttcaagaaaatttttgtaccattatttgaatttatctttctcttccaggcttatcctgagtatttaattacttaccagattatgaggcctgaaggtatggtcgatggataaatagttattttaagaaactaattccactgaacctaaaatcatcaaagcagcagtggcctctacgttttactcctttgctgaaaaaaaatcatcttgcccacaggcctgtggcaaaaggataaaaatgtgaacgaagtttaacattctgacttgataaagctttaataatgtacagtgttttctaaatatttcctgttttttcagcactttaacagatgccattccaggttaaactgggttgtctgtactaaattataaacagagttaacttgaaccttttatatgttatgcattgattctaacaaactgtaatgccctcaacagaactaattttactaatacaatactgtgttctttaaaacacagcatttacactgaatacaatttcatttgtaaaactgtaaataagagcttttgtactagcccagtatttatttacattgctttgtaatataaatctgttttagaactgcagcggtttacaaaattttttcatatgtattgttcatctatacttcatcttacatcgtcatgattgagtgatctttacatttgattccagaggctatgttcagttgttagttgggaaagattgagttatcagatttaatttgccgatgggagcctttatctgtcattagaaatctttctcatttaagaacttatgaatatgctgaagatttaatttgtgatacctttgtatgtatgagacacattccaaagagctctaactatgataggtcctgattactaaagaagcttctttactggcctcaatttctagctttcatgttggaaaattttctgcagtccttctgtgaaaattagagcaaagtgctcctgttttttagagaaactaaatcttgctgttgaacaattattgtgttcttttcatggaacataagtaggatgttacatttccagggtgggaagggtaatcctaaatcatttcccaatctattctaattaccttaaatctaaaggggaaaaaaaaaatcacaaacaggactgggtagttttttatcctaagtatattttttcctgttctttttacttggttttattgctgtatttatagccaatctatacatcatgggtaaacttaacccagaactataaaatgtagttgtctcagtcccctccaggcctcctgaatgggcaagtgcagtgaaacaggtgcttcttgctcctgggttttctctccatgatgttatgcccaattggaaatatgctgtcagtttgtgcaccatatggtgaccaggcctgtgctcagtttggcagctatagaaggaaatgctgtcccataaaatgccattcctattttctaatataaaactcttttccaggaagcatgcttaagcatcttgttacagagacatacatccattatggcttggcaatctcttttatttgttgactctagctcccttcaaagtcgaggaaagatctttactcacttaatgaggacattccccatcactgtctgtaccagttcacctttattttacgttttattcagtctgtaaattaactggccctttgcagtaacttgtacataaagtgctagaaaatcatgttccttgtcctgagtaagagttaatcagagtaaatgcatttctggagttgtttctgtgatgtaaattatgatcattatttaagaagtcaaatcctgatcttgaagtgctttttatacagctctctaataattacaaatatccgaaagtcatttcttggaacacaagtggagtatgccaaattttatatgaatttttcagattatctaagcttccaggttttataattagaagataatgagagaattaatggggtttatatttacattatctctcaactatgtagcccatattactcaccctatgagtgaatctggaattgcttttcatgtgaaatcattgtggtctatgagtttacaatactgcaaactgtgttattttatctaatccattgcttaatgagtgtgtttttccatgaatgaatataccgtggttcatatgttagcatggcagcattttcagatagctttttgtttgttgggaagttggggttttggggggagggggagtattagtacgttgcatgaaatagcttactttataatgatggaattgctttttcttttgtcttgtgatttttttttttgaagtgaaatttaactttttgtgcaagtagtactattatacccatcttcagtgtcttacttgtactgtatcacattccataccctcatttaattcttaataaaactgttcacttgtttttctgggtagcatggtaattactggaatagtataaatgtgttgaatggtctttgagaaaatgaattaagattacaataaaccacaattgcaggaaaacaatgtagttctgagtctaatagtgataaagaatgcagtttgaagtttgaaatattgaatattgtagctgtacttgctcattaaaatgaaagtagctgtgagatgctttcaacatttagtctattcagcacaactggtaaaccttaaagctcattcctgggaaattaatcttcttaacttataaaaaggaatatatttttatttctgtgtcatatgaaaacattcttaataagtttccaaatctcaaagttagtggtatttattgctattaaaagaaagagtaatcgcatatgtatattagacttcagtatgttaagtttccttgtgtgtgagcaattccctgatttccataataagagaatgatggtgcaaata

SEQ ID NO: 446665 - DNA, 3682 bp, Homo sapiens
  misc_feature (2)..(2): n is a, c, g, or t
  misc_feature (4)..(4): n is a, c, g, or t
  misc_feature (7)..(7): n is a, c, g, or t
gncncgnggctggacggagctggcaggaggggccttgccagcttccgccgccgcgtcgtttcaggacccggacggcggattcgcgctgcctccgccgccgcggggcagccggggggcagggagcccagcgaggggcgcgcgtgggcgcggccatgggactgcgccggatccggtgacagcagggagccaagcggcccgggccctgagcgcgtcttctccggggggcctcgccctcctgctcgcggggccggggctcctgctccggttgctggcgctgttgctggctgtggcggcggccaggatcatgtcgggtcgccgctgcgccggcgggggagcggcctgcgcgagcgccgcggccgaggccgtggagccggccgcccgagagctgttcgaggcgtgccgcaacggggacgtggaacgagtcaagaggctggtgacgcctgagaaggtgaacagccgcgacacggcgggcaggaaatccaccccgctgcacttcgccgcaggttttgggcggaaagacgtagttgaatatttgcttcagaatggtgcaaatgtccaagcacgtgatgatgggggccttattcctcttcataatgcatgctcttttggtcatgctgaagtagtcaatctccttttgcgacatggtgcagaccccaatgctcgagataattggaattatactcctctccatgaagctgcaattaaaggaaagattgatgtttgcattgtgctgttacagcatggagctgagccaaccatccgaaatacagatggaaggacagcattggatttagcagatccatctgccaaagcagtgcttactggtgaatataagaaagatgaactcttagaaagtgccaggagtggcaatgaagaaaaaatgatggctctactcacaccattaaatgtcaactgccacgcaagtgatggcagaaagtcaactccattacatttggcagcaggatataacagagtaaagattgtacagctgttactgcaacatggagctgatgtccatgctaaagataaaggtgatctggtaccattacacaatgcctgttcttatggtcattatgaagtaactgaacttttggtcaagcatggtgcctgtgtaaatgcaatggacttgtggcaattcactcctcttcatgaggcagcttctaagaacagggttgaagtatgttctcttctcttaagttatggtgcagacccaacactgctcaattgtcacaataaaagtgctatagacttggctcccacaccacagttaaaagaaagattagcatatgaatttaaaggccactcgttgctgcaagctgcacgagaagctgatgttactcgaatcaaaaaacatctctctctggaaatggtgaatttcaagcatcctcaaacacatgaaacagcattgcattgtgctgctgcatctccatatcccaaaagaaagcaaatatgtgaactgttgctaagaaaaggagcaaacatcaatgaaaagactaaagaattcttgactcctctgcacgtggcatctgagaaagctcataatgatgttgttgaagtagtggtgaaacatgaagcaaaggttaatgctctggataatcttggtcagacttctctacacagagctgcatattgtggtcatctacaaacctgccgcctactcctgagctatgggtgtgatcctaacattatatcccttcagggctttactgctttacagatgggaaatgaaaatgtacagcaactcctccaagagggtatctcattaggtaattcagaggcagacagacaattgctggaagctgcaaaggctggagatgtcgaaactgtaaaaaaactgtgtactgttcagagtgtcaactgcagagacattgaagggcgtcagtctacaccacttcattttgcagctgggtataacagagtgtccgtggtggaatatctgctacagcatggagctgatgtgcatgctaaagataaaggaggccttgtacctttgcacaatgcatgttcttatggacattatgaagttgcagaacttcttgttaaacatggagcagtagttaatgtagctgatttatggaaatttacacctttacatgaagcagcagcaaaaggaaaatatgaaatttgcaaacttctgctccagcatggtgcagaccctacaaaaaaaaacagggatggaaatactcctttggatcttgttaaagatggagatacagatattcaagatctgcttaggggagatgcagctttgctagatgctgccaagaagggttgtttagccagagtgaagaagttgtcttctcctgataatgtaaattgccgcgatacccaaggcagacattcaacacctttacatttagcaggtaagtgaatgaagtttcacagatttaggctggtaatatctgagattcattttacccaggtaaaatattttctgtaactaaactttaaaaattcaaatcaggccaagcatggtggctcacacttgtaatcccaacactttatgaggctaaggcaggaggattgcttgagcccaggaatttgagagcagcctgggcaacatggcaaaaccacacctctataaaaaattacaaaaattagccaggagtggtggtgtgcacctgtagtcccagctattcaggaggctgaggtgggaagattgagcccaggaggtcacggatgcaataagccttgattgtgccactgtactccagaaacaaagtgagaccctgtctcaaaaaataaaaaaaataaataaaaattcaaatcaagtatcttctaatgccaccattatactcttcagtgtatttgtacaggacgaccgtacttgaagctattagctgagttcgagttcactttattactagtatgttacattcagtaagaacaattgaagtaggctctgccagtccccatgtgctttgggaatcattattccaggtaatcattttattggtatcacctttggtaaacaagtttgaaaaatatgcctacttgagccagccttccttataggaagctaaagctttctatttttcctgatggtagctgctaagcacaagcaggaaaaaaaaaaaatctcaaaactctcagaagttacataagcctctcaccaaagttatctgtggtatgggttggtgagagttctcataacaaaataccaaagaccaggtggcttaaacaacagaaatttgttttctcacagttctggaggctaggagtccaagttcaaggtgttggcagagttggtttcttctgaaaccccctcttggcttgcagctgtctaccttctcagtgtgtcctccattggaacatggtgtctctttctatatgtcctagtctctacttttaaggaaaccagtcaaattagattagagcccaccctaatgggctcattttaacttttttagctctttaaaggctctgtctccaaatagagtcatattctaaggtactggggttagggcttcaacataagaattttgcagggtacaattcatttcgtgacatttgttttaaggtttcactcataaaactggcacagtgtacctttgttttcagtgcaaatatacaatatattgtggtttcagtacagctttttcagctgcattacagatgttaggaaatcattaaaatcactgagctatagctaatacctcagtggagttccatcatagacaca

SEQ ID NO: 446666 - DNA, 1231 bp, Homo sapiens
  misc_feature (2)..(2): n is a, c, g, or t
  misc_feature (4)..(4): n is a, c, g, or t
  misc_feature (7)..(7): n is a, c, g, or t
gncncgnggctggacggagctggcaggaggggccttgccagcttccgccgccgcgtcgtttcaggacccggacggcggattcgcgctgcctccgccgccgcggggcagccggggggcagggagcccagcgaggggcgcgcgtgggcgcggccatgggactgcgccggatccggtgacagcagggagccaagcggcccgggccctgagcgcgtcttctccggggggcctcgccctcctgctcgcggggccggggctcctgctccggttgctggcgctgttgctggctgtggcggcggccaggatcatgtcgggtcgccgctgcgccggcgggggagcggcctgcgcgagcgccgcggccgaggccgtggagccggccgcccgagagctgttcgaggcgtgccgcaacggggacgtggaacgagtcaagaggctggtgacgcctgagaaggtgaacagccgcgacacggcgggcaggaaatccaccccgctgcacttcgccgcaggttttgggcggaaagacgtagttgaatatttgcttcagaatggtgcaaatgtccaagcacgtgatgatgggggccttattcctcttcataatgcatgctcttttggtcatgctgaagtagtcaatctccttttgcgacatggtgcagaccccaatgctcgagataattggaattatactcctctccatgaagctgcaattaaaggaaagattgatgtttgcattgtgctgttacagcatggagctgagccaaccatccgaaatacagatggaaggacagcattggatttagcagatccatctgccaaagcagtgcttactggtaagtctgtatactctggttattccaggaagcctgtaaagaacaaccttgccaggtaggaaatttgcctcctatgattaatgacttcagctagatttttaaaatagtgtcagttcagtagctatccttttctacgtctagatagctgacattttattctcctctaagaaaaataaagctttctttttattttctaattgctgtttaagtatgtcattgttgccttattgggggtgagggtgatagataattgtatgttgctttagtatattcaggacattttttaaatacccctgagtttttcagataacttatgcctgccctttacatgcaggttgagtatttctaacccaaacttcaaaacacttctggtcttaagcatttcagataagggatattcaagctgt

SEQ ID NO: 446667 - DNA, 222 bp, Homo sapiens
gtaatatttaactgcctctgtattctttttataataattctttgtataaacattagtaacagtgatgttaaccttcaaagtagagtctcaatataaatttagtttttctttggtatagttaacactgactattttctcattgaccaaaggcacatttaagccatttccccctttttttctgtttttcacatgcctagcatggtgcagaccctacaaaaaaaa

SEQ ID NO: 446668 - DNA, 536 bp, Homo sapiens
attttagcataactcaattcgtaaggaatcttggacttgagcacctaatggatatatttgagagagaacaggtgagtagataaatcatattgtttggattagtgttttatggaaactcaaggaaaatttggaacatacttgaaatgagctgaaccatgtaagctattgggggagaatgttttttaagaaatgacatcagtcagccttctaatttggcttgaccttgaaacttccatttagtttattcgcacacagttgactcgagtagtaatggtaaagtagctttcttgaatggaaagtttagcttattcagttcttgaagtaagttatccttgagcactgtctattcagttctctctcaagcctgacacttttctagctgctatgggaaggtatatgaatatgccagccatatctgggcttttctaagcagtctcagtttaaagtactctgtcagaatacatttactgatttttgttgttgttcagaaaataatgttactgtagatttgcactctaagggactttcattgtagt

SEQ ID NO: 446669 - DNA, 462 bp, Homo sapiens
aaaagaaagcaaatatgtgaactgttgctaagaaaaggagcaaacatcaatgaaaagactaaagagtaagtatacatttaatgattaaatatcattgagattttactcttttggaaaatatattcactgtctggctgattttttctctctaagattcttgactcctctgcacgtggcatctgagaaagctcataatgatgttgttgaagtagtggtgaaacatgaagcaaaggtatacttcctttttggtaatctttggtaatccaatgagttattttttatttagcaggtgaaatgcctgacttcctaaactatttactttctcataagtattacttttttttccttataatctatgcttaagaattgtcctgcaggtaaccttttctatatctaatttttgctagaacatctatgggtttattcagatacacattcctgtatgtcctccctcctccattc

SEQ ID NO: 446670 - DNA, 4278 bp, Homo sapiens
  misc_feature (2)..(2): n is a, c, g, or t
  misc_feature (4)..(4): n is a, c, g, or t
  misc_feature (7)..(7): n is a, c, g, or t
gncncgnggctggacggagctggcaggaggggccttgccagcttccgccgccgcgtcgtttcaggacccggacggcggattcgcgctgcctccgccgccgcggggcagccggggggcagggagcccagcgaggggcgcgcgtgggcgcggccatgggactgcgccggatccggtgacagcagggagccaagcggcccgggccctgagcgcgtcttctccggggggcctcgccctcctgctcgcggggccggggctcctgctccggttgctggcgctgttgctggctgtggcggcggccaggatcatgtcgggtcgccgctgcgccggcgggggagcggcctgcgcgagcgccgcggccgaggccgtggagccggccgcccgagagctgttcgaggcgtgccgcaacggggacgtggaacgagtcaagaggctggtgacgcctgagaaggtgaacagccgcgacacggcgggcaggaaatccaccccgctgcacttcgccgcaggttttgggcggaaagacgtagttgaatatttgcttcagaatggtgcaaatgtccaagcacgtgatgatgggggccttattcctcttcataatgcatgctcttttggtcatgctgaagtagtcaatctccttttgcgacatggtgcagaccccaatgctcgagataattggaattatactcctctccatgaagctgcaattaaaggaaagattgatgtttgcattgtgctgttacagcatggagctgagccaaccatccgaaatacagatggaaggacagcattggatttagcagatccatctgccaaagcagtgcttactggtgaatataagaaagatgaactcttagaaagtgccaggagtggcaatgaagaaaaaatgatggctctactcacaccattaaatgtcaactgccacgcaagtgatggcagaaagtcaactccattacatttggcagcaggatataacagagtaaagattgtacagctgttactgcaacatggagctgatgtccatgctaaagataaaggtgatctggtaccattacacaatgcctgttcttatggtcattatgaagtaactgaacttttggtcaagcatggtgcctgtgtaaatgcaatggacttgtggcaattcactcctcttcatgaggcagcttctaagaacagggttgaagtatgttctcttctcttaagttatggtgcagacccaacactgctcaattgtcacaataaaagtgctatagacttggctcccacaccacagttaaaagaaagattagcatatgaatttaaaggccactcgttgctgcaagctgcacgagaagctgatgttactcgaatcaaaaaacatctctctctggaaatggtgaatttcaagcatcctcaaacacatgaaacagcattgcattgtgctgctgcatctccatatcccaaaagaaagcaaatatgtgaactgttgctaagaaaaggagcaaacatcaatgaaaagactaaagaattcttgactcctctgcacgtggcatctgagaaagctcataatgatgttgttgaagtagtggtgaaacatgaagcaaaggttaatgctctggataatcttggtcagacttctctacacagagctgcatattgtggtcatctacaaacctgccgcctactcctgagctatgggtgtgatcctaacattatatcccttcagggctttactgctttacagatgggaaatgaaaatgtacagcaactcctccaagagggtatctcattaggtaattcagaggcagacagacaattgctggaagctgcaaaggctggagatgtcgaaactgtaaaaaaactgtgtactgttcagagtgtcaactgcagagacattgaagggcgtcagtctacaccacttcattttgcagctgggtataacagagtgtccgtggtggaatatctgctacagcatggagctgatgtgcatgctaaagataaaggaggccttgtacctttgcacaatgcatgttcttatggacattatgaagttgcagaacttcttgttaaacatggagcagtagttaatgtagctgatttatggaaatttacacctttacatgaagcagcagcaaaaggaaaatatgaaatttgcaaacttctgctccagcatggtgcagaccctacaaaaaaaaacagggatggaaatactcctttggatcttgttaaagatggagatacagatattcaagatctgcttaggggagatgcagctttgctagatgctgccaagaagggttgtttagccagagtgaagaagttgtcttctcctgataatgtaaattgccgcgatacccaaggcagacattcaacacctttacatttagcagctggttataataatttagaagttgcagagtatttgttacaacacggagctgatgtgaatgcccaagacaaaggaggacttattcctttacataatgcagcatcttacgggcatgtagatgtagcagctctactaataaagtataatgcatgtgtcaatgccacggacaaatgggctttcacacctttgcacgaagcagcccaaaagggacgaacacagctttgtgctttgttgctagcccatggagctgacccgactcttaaaaatcaggaaggacaaacacctttagatttagtttcagcggatgatgtcagcgctcttctgacagcagccatgcccccatctgctctgccctcttgttacaagcctcaagtgctcaatggtgtgagaagcccaggagccactgcagatgctctctcttcaggtccatctagcccatcaagcctttctgcagccagcagtcttgacaacttatctgggagtttttcagaactgtcttcagtagttagttcaagtggaacagagggtgcttccagtttggagaaaaaggaggttccaggagtagattttagcataactcaattcgtaaggaatcttggacttgagcacctaatggatatatttgagagagaacagatcactttggatgtattagttgagatggggcacaaggagctgaaggagattggaatcaatgcttatggacataggcacaaactaattaaaggagtcgagagacttatctccggacaacaaggtcttaacccatatttaactttgaacacctctggtagtggaacaattcttatagatctgtctcctgatgataaagagtttcagtctgtggaggaagagatgcaaagtacagttcgagagcacagagatggaggtcatgcaggtggaatcttcaacagatacaatattctcaagattcagaaggtttgtaacaagaaactatgggaaagatacactcaccggagaaaagaagtttctgaagaaaaccacaaccatgccaatgaacgaatgctatttcatgggtctccttttgtgaatgcaattatccacaaaggctttgatgaaaggcatgcgtacataggtggtatgtttggagctggcatttattttgctgaaaactcttccaaaagcaatcaatatgtatatggaattggaggaggtactgggtgtccagttcacaaagacagatcttgttacatttgccacaggcagctgctcttttgccgggtaaccttgggaaagtctttcctgcagttcagtgcaatgaaaatggcacattctcctccaggtcatcactcagtcactggtaggcccagtgtaaatggcctagcattagctgaatatgttatttacagaggagaacaggcttatcctgagtatttaattacttaccagattatgaggcctgaaggtatggtcgatggataaatagttattttaagaaactaattccactgaacctaaaatcatcaaagcagcagtggcctctacgttttactcctttgctgaaaaaaaatcatcttgcccacaggcctgtggcaaaaggataaaaatgtgaacgaagtttaacattctgacttgataaagctttaataatgtacagtgttttctaaatatttcctgttttttcagcactttaacagatgccattccaggttaaactgggttgtctgtactaaattataaacagagttaacttgaaccttttatatgttatgcattgattctaacaaactgtaatgccctcaacagaactaattttactaatacaatactgtgttctttaaaacacagcatttacactgaatacaatttcatttgtaaaactgtaaataagagcttttgtactagcccagtatttatttacattgctttgtaatataaatctgttttagaactgc

SEQ ID NO: 446671 - DNA, 6291 bp, Homo sapiens
  misc_feature (2)..(2): n is a, c, g, or t
  misc_feature (4)..(4): n is a, c, g, or t
  misc_feature (7)..(7): n is a, c, g, or t
gncncgnggctggacggagctggcaggaggggccttgccagcttccgccgccgcgtcgtttcaggacccggacggcggattcgcgctgcctccgccgccgcggggcagccggggggcagggagcccagcgaggggcgcgcgtgggcgcggccatgggactgcgccggatccggtgacagcagggagccaagcggcccgggccctgagcgcgtcttctccggggggcctcgccctcctgctcgcggggccggggctcctgctccggttgctggcgctgttgctggctgtggcggcggccaggatcatgtcgggtcgccgctgcgccggcgggggagcggcctgcgcgagcgccgcggccgaggccgtggagccggccgcccgagagctgttcgaggcgtgccgcaacggggacgtggaacgagtcaagaggctggtgacgcctgagaaggtgaacagccgcgacacggcgggcaggaaatccaccccgctgcacttcgccgcaggttttgggcggaaagacgtagttgaatatttgcttcagaatggtgcaaatgtccaagcacgtgatgatgggggccttattcctcttcataatgcatgctcttttggtcatgctgaagtagtcaatctccttttgcgacatggtgcagaccccaatgctcgagataattggaattatactcctctccatgaagctgcaattaaaggaaagattgatgtttgcattgtgctgttacagcatggagctgagccaaccatccgaaatacagatggaaggacagcattggatttagcagatccatctgccaaagcagtgcttactggtgaatataagaaagatgaactcttagaaagtgccaggagtggcaatgaagaaaaaatgatggctctactcacaccattaaatgtcaactgccacgcaagtgatggcagaaagtcaactccattacatttggcagcaggatataacagagtaaagattgtacagctgttactgcaacatggagctgatgtccatgctaaagataaaggtgatctggtaccattacacaatgcctgttcttatggtcattatgaagtaactgaacttttggtcaagcatggtgcctgtgtaaatgcaatggacttgtggcaattcactcctcttcatgaggcagcttctaagaacagggttgaagtatgttctcttctcttaagttatggtgcagacccaacactgctcaattgtcacaataaaagtgctatagacttggctcccacaccacagttaaaagaaagattagcatatgaatttaaaggccactcgttgctgcaagctgcacgagaagctgatgttactcgaatcaaaaaacatctctctctggaaatggtgaatttcaagcatcctcaaacacatgaaacagcattgcattgtgctgctgcatctccatatcccaaaagaaagcaaatatgtgaactgttgctaagaaaaggagcaaacatcaatgaaaagactaaagaattcttgactcctctgcacgtggcatctgagaaagctcataatgatgttgttgaagtagtggtgaaacatgaagcaaaggttaatgctctggataatcttggtcagacttctctacacagagctgcatattgtggtcatctacaaacctgccgcctactcctgagctatgggtgtgatcctaacattatatcccttcagggctttactgctttacagatgggaaatgaaaatgtacagcaactcctccaagagggtatctcattaggtaattcagaggcagacagacaattgctggaagctgcaaaggctggagatgtcgaaactgtaaaaaaactgtgtactgttcagagtgtcaactgcagagacattgaagggcgtcagtctacaccacttcattttgcagctgggtataacagagtgtccgtggtggaatatctgctacagcatggagctgatgtgcatgctaaagataaaggaggccttgtacctttgcacaatgcatgttcttatggacattatgaagttgcagaacttcttgttaaacatggagcagtagttaatgtagctgatttatggaaatttacacctttacatgaagcagcagcaaaaggaaaatatgaaatttgcaaacttctgctccagcatggtgcagaccctacaaaaaaaaacagggatggaaatactcctttggatcttgttaaagatggagatacagatattcaagatctgcttaggggagatgcagctttgctagatgctgccaagaagggttgtttagccagagtgaagaagttgtcttctcctgataatgtaaattgccgcgatacccaaggcagacattcaacacctttacatttagcagctggttataataatttagaagttgcagagtatttgttacaacacggagctgatgtgaatgcccaagacaaaggaggacttattcctttacataatgcagcatcttacgggcatgtagatgtagcagctctactaataaagtataatgcatgtgtcaatgccacggacaaatgggctttcacacctttgcacgaagcagcccaaaagggacgaacacagctttgtgctttgttgctagcccatggagctgacccgactcttaaaaatcaggaaggacaaacacctttagatttagtttcagcggatgatgtcagcgctcttctgacagcagccatgcccccatctgctctgccctcttgttacaagcctcaagtgctcaatggtgtgagaagcccaggagccactgcagatgctctctcttcaggtccatctagcccatcaagcctttctgcagccagcagtcttgacaacttatctgggagtttttcagaactgtcttcagtagttagttcaagtggaacagagggtgcttccagtttggagaaaaaggaggttccaggagtagattttagcataactcaattcgtaaggaatcttggacttgagcacctaatggatatatttgagagagaacagatcactttggatgtattagttgagatggggcacaaggagctgaaggagattggaatcaatgcttatggacataggcacaaactaattaaaggagtcgagagacttatctccggacaacaaggtcttaacccatatttaactttgaacacctctggtagtggaacaattcttatagatctgtctcctgatgataaagagtttcagtctgtggaggaagagatgcaaagtacagttcgagagcacagagatggaggtcatgcaggtggaatcttcaacagatacaatattctcaagattcagaaggtttgtaacaagaaactatgggaaagatacactcaccggagaaaagaagtttctgaagaaaaccacaaccatgccaatgaacgaatgctatttcatgggtctccttttgtgaatgcaattatccacaaaggctttgatgaaaggcatgcgtacataggtggtatgtttggagctggcatttattttgctgaaaactcttccaaaagcaatcaatatgtatatggaattggaggaggtactgggtgtccagttcacaaagacagatcttgttacatttgccacaggcagctgctcttttgccgggtaaccttgggaaagtctttcctgcagttcagtgcaatgaaaatggcacattctcctccaggtcatcactcagtcactggtaggcccagtgtaaatggcctagcattagctgaatatgttatttacagaggagaacaggcttatcctgagtatttaattacttaccagattatgaggcctgaaggtatggtcgatggataaatagttattttaagaaactaattccactgaacctaaaatcatcaaagcagcagtggcctctacgttttactcctttgctgaaaaaaaatcatcttgcccacaggcctgtggcaaaaggataaaaatgtgaacgaagtttaacattctgacttgataaagctttaataatgtacagtgttttctaaatatttcctgttttttcagcactttaacagatgccattccaggttaaactgggttgtctgtactaaattataaacagagttaacttgaaccttttatatgttatgcattgattctaacaaactgtaatgccctcaacagaactaattttactaatacaatactgtgttctttaaaacacagcatttacactgaatacaatttcatttgtaaaactgtaaataagagcttttgtactagcccagtatttatttacattgctttgtaatataaatctgttttagaactgcagcggtttacaaaattttttcatatgtattgttcatctatacttcatcttacatcgtcatgattgagtgatctttacatttgattccagaggctatgttcagttgttagttgggaaagattgagttatcagatttaatttgccgatgggagcctttatctgtcattagaaatctttctcatttaagaacttatgaatatgctgaagatttaatttgtgatacctttgtatgtatgagacacattccaaagagctctaactatgataggtcctgattactaaagaagcttctttactggcctcaatttctagctttcatgttggaaaattttctgcagtccttctgtgaaaattagagcaaagtgctcctgttttttagagaaactaaatcttgctgttgaacaattattgtgttcttttcatggaacataagtaggatgttacatttccagggtgggaagggtaatcctaaatcatttcccaattggaaatatgctgtcagtttgtgcaccatatggtgaccaggcctgtgctcagtttggcagctatagaaggaaatgctgtcccataaaatgccattcctattttctaatataaaactcttttccaggaagcatgcttaagcatcttgttacagagacatacatccattatggcttggcaatctcttttatttgttgactctagctcccttcaaagtcgaggaaagatctttactcacttaatgaggacattccccatcactgtctgtaccagttcacctttattttacgttttattcagtctgtaaattaactggccctttgcagtaacttgtacataaagtgctagaaaatcatgttccttgtcctgagtaagagttaatcagagtaaatgcatttctggagttgtttctgtgatgtaaattatgatcattatttaagaagtcaaatcctgatcttgaagtgctttttatacagctctctaataattacaaatatccgaaagtcatttcttggaacacaagtggagtatgccaaattttatatgaatttttcagattatctaagcttccaggttttataattagaagataatgagagaattaatggggtttatatttacattatctctcaactatgtagcccatattactcaccctatgagtgaatctggaattgcttttcatgtgaaatcattgtggtctatgagtttacaatactgcaaactgtgttattttatctaatccattgcttaatgagtgtgtttttccatgaatgaatataccgtggttcatatgttagcatggcagcattttcagatagctttttgtttgttgggaagttggggttttggggggagggggagtattagtacgttgcatgaaatagcttactttataatgatggaattgctttttcttttgtcttgtgatttttttttttgaagtgaaatttaactttttgtgcaagtagtactattatacccatcttcagtgtcttacttgtactgtatcacattccataccctcatttaattcttaataaaactgttcacttgtttttctgggtagcatggtaattactggaatagtataaatgtgttgaatggtctttgagaaaatgaattaagattacaataaaccacaattgcaggaaaacaatgtagttctgagtctaatagtgataaagaatgcagtttgaagtttgaaatattgaatattgtagctgtacttgctcattaaaatgaaagtagctgtgagatgctttcaacatttagtctattcagcacaactggtaaaccttaaagctcattcctgggaaattaatcttcttaacttataaaaaggaatatatttttatttctgtgtcatatgaaaacattcttaataagtttccaaatctcaaagttagtggtatttattgctattaaaagaaagagtaatcgcatatgtatattagacttcagtatgttaagtttccttgtgtgtgagcaattccctgatttccataataagagaatgatggtgcaaata

SEQ ID NO: 446672 - DNA, 4155 bp, Homo sapiens
actagtttcattttaagaaagtaaagtgtgacaaaataatatttcagactgtaacgggtattttcttttacagcatgtagatgtagcagctctactaataaagtataatgcatgtgtcaatgccacggacaaatgggctttcacacctttgcacgaagcagcccaaaagggacgaacacagctttgtgctttgttgctagcccatggagctgacccgactcttaaaaatcaggaaggacaaacacctttagatttagtttcagcggatgatgtcagcgctcttctgacagcagccatgcccccatctgctctgccctcttgttacaagcctcaagtgctcaatggtgtgagaagcccaggagccactgcagatgctctctcttcaggtccatctagcccatcaagcctttctgcagccagcagtcttgacaacttatctgggagtttttcagaactgtcttcagtagttagttcaagtggaacagagggtgcttccagtttggagaaaaaggaggttccaggagtagattttagcataactcaattcgtaaggaatcttggacttgagcacctaatggatatatttgagagagaacagatcactttggatgtattagttgagatggggcacaaggagctgaaggagattggaatcaatgcttatggacataggcacaaactaattaaaggagtcgagagacttatctccggacaacaaggtcttaacccatatttaactttgaacacctctggtagtggaacaattcttatagatctgtctcctgatgataaagagtttcagtctgtggaggaagagatgcaaagtacagttcgagagcacagagatggaggtcatgcaggtggaatcttcaacagatacaatattctcaagattcagaaggtttgtaacaagaaactatgggaaagatacactcaccggagaaaagaagtttctgaagaaaaccacaaccatgccaatgaacgaatgctatttcatgggtctccttttgtgaatgcaattatccacaaaggctttgatgaaaggcatgcgtacataggtggtatgtttggagctggcatttattttgctgaaaactcttccaaaagcaatcaatatgtatatggaattggaggaggtactgggtgtccagttcacaaagacagatcttgttacatttgccacaggcagctgctcttttgccgggtaaccttgggaaagtctttcctgcagttcagtgcaatgaaaatggcacattctcctccaggtcatcactcagtcactggtaggcccagtgtaaatggcctagcattagctgaatatgttatttacagaggagaacaggcttatcctgagtatttaattacttaccagattatgaggcctgaaggtatggtcgatggataaatagttattttaagaaactaattccactgaacctaaaatcatcaaagcagcagtggcctctacgttttactcctttgctgaaaaaaaatcatcttgcccacaggcctgtggcaaaaggataaaaatgtgaacgaagtttaacattctgacttgataaagctttaataatgtacagtgttttctaaatatttcctgttttttcagcactttaacagatgccattccaggttaaactgggttgtctgtactaaattataaacagagttaacttgaaccttttatatgttatgcattgattctaacaaactgtaatgccctcaacagaactaattttactaatacaatactgtgttctttaaaacacagcatttacactgaatacaatttcatttgtaaaactgtaaataagagcttttgtactagcccagtatttatttacattgctttgtaatataaatctgttttagaactgcagcggtttacaaaattttttcatatgtattgttcatctatacttcatcttacatcgtcatgattgagtgatctttacatttgattccagaggctatgttcagttgttagttgggaaagattgagttatcagatttaatttgccgatgggagcctttatctgtcattagaaatctttctcatttaagaacttatgaatatgctgaagatttaatttgtgatacctttgtatgtatgagacacattccaaagagctctaactatgataggtcctgattactaaagaagcttctttactggcctcaatttctagctttcatgttggaaaattttctgcagtccttctgtgaaaattagagcaaagtgctcctgttttttagagaaactaaatcttgctgttgaacaattattgtgttcttttcatggaacataagtaggatgttacatttccagggtgggaagggtaatcctaaatcatttcccaatctattctaattaccttaaatctaaaggggaaaaaaaaaatcacaaacaggactgggtagttttttatcctaagtatattttttcctgttctttttacttggttttattgctgtatttatagccaatctatacatcatgggtaaacttaacccagaactataaaatgtagttgtctcagtcccctccaggcctcctgaatgggcaagtgcagtgaaacaggtgcttcttgctcctgggttttctctccatgatgttatgcccaattggaaatatgctgtcagtttgtgcaccatatggtgaccaggcctgtgctcagtttggcagctatagaaggaaatgctgtcccataaaatgccattcctattttctaatataaaactcttttccaggaagcatgcttaagcatcttgttacagagacatacatccattatggcttggcaatctcttttatttgttgactctagctcccttcaaagtcgaggaaagatctttactcacttaatgaggacattccccatcactgtctgtaccagttcacctttattttacgttttattcagtctgtaaattaactggccctttgcagtaacttgtacataaagtgctagaaaatcatgttccttgtcctgagtaagagttaatcagagtaaatgcatttctggagttgtttctgtgatgtaaattatgatcattatttaagaagtcaaatcctgatcttgaagtgctttttatacagctctctaataattacaaatatccgaaagtcatttcttggaacacaagtggagtatgccaaattttatatgaatttttcagattatctaagcttccaggttttataattagaagataatgagagaattaatggggtttatatttacattatctctcaactatgtagcccatattactcaccctatgagtgaatctggaattgcttttcatgtgaaatcattgtggtctatgagtttacaatactgcaaactgtgttattttatctaatccattgcttaatgagtgtgtttttccatgaatgaatataccgtggttcatatgttagcatggcagcattttcagatagctttttgtttgttgggaagttggggttttggggggagggggagtattagtacgttgcatgaaatagcttactttataatgatggaattgctttttcttttgtcttgtgatttttttttttgaagtgaaatttaactttttgtgcaagtagtactattatacccatcttcagtgtcttacttgtactgtatcacattccataccctcatttaattcttaataaaactgttcacttgtttttctgggtagcatggtaattactggaatagtataaatgtgttgaatggtctttgagaaaatgaattaagattacaataaaccacaattgcaggaaaacaatgtagttctgagtctaatagtgataaagaatgcagtttgaagtttgaaatattgaatattgtagctgtacttgctcattaaaatgaaagtagctgtgagatgctttcaacatttagtctattcagcacaactggtaaaccttaaagctcattcctgggaaattaatcttcttaacttataaaaaggaatatatttttatttctgtgtcatatgaaaacattcttaataagtttccaaatctcaaagttagtggtatttattgctattaaaagaaagagtaatcgcatatgtatattagacttcagtatgttaagtttccttgtgtgtgagcaattccctgatttccataataagagaatgatggtgcaaata

SEQ ID NO: 446673 - DNA, 3958 bp, Homo sapiens
  misc_feature (2)..(2): n is a, c, g, or t
  misc_feature (4)..(4): n is a, c, g, or t
  misc_feature (7)..(7): n is a, c, g, or t
gncncgnggctggacggagctggcaggaggggccttgccagcttccgccgccgcgtcgtttcaggacccggacggcggattcgcgctgcctccgccgccgcggggcagccggggggcagggagcccagcgaggggcgcgcgtgggcgcggccatgggactgcgccggatccggtgacagcagggagccaagcggcccgggccctgagcgcgtcttctccggggggcctcgccctcctgctcgcggggccggggctcctgctccggttgctggcgctgttgctggctgtggcggcggccaggatcatgtcgggtcgccgctgcgccggcgggggagcggcctgcgcgagcgccgcggccgaggccgtggagccggccgcccgagagctgttcgaggcgtgccgcaacggggacgtggaacgagtcaagaggctggtgacgcctgagaaggtgaacagccgcgacacggcgggcaggaaatccaccccgctgcacttcgccgcaggttttgggcggaaagacgtagttgaatatttgcttcagaatggtgcaaatgtccaagcacgtgatgatgggggccttattcctcttcataatgcatgctcttttggtcatgctgaagtagtcaatctccttttgcgacatggtgcagaccccaatgctcgagataattggaattatactcctctccatgaagctgcaattaaaggaaagattgatgtttgcattgtgctgttacagcatggagctgagccaaccatccgaaatacagatggaaggacagcattggatttagcagatccatctgccaaagcagtgcttactggtgaatataagaaagatgaactcttagaaagtgccaggagtggcaatgaagaaaaaatgatggctctactcacaccattaaatgtcaactgccacgcaagtgatggcagaaagtcaactccattacatttggcagcaggatataacagagtaaagattgtacagctgttactgcaacatggagctgatgtccatgctaaagataaaggtgatctggtaccattacacaatgcctgttcttatggtcattatgaagtaactgaacttttggtcaagcatggtgcctgtgtaaatgcaatggacttgtggcaattcactcctcttcatgaggcagcttctaagaacagggttgaagtatgttctcttctcttaagttatggtgcagacccaacactgctcaattgtcacaataaaagtgctatagacttggctcccacaccacagttaaaagaaagattagcatatgaatttaaaggccactcgttgctgcaagctgcacgagaagctgatgttactcgaatcaaaaaacatctctctctggaaatggtgaatttcaagcatcctcaaacacatgaaacagcattgcattgtgctgctgcatctccatatcccaaaagaaagcaaatatgtgaactgttgctaagaaaaggagcaaacatcaatgaaaagactaaagaattcttgactcctctgcacgtggcatctgagaaagctcataatgatgttgttgaagtagtggtgaaacatgaagcaaaggttaatgctctggataatcttggtcagacttctctacacagagctgcatattgtggtcatctacaaacctgccgcctactcctgagctatgggtgtgatcctaacattatatcccttcagggctttactgctttacagatgggaaatgaaaatgtacagcaactcctccaagagggtatctcattaggtaattcagaggcagacagacaattgctggaagctgcaaaggctggagatgtcgaaactgtaaaaaaactgtgtactgttcagagtgtcaactgcagagacattgaagggcgtcagtctacaccacttcattttgcagctgggtataacagagtgtccgtggtggaatatctgctacagcatggagctgatgtgcatgctaaagataaaggaggccttgtacctttgcacaatgcatgttcttatggacattatgaagttgcagaacttcttgttaaacatggagcagtagttaatgtagctgatttatggaaatttacacctttacatgaagcagcagcaaaaggaaaatatgaaatttgcaaacttctgctccagcatggtgcagaccctacaaaaaaaaacagggatggaaatactcctttggatcttgttaaagatggagatacagatattcaagatctgcttaggggagatgcagctttgctagatgctgccaagaagggttgtttagccagagtgaagaagttgtcttctcctgataatgtaaattgccgcgatacccaaggcagacattcaacacctttacatttagcagctggttataataatttagaagttgcagagtatttgttacaacacggagctgatgtgaatgcccaagacaaaggaggacttattcctttacataatgcagcatcttacgggcatgtagatgtagcagctctactaataaagtataatgcatgtgtcaatgccacggacaaatgggctttcacacctttgcacgaagcagcccaaaagggacgaacacagctttgtgctttgttgctagcccatggagctgacccgactcttaaaaatcaggaaggacaaacacctttagatttagtttcagcggatgatgtcagcgctcttctgacagcagccatgcccccatctgctctgccctcttgttacaagcctcaagtgctcaatggtgtgagaagcccaggagccactgcagatgctctctcttcaggtccatctagcccatcaagcctttctgcagccagcagtcttgacaacttatctgggagtttttcagaactgtcttcagtagttagttcaagtggaacagagggtgcttccagtttggagaaaaaggaggttccaggagtagattttagcataactcaattcgtaaggaatcttggacttgagcacctaatggatatatttgagagagaacagatcactttggatgtattagttgagatggggcacaaggagctgaaggagattggaatcaatgcttatggacataggcacaaactaattaaaggagtcgagagacttatctccggacaacaaggtcttaacccatatttaactttgaacacctctggtagtggaacaattcttatagatctgtctcctgatgataaagagtttcagtctgtggaggaagagatgcaaagtacagttcgagagcacagagatggaggtcatgcaggtggaatcttcaacagatacaatattctcaagattcagaaggtttgtaacaagaaactatgggaaagatacactcaccggagaaaagaagtttctgaagaaaaccacaaccatgccaatgaacgaatgctatttcatgggtctccttttgtgaatgcaattatccacaaaggctttgatgaaaggcatgcgtacataggtggtatgtttggagctggcatttattttgctgaaaactcttccaaaagcaatcaatatgtatatggaattggaggaggtactgggtgtccagttcacaaagacagatcttgttacatttgccacaggcagctgctcttttgccgggtaaccttgggaaagtctttcctgcagttcagtgcaatgaaaatggcacattctcctccaggtcatcactcagtcactggtaggcccagtgtaaatggcctagcattagctgaatatgttatttacagaggagaacaggtaatgtagttttatttgttcatcttcaaaaatgctagggaggcatactttaactttttattaatctcttgaattgacaagacatattgccttaactggattttttaaaaattttatttggagataatttcagatttggaaagttacaaaaatagtaaagagaattttcttataacctttacctagatttcctaaatgttaatattttgttctctt

SEQ ID NO: 446674 - DNA, 2388 bp, Homo sapiens
  misc_feature (2)..(2): n is a, c, g, or t
  misc_feature (4)..(4): n is a, c, g, or t
  misc_feature (7)..(7): n is a, c, g, or t
gncncgnggctggacggagctggcaggaggggccttgccagcttccgccgccgcgtcgtttcaggacccggacggcggattcgcgctgcctccgccgccgcggggcagccggggggcagggagcccagcgaggggcgcgcgtgggcgcggccatgggactgcgccggatccggtgacagcagggagccaagcggcccgggccctgagcgcgtcttctccggggggcctcgccctcctgctcgcggggccggggctcctgctccggttgctggcgctgttgctggctgtggcggcggccaggatcatgtcgggtcgccgctgcgccggcgggggagcggcctgcgcgagcgccgcggccgaggccgtggagccggccgcccgagagctgttcgaggcgtgccgcaacggggacgtggaacgagtcaagaggctggtgacgcctgagaaggtgaacagccgcgacacggcgggcaggaaatccaccccgctgcacttcgccgcaggttttgggcggaaagacgtagttgaatatttgcttcagaatggtgcaaatgtccaagcacgtgatgatgggggccttattcctcttcataatgcatgctcttttggtcatgctgaagtagtcaatctccttttgcgacatggtgcagaccccaatgctcgagataattggaattatactcctctccatgaagctgcaattaaaggaaagattgatgtttgcattgtgctgttacagcatggagctgagccaaccatccgaaatacagatggaaggacagcattggatttagcagatccatctgccaaagcagtgcttactggtgaatataagaaagatgaactcttagaaagtgccaggagtggcaatgaagaaaaaatgatggctctactcacaccattaaatgtcaactgccacgcaagtgatggcagaaagtcaactccattacatttggcagcaggatataacagagtaaagattgtacagctgttactgcaacatggagctgatgtccatgctaaagataaaggtgatctggtaccattacacaatgcctgttcttatggtcattatgaagtaactgaacttttggtcaagcatggtgcctgtgtaaatgcaatggacttgtggcaattcactcctcttcatgaggcagcttctaagaacagggttgaagtatgttctcttctcttaagttatggtgcagacccaacactgctcaattgtcacaataaaagtgctatagacttggctcccacaccacagttaaaagaaagattagcatatgaatttaaaggccactcgttgctgcaagctgcacgagaagctgatgttactcgaatcaaaaaacatctctctctggaaatggtgaatttcaagcatcctcaaacacatgaaacagcattgcattgtgctgctgcatctccatatcccaaaagaaagcaaatatgtgaactgttgctaagaaaaggagcaaacatcaatgaaaagactaaagaattcttgactcctctgcacgtggcatctgagaaagctcataatgatgttgttgaagtagtggtgaaacatgaagcaaaggttaatgctctggataatcttggtcagacttctctacacagagctgcatattgtggtcatctacaaacctgccgcctactcctgagctatgggtgtgatcctaacattatatcccttcagggctttactgctttacagatgggaaatgaaaatgtacagcaactcctccaagagggtatctcattaggtaattcagaggcagacagacaattgctggaagctgcaaaggctggagatgtcgaaactgtaaaaaaactgtgtactgttcagagtgtcaactgcagagacattgaagggcgtcagtctacaccacttcattttgcagctgggtataacagagtgtccgtggtggaatatctgctacagcatggagctgatgtgcatgctaaagataaaggaggccttgtacctttgcacaatgcatgttcttatggacattatgaagttgcagaacttcttgttaaacatggagcagtagttaatgtagctgatttatggaaatttacacctttacatgaagcagcagcaaaaggaaaatatgaaatttgcaaacttctgctccagcatggtgcagaccctacaaaaaaaaacagggatggaaatactcctttggatcttgttaaagatggagatacagatattcaagatctgcttaggggagatgcagctttgctagatgctgccaagaagggtttcgatgaccgtcatcaaacccttgggcttattggtaaacttcctgggtttagggtttcgatgacggtcatcaaaccctctatcaagttgcgatgctagtcgccgtgccatacatg

SEQ ID NO: 446675 - DNA, 2059 bp, Homo sapiens
tggggatctctttcaaggtttctgctgggtttctgaactgctgggtttctgcttgctcctctggagatgcagcgtctgttgactccagtgaagcgcattctgcaactgacaagagcggtgcaggaaacctccctcacacctgctcgcctgctcccagtagcccaccaaaggttttctacagcctctgctgtccccctggccaaaacagatacttggccaaaggacgtgggcatcctggccctggaggtctacttcccagcccaatatgtggaccaaactgacctggagaagtataacaatgtggaagcaggaaagtatacagtgggcttgggccagacccgtatgggcttctgctcagtccaagaggacatcaactccctgtgcctgacggtggtgcaacggctgatggagcgcatacagctcccatgggactctgtgggcaggctggaagtaggcactgagaccatcattgacaagtccaaagctgtcaaaacagtgctcatggaactcttccaggattcaggcaatactgatattgagggcatagataccaccaatgcctgctacggtggtactgcctccctcttcaatgctgccaactggatggagtccagttcctgggatggtcgttatgccatggtggtctgtggagacattgccgtctatcccagtggtaatgctcgtcccacaggtggggccggagctgtggctatgctgattgggcccaaggcccctctggccctggagcgagggctgaggggaacccatatggagaatgtgtatgacttctacaaaccaaatttggcctcggagtacccaatagtggatgggaagctttccatccagtgctacttgcgggccttggatcgatgttacacatcataccgtaaaaaaatccagaatcagtggaagcaagctggcagcgatcgacccttcacccttgacgatttacagtacatgatctttcatacacccttttgcaagatggtccagaagtctctggctcgcctgatgttcaatgacttcctgtcagccagcagtgacacacaaaccagcttatataaggggctggaggctttcggggggctaaagctggaagacacctacaccaacaaggacctggataaagcacttctaaaggcctctcaggacatgttcgacaagaaaaccaaggcttccctttacctctccactcacaatgggaacatgtacacctcatccctgtacgggtgcctggcctcgcttctgtcccaccactctgcccaagaactggctggctccaggattggtgccttctcttatggctctggtttagcagcaagtttcttttcatttcgagtatcccaggatgctgctccaggctctcccctggacaagttggtgtccagcacatcagacctgccaaaacgcctagcctcccgaaagtgtgtgtctcctgaggagttcacagaaataatgaaccaaagagagcaattctaccataaggtgaatttctccccacctggtgacacaaacagccttttcccaggtacttggtacctggagcgagtggacgagcagcatcgccgaaagtatgcccggcgtcccgtctaaaggtgttctgcagatccatggaaagcttcctgggaaacgtatgctagcagagcttctccccgtgaatcatatttttaagatcccactcttagctggtaaatgaatttgaatcgacatagtagccccataagcatcagccctgtagagtgaggagccatctctagcgggcccttcattcctctccatgctgcaatcactgtcctgggcttatggtgctatggactaggggtcctttgtgaaagagcaagatggagcaatggagagaagacctcttcctgaatcactggactccagaaatgtgcatgcagatcagctgttgccttcaagatccagataaactttcctgtcatgtgttagaactttattattattaatattgttaaacttctgtgctgttcctgtgaatctccaaattttgtaccttgttctaagctaatatatagcaattaaaaagagagaaagagga

SEQ ID NO: 446676 - DNA, 663 bp, Homo sapiens
tggggatctctttcaaggtttctgctgggtttctgaactgctgggtttctgcttgctcctctggagatgcagcgtctgttgactccagtgaagcgcattctgcaactgacaagagcggtgcaggaaacctccctcacacctgctcgcctgctcccagtagcccaccaaagcgaaagtatgcccggcgtcccgtctaaaggtgttctgcagatccatggaaagcttcctgggaaacgtatgctagcagagcttctccccgtgaatcatatttttaagatcccactcttagctggtaaatgaatttgaatcgacatagtagccccataagcatcagccctgtagagtgaggagccatctctagcgggcccttcattcctctccatgctgcaatcactgtcctgggcttatggtgctatggactaggggtcctttgtgaaagagcaagatggagcaatggagagaagacctcttcctgaatcactggactccagaaatgtgcatgcagatcagctgttgccttcaagatccagataaactttcctgtcatgtgttagaactttattattattaatattgttaaacttctgtgctgttcctgtgaatctccaaattttgtaccttgttctaagctaatatatagcaattaaaaagagagaaagagga

SEQ ID NO: 446677 - DNA, 2005 bp, Homo sapiens
tggggatctctttcaaggtttctgctgggtttctgaactgctgggtttctgcttgctcctctggagatgcagcgtctgttgactccagtgaagcgcattctgcaactgacaagagcggtgcaggaaacctccctcacacctgctcgcctgctcccagtagcccaccaaaggttttctacagcctctgctgtccccctggccaaaacagatacttggccaaaggacgtgggcatcctggccctggaggtctacttcccagcccaatatgtggaccaaactgacctggagaagtataacaatgtggaagcaggaaagtatacagtgggcttgggccagacccgtatgggcttctgctcagtccaagaggacatcaactccctgtgcctgacggtggtgcaacggctgatggagcgcatacagctcccatgggactctgtgggcaggctggaagtaggcactgagaccatcattgacaagtccaaagctgtcaaaacagtgctcatggaactcttccaggattcaggcaatactgatattgagggcatagataccaccaatgcctgctacggtggtactgcctccctcttcaatgctgccaactggatggagtccagttcctgggatggtcgttatgccatggtggtctgtggagacattgccgtctatcccagtggtaatgctcgtcccacaggtggggccggagctgtggctatgctgattgggcccaaggcccctctggccctggagcgagggctgaggggaacccatatggagaatgtgtatgacttctacaaaccaaatttggcctcggagtacccaatagtggatgggaagctttccatccagtgctacttgcgggccttggatcgatgttacacatcataccgtaaagatttacagtacatgatctttcatacacccttttgcaagatggtccagaagtctctggctcgcctgatgttcaatgacttcctgtcagccagcagtgacacacaaaccagcttatataaggggctggaggctttcggggggctaaagctggaagacacctacaccaacaaggacctggataaagcacttctaaaggcctctcaggacatgttcgacaagaaaaccaaggcttccctttacctctccactcacaatgggaacatgtacacctcatccctgtacgggtgcctggcctcgcttctgtcccaccactctgcccaagaactggctggctccaggattggtgccttctcttatggctctggtttagcagcaagtttcttttcatttcgagtatcccaggatgctgctccaggctctcccctggacaagttggtgtccagcacatcagacctgccaaaacgcctagcctcccgaaagtgtgtgtctcctgaggagttcacagaaataatgaaccaaagagagcaattctaccataaggtgaatttctccccacctggtgacacaaacagccttttcccaggtacttggtacctggagcgagtggacgagcagcatcgccgaaagtatgcccggcgtcccgtctaaaggtgttctgcagatccatggaaagcttcctgggaaacgtatgctagcagagcttctccccgtgaatcatatttttaagatcccactcttagctggtaaatgaatttgaatcgacatagtagccccataagcatcagccctgtagagtgaggagccatctctagcgggcccttcattcctctccatgctgcaatcactgtcctgggcttatggtgctatggactaggggtcctttgtgaaagagcaagatggagcaatggagagaagacctcttcctgaatcactggactccagaaatgtgcatgcagatcagctgttgccttcaagatccagataaactttcctgtcatgtgttagaactttattattattaatattgttaaacttctgtgctgttcctgtgaatctccaaattttgtaccttgttctaagctaatatatagcaattaaaaagagagaaagagga

SEQ ID NO: 446678 - DNA, 2005 bp, Homo sapiens
tggggatctctttcaaggtttctgctgggtttctgaactgctgggtttctgcttgctcctctggagatgcagcgtctgttgactccagtgaagcgcattctgcaactgacaagagcggtgcaggaaacctccctcacacctgctcgcctgctcccagtagcccaccaaaggttttctacagcctctgctgtccccctggccaaaacagatacttggccaaaggacgtgggcatcctggccctggaggtctacttcccagcccaatatgtggaccaaactgacctggagaagtataacaatgtggaagcaggaaagtatacagtgggcttgggccagacccgtatgggcttctgctcagtccaagaggacatcaactccctgtgcctgacggtggtgcaacggctgatggagcgcatacagctcccatgggactctgtgggcaggctggaagtaggcactgagaccatcattgacaagtccaaagctggcatagataccaccaatgcctgctacggtggtactgcctccctcttcaatgctgccaactggatggagtccagttcctgggatggtcgttatgccatggtggtctgtggagacattgccgtctatcccagtggtaatgctcgtcccacaggtggggccggagctgtggctatgctgattgggcccaaggcccctctggccctggagcgagggctgaggggaacccatatggagaatgtgtatgacttctacaaaccaaatttggcctcggagtacccaatagtggatgggaagctttccatccagtgctacttgcgggccttggatcgatgttacacatcataccgtaaaaaaatccagaatcagtggaagcaagctggcagcgatcgacccttcacccttgacgatttacagtacatgatctttcatacacccttttgcaagatggtccagaagtctctggctcgcctgatgttcaatgacttcctgtcagccagcagtgacacacaaaccagcttatataaggggctggaggctttcggggggctaaagctggaagacacctacaccaacaaggacctggataaagcacttctaaaggcctctcaggacatgttcgacaagaaaaccaaggcttccctttacctctccactcacaatgggaacatgtacacctcatccctgtacgggtgcctggcctcgcttctgtcccaccactctgcccaagaactggctggctccaggattggtgccttctcttatggctctggtttagcagcaagtttcttttcatttcgagtatcccaggatgctgctccaggctctcccctggacaagttggtgtccagcacatcagacctgccaaaacgcctagcctcccgaaagtgtgtgtctcctgaggagttcacagaaataatgaaccaaagagagcaattctaccataaggtgaatttctccccacctggtgacacaaacagccttttcccaggtacttggtacctggagcgagtggacgagcagcatcgccgaaagtatgcccggcgtcccgtctaaaggtgttctgcagatccatggaaagcttcctgggaaacgtatgctagcagagcttctccccgtgaatcatatttttaagatcccactcttagctggtaaatgaatttgaatcgacatagtagccccataagcatcagccctgtagagtgaggagccatctctagcgggcccttcattcctctccatgctgcaatcactgtcctgggcttatggtgctatggactaggggtcctttgtgaaagagcaagatggagcaatggagagaagacctcttcctgaatcactggactccagaaatgtgcatgcagatcagctgttgccttcaagatccagataaactttcctgtcatgtgttagaactttattattattaatattgttaaacttctgtgctgttcctgtgaatctccaaattttgtaccttgttctaagctaatatatagcaattaaaaagagagaaagagga

SEQ ID NO: 446679 - DNA, 2458 bp, Homo sapiens
tggggatctctttcaaggtttctgctgggtttctgaactgctgggtttctgcttgctcctctggagatgcagcgtctgttgactccagtgaagcgcattctgcaactgacaagagcggtgcaggaaacctccctcacacctgctcgcctgctcccagtagcccaccaaaggttttctacagcctctgctgtccccctggccaaaacagatacttggccaaaggacgtgggcatcctggccctggaggtctacttcccagcccaatatgtggaccaaactgacctggagaagtataacaatgtggaagcaggaaagtatacagtgggcttgggccagacccgtatgggcttctgctcagtccaagaggacatcaactccctgtgcctgacggtggtgcaacggctgatggagcgcatacagctcccatgggactctgtgggcaggctggaagtaggcactgagaccatcattgacaagtccaaagctgtcaaaacagtgctcatggaactcttccaggattcaggcaatactgatattgagggcatagataccaccaatgcctgctacggtggtactgcctccctcttcaatgctgccaactggatggagtccagttcctgggatggtcgttatgccatggtggtctgtggagacattgccgtctatcccagtggtaatgctcgtcccacaggtggggccggagctgtggctatgctgattgggcccaaggcccctctggccctggagcgagggctgaggggaacccatatggagaatgtgtatgacttctacaaaccaaatttggcctcggagtacccaatagtggatgggaagctttccatccagtgctacttgcgggccttggatcgatgttacacatcataccgtaaaaaaatccagaatcagtggaagcaagctggcagcgatcgacccttcacccttgacgatttacagtacatgatctttcatacacccttttgcaagatggtccagaagtctctggctcgcctgatgttcaatgacttcctgtcagccagcagtgacacacaaaccagcttatataaggggctggaggctttcggggggctaaagctggaagacacctacaccaacaaggacctggataaagcacttctaaaggcctctcaggacatgttcgacaagaaaaccaaggcttccctttacctctccactcacaatgggaacatgtacacctcatccctgtacgggtgcctggcctcgcttctgtcccaccactctgcccaagaactggctggctccaggattggtgccttctcttatggctctggtttagcagcaagtttcttttcatttcgagtatcccaggatgctgctccaggctctcccctggacaagttggtgtccagcacatcagacctgccaaaacgcctagcctcccgaaagtgtgtgtctcctgaggagttcacagaaataatgaaccaaagagagcaattctaccataaggtgaatttctccccacctggtgacacaaacagccttttcccaggtacttggtacctggagcgagtggacgagcagcatcgccgaaagtatgcccggcgtcccgtctaaaggtgttctgcagatccatggaaagcttcctgggaaacgtatgctagcagagcttctccccgtgaatcatatttttaagatcccactcttagctggtaaatgaatttgaatcgacatagtagccccataagcatcagccctgtagagtgaggagccatctctagcgggcccttcattcctctccatgctgcaatcactgtcctgggcttatggtgctatggactaggggtcctttgtgaaagagcaagatggagcaatggagagaagacctcttcctgaatcactggactccagaaatgtgcatgcagatcagctgttgccttcaagatccagataaactttcctgtcatgtgttagaactttattattattaatattgttaaacttctgtgctgttcctgtgaatctccaaattttgtaccttgttctaagctaatatatagcaattaaaaagagagaaagaggaaatgattcctgcgtttcttggaacccagaatacaaacccagcctaacatgcagcaagcctgctagaccttgtgggtcagagggctgggtccttgcctcacaggctgcctctgtccccttgcaattccattctatttctgccacatgccaagtgctatgacaggtacaaggcaaataagaacggtagaacacagcttcccccagcccacttccctgttctaaagacaccacatagacagagagcagcagacaggggccagcaggagctgtagttcagatcttcttggtcattccttgccgctgttatttgaacaaataaacacagcgcaaaggttaacaagtttttgccttctatagccaaaaataaaaaaataaataaattttgatgcctggcaggaaa

SEQ ID NO: 446680 - DNA, 2005 bp, Homo sapiens
tggggatctctttcaaggtttctgctgggtttctgaactgctgggtttctgcttgctcctctggagatgcagcgtctgttgactccagtgaagcgcattctgcaactgacaagagcggtgcaggaaacctccctcacacctgctcgcctgctcccagtagcccaccaaaggttttctacagcctctgctgtccccctggccaaaacagatacttggccaaaggacgtgggcatcctggccctggaggtctacttcccagcccaatatgtggaccaaactgacctggagaagtataacaatgtggaagcaggaaagtatacagtgggcttgggccagacccgtatgggcttctgctcagtccaagaggacatcaactccctgtgcctgacggtggtgcaacggctgatggagcgcatacagctcccatgggactctgtgggcaggctggaagtaggcactgagaccatcattgacaagtccaaagctgtcaaaacagtgctcatggaactcttccaggattcaggcaatactgatattgagggcatagataccaccaatgcctgctacggtggtactgcctccctcttcaatgctgccaactggatggagtccagttcctgggatggtcgttatgccatggtggtctgtggagacattgccgtctatcccagtggtaatgctcgtcccacaggtggggccggagctgtggctatgctgattgggcccaaggcccctctggccctggagcgagggctgaggggaacccatatggagaatgtgtatgacttctacaaaccaaatttggcctcggagtacccaatagtggatgggaagctttccatccagtgctacttgcgggccttggatcgatgttacacatcataccgtaaaaaaatccagaatcagtggaagcaagctggcagcgatcgacccttcacccttgacgatttacagtacatgatctttcatacacccttttgcaagatggtccagaagtctctggctcgcctgatgttcaatgacttcctgtcagccagcagtgacacacaaaccagcttatataaggggctggaggctttcggggggctaaagctggaagacacctacaccaacaaggacctggataaagcacttctaaaggcctctcaggacatgttcgacaagaaaaccaaggcttccctttacctctccactcacaatgggaacatgtacacctcatccctgtacgggtgcctggcctcgcttctgtcccaccactctgcccaagaactggctggctccaggattggtgccttctcttatggctctggtttagcagcaagtttcttttcatttcgagtatcccaggatgctgctccaggctctcccctggacaagttggtgtccagcacatcagacctgccaaaccaaagagagcaattctaccataaggtgaatttctccccacctggtgacacaaacagccttttcccaggtacttggtacctggagcgagtggacgagcagcatcgccgaaagtatgcccggcgtcccgtctaaaggtgttctgcagatccatggaaagcttcctgggaaacgtatgctagcagagcttctccccgtgaatcatatttttaagatcccactcttagctggtaaatgaatttgaatcgacatagtagccccataagcatcagccctgtagagtgaggagccatctctagcgggcccttcattcctctccatgctgcaatcactgtcctgggcttatggtgctatggactaggggtcctttgtgaaagagcaagatggagcaatggagagaagacctcttcctgaatcactggactccagaaatgtgcatgcagatcagctgttgccttcaagatccagataaactttcctgtcatgtgttagaactttattattattaatattgttaaacttctgtgctgttcctgtgaatctccaaattttgtaccttgttctaagctaatatatagcaattaaaaagagagaaagagga

SEQ ID NO: 446681 - DNA, 1581 bp, Homo sapiens
aaactatggcaaggacaaaaaaccaaacactgtatgttctcactcgtaggtgggaattgaacaatgagaacacatggacacaggaaggggaatatcacacactggggcctgttttggggtgggaggagtggtgagggatctgagatggtcgttatgccatggtggtctgtggagacattgccgtctatcccagtggtaatgctcgtcccacaggtggggccggagctgtggctatgctgattgggcccaaggcccctctggccctggagcgagggctgaggggaacccatatggagaatgtgtatgacttctacaaaccaaatttggcctcggagtacccaatagtggatgggaagctttccatccagtgctacttgcgggccttggatcgatgttacacatcataccgtaaaaaaatccagaatcagtggaagcaagctggcagcgatcgacccttcacccttgacgatttacagtacatgatctttcatacacccttttgcaagatggtccagaagtctctggctcgcctgatgttcaatgacttcctgtcagccagcagtgacacacaaaccagcttatataaggggctggaggctttcggggggctaaagctggaagacacctacaccaacaaggacctggataaagcacttctaaaggcctctcaggacatgttcgacaagaaaaccaaggcttccctttacctctccactcacaatgggaacatgtacacctcatccctgtacgggtgcctggcctcgcttctgtcccaccactctgcccaagaactggctggctccaggattggtgccttctcttatggctctggtttagcagcaagtttcttttcatttcgagtatcccaggatgctgctccaggctctcccctggacaagttggtgtccagcacatcagacctgccaaaacgcctagcctcccgaaagtgtgtgtctcctgaggagttcacagaaataatgaaccaaagagagcaattctaccataaggtgaatttctccccacctggtgacacaaacagccttttcccaggtacttggtacctggagcgagtggacgagcagcatcgccgaaagtatgcccggcgtcccgtctaaaggtgttctgcagatccatggaaagcttcctgggaaacgtatgctagcagagcttctccccgtgaatcatatttttaagatcccactcttagctggtaaatgaatttgaatcgacatagtagccccataagcatcagccctgtagagtgaggagccatctctagcgggcccttcattcctctccatgctgcaatcactgtcctgggcttatggtgctatggactaggggtcctttgtgaaagagcaagatggagcaatggagagaagacctcttcctgaatcactggactccagaaatgtgcatgcagatcagctgttgccttcaagatccagataaactttcctgtcatgtgttagaactttattattattaatattgttaaacttctgtgctgttcctgtgaatctccaaattttgtaccttgttctaagctaatatatagcaattaaaaagagagaaagagga

SEQ ID NO: 446682 - DNA, 2043 bp, Homo sapiens
tggggatctctttcaaggtttctgctgggtttctgaactgctgggtttctgcttgctcctctggagatgcagcgtctgttgactccagtgaagcgcattctgcaactgacaagagcggtgcaggaaacctccctcacacctgctcgcctgctcccagtagcccaccaaaggttttctacagcctctgctgtccccctggccaaaacagatacttggccaaaggacgtgggcatcctggccctggaggtctacttcccagcccaatatgtggaccaaactgacctggagaagtataacaatgtggaagcaggaaagtatacagtgggcttgggccagacccgtatgggcttctgctcagtccaagaggacatcaactccctgtgcctgacggtggtgcaacggctgatggagcgcatacagctcccatgggactctgtgggcaggctggaagtaggcactgagaccatcattgacaagtccaaagctgtcaaaacagtgctcatggaactcttccaggattcaggcaatactgatattgagggcatagataccaccaatgcctgctacggtggtactgcctccctcttcaatgctgccaactggatggagtccagttcctgggatggtcgttatgccatggtggtctgtggagacattgccgtctatcccagtggtaatgctcgtcccacaggtggggccggagctgtggctatgctgattgggcccaaggcccctctggccctggagcgagggctgaggggaacccatatggagaatgtgtatgacttctacaaaccaaatttggcctcggagtacccaatagtggatgggaagctttccatccagtgctacttgcgggccttggatcgatgttacacatcataccgtaaaaaaatccagaatcagtggaagcaagctggcagcgatcgacccttcacccttgacgatttacagtacatgatctttcatacacccttttgcaagatggtccagaagtctctggctcgcctgatgttcaatgacttcctgtcagccagcagtgacacacaaaccagcttatataaggggctggaggctttcggggggctaaagctggaagacacctacaccaacaaggacctggataaagcacttctaaaggcctctcaggacatgttcgacaagaaaaccaaggcttccctttacctctccactcacaatgggaacatgtacacctcatccctgtacgggtgcctggcctcgcttctgtcccaccactctgcccaagaactggctggctccaggattggtgccttctcttatggctctggtttagcagcaagtttcttttcatttcgagtatcccaggatgctgctccaggctctcccctggacaagttggtgtccagcacatcagacctgccaaaacgcctagcctcccgaaagtgtgtgtctcctgaggagttcacagaaataatgaaccaaagagagcaattctaccataaggtgaatttctccccacctggtgacacaaacagccttttcccaggtacttggtacctggagcgagtggacgagcagcatcgccgaaagtatgcccggcgtcccgtctaaaggtgttctgcagatccatggaaagcttcctgggaaacgtatgctagcagagcttctccccgtgaatcatatttttaagatcccactcttagctggtaaatgaatttgaatcgacatagtagccccataagcatcagccctgtagagtgaggagccatctctagcgggcccttcattcctctccatgctgcaatcactgtcctgggcttatggtgctatggactaggggtcctttgtgaaagagcaagatggagcaatggagagaagacctcttcctgaatcactggactccagaaatgtgcatgcagatcagctgttgccttcaagatccagataaactttcctgtcatgtgttagaactttattattattaatattgttaaacacctagtcccgctttttgtgtcttttcccattatgcacccttctctaaggggttttctttctaat

SEQ ID NO: 446683 - DNA, 1782 bp, Homo sapiens
tggggatctctttcaaggtttctgctgggtttctgaactgctgggtttctgcttgctcctctggagatgcagcgtctgttgactccagtgaagcgcattctgcaactgacaagagcggtgcaggaaacctccctcacacctgctcgcctgctcccagtagcccaccaaaggttttctacagcctctgctgtccccctggccaaaacagatacttggccaaaggacgtgggcatcctggccctggaggtctacttcccagcccaatatgtggaccaaactgacctggagaagtataacaatgtggaagcaggaaagtatacagtgggcttgggccagacccgtatgggcttctgctcagtccaagaggacatcaactccctgtgcctgacggtggtgcaacggctgatggagcgcatacagctcccatgggactctgtgggcaggctggaagtaggcactgagaccatcattgacaagtccaaagctgtcaaaacagtgctcatggaactcttccaggattcaggcaatactgatattgagggcatagataccaccaatgcctgctacggtggtactgcctccctcttcaatgctgccaactggatggagtccagttcctgggatggtcgttatgccatggtggtctgtggagacattgccgtctatcccagtggtaatgctcgtcccacaggtggggccggagctgtggctatgctgattgggcccaaggcccctctggccctggagcgagggctgaggggaacccatatggagaatgtgtatgacttctacaaaccaaatttggcctcggagtacccaatagtggatgggaagctttccatccagtgctacttgcgggccttggatcgatgttacacatcataccgtaaaaaaatccagaatcagtggaagcaagctggcagcgatcgacccttcacccttgacgatttacagtacatgatctttcatacacccttttgcaagatggtccagaagtctctggctcgcctgatgttcaatgagcttccctttacctctccactcacaatgggaacatgtacacctcatccctgtacgggtgcctggcctcgcttctgtcccaccactctgcccaagaactggctggctccaggattggtgccttctcttatggctctggtttagcagcaagtttcttttcatttcgagcaccaacaaggacctggataaagcacttctaaagggcctctcaggaccatgtacgacaagaaaaccaaggcttccctttacctcgtccactcaccaatgggaacatgtacacctcgtcccgtcttaaaacgtgttctgcagatccatggaaagcttcctgggaaacgtatgctagcagagcttctccccgtgaatcatatttttaagatcccactcttagctggtaaatgaatttgaatcgacatagtagccccataagcatcagccctgtagagtgaggagccatctctagcgggcccttcattcctctccatgctgcaatcactgtcctgggcttatggtgctatggactaggggtcctttgtgaaagagcaagatggagcaatggagagaagacctcttcctgaatcactggactccagaaatgtgcatgcagatcagctgttgccttcaagatccagataaactttcctgtcatgtgttagaactttattattattaatattgttaaacttctgtgctgttcctgtgaatctccaaattttgtaccttgttctaagctaatatatagcaattaaaaagagagaaagagga

SEQ ID NO: 446684 - DNA, 1142 bp, Homo sapiens
ttaatagcaaagtaaatcactgaagggatttaagcatggagtaagtttgtttaatttatgtgtttaaagcacttatttggctactacttagagactagattgttcaggcaagaggtaatggtggtttgattgcaactgattaaagagaagttgatggatttgagatacctaataagaatttattgattattttgtgattgatgtgattaaggacatgcatttaagtactatgtggcatacaccttgaccaaatcagtgtgtctgcctgcatgttttgctaacaagtatgcttgcttatcatttcttggtattctaagccacacacaccacacgttcctccagggtgtaacctcccacagaacctggctctctgttgaactcgtgattggcaatagtgataatgacaatgaaaaaggtgtaacaatcttgcttttgcttcccaggctctcccctggacaagttggtgtccagcacatcagacctgccaaaacgcctagcctcccgaaagtgtgtgtctcctgaggagttcacagaaataatgaaccaaagagagcaattctaccataaggtgaatttctccccacctggtgacacaaacagccttttcccaggtacttggtacctggagcgagtggacgagcagcatcgccgaaagtatgcccggcgtcccgtctaaaggtgttctgcagatccatggaaagcttcctgggaaacgtatgctagcagagcttctccccgtgaatcatatttttaagatcccactcttagctggtaaatgaatttgaatcgacatagtagccccataagcatcagccctgtagagtgaggagccatctctagcgggcccttcattcctctccatgctgcaatcactgtcctgggcttatggtgctatggactaggggtcctttgtgaaagagcaagatggagcaatggagagaagacctcttcctgaatcactggactccagaaatgtgcatgcagatcagctgttgccttcaagatccagataaactttcctgtcatgtgttagaactttattattattaatattgttaaacttctgtgctgttcctgtgaatctccaaattttgtaccttgttctaagctaatatatagcaattaaaaagagagaaagagga

SEQ ID NO: 446685 - DNA, 1088 bp, Homo sapiens
ttaatagcaaagtaaatcactgaagggatttaagcatggagtaagtttgtttaatttatgtgtttaaagcacttatttggctactacttagagactagattgttcaggcaagaggtaatggtggtttgattgcaactgattaaagagaagttgatggatttgagatacctaataagaatttattgattattttgtgattgatgtgattaaggacatgcatttaagtactatgtggcatacaccttgaccaaatcagtgtgtctgcctgcatgttttgctaacaagtatgcttgcttatcatttcttggtattctaagccacacacaccacacgttcctccagggtgtaacctcccacagaacctggctctctgttgaactcgtgattggcaatagtgataatgacaatgaaaaaggtgtaacaatcttgcttttgcttcccaggctctcccctggacaagttggtgtccagcacatcagacctgccaaaccaaagagagcaattctaccataaggtgaatttctccccacctggtgacacaaacagccttttcccaggtacttggtacctggagcgagtggacgagcagcatcgccgaaagtatgcccggcgtcccgtctaaaggtgttctgcagatccatggaaagcttcctgggaaacgtatgctagcagagcttctccccgtgaatcatatttttaagatcccactcttagctggtaaatgaatttgaatcgacatagtagccccataagcatcagccctgtagagtgaggagccatctctagcgggcccttcattcctctccatgctgcaatcactgtcctgggcttatggtgctatggactaggggtcctttgtgaaagagcaagatggagcaatggagagaagacctcttcctgaatcactggactccagaaatgtgcatgcagatcagctgttgccttcaagatccagataaactttcctgtcatgtgttagaactttattattattaatattgttaaacttctgtgctgttcctgtgaatctccaaattttgtaccttgttctaagctaatatatagcaattaaaaagagagaaagagga

SEQ ID NO: 446686 - DNA, 656 bp, Homo sapiens
tggggatctctttcaaggtttctgctgggtttctgaactgctgggtttctgcttgctcctctggagatgcagcgtctgttgactccagtgaagcgcattctgcaactgacaagagcggtgcaggaaacctccctcacacctgctcgcctgctcccagtagcccaccaaaggttttctacagcctctgctgtccccctggccaaaacagatacttggccaaaggacgtgggcatcctggccctggaggtctacttcccagcccaatatgtggaccaaactgacctggagaagtataacaatgtggaagcaggaaagtatacagtgggcttgggccagacccgtatgggcttctgctcagtccaagaggacatcaactccctgtgcctgacggtggtgcaacggctgatggagcgcatacagctcccatgggactctgtgggcaggctggaagtaggcactgagaccatcattgacaagtccaaagctggcatagataccaccaatgcctgctacggtggtactgcctccctcttcaatgctgccaactggatggagtccagttcctgggatggtatgtacggccacgaaccttatgtaagggtgctggaattggaggctgatattaccagttttgcttttgttccccgtggcttcat

SEQ ID NO: 446687 - DNA, 210 bp, Homo sapiens
ctggcctcgcttctgtcccagtgagtactgcatctggctccatgtcctccatgcacaccctcagcctccgcccccgtgggctgcagggtcaacaaagttgggtttctcttttggctcagaaatttaaaagaaaggaaggggcctggtgtagtggctcatgcctgtaatctcagcatttggggaggtttaggcgggcagatcgcctgaacc

SEQ ID NO: 446688 - DNA, 414 bp, Homo sapiens
atcgacccttcacccttgacgatttacagtacatgatctttcatacacccttttgcaagatggtccagaagtctctggctcgcctgatgttcaatgacttcctgtcagccagcagtgacacacaaaccagcttatataaggggctggaggctttcgggtgagttctcttcttggggagcctagaggctggtgaggtgtgagcaagaaggaggcttcttcatgccttaagtctagaccaccagcacccctgtgggggacaaatggcaatcctccagcagaacaggaacaatcccaggtccttccacggggtagtgggttattgtctgggtagggccctccatgagttattgcagggaaacatgggggatttggcagcactgcaggatcaaggggcagtaagaaactacagaggat

SEQ ID NO: 446689 - DNA, 506 bp, Homo sapiens
ataaagctcatatgtgtttgcaggaggtgggaagtagttccctgggaggcctggagaaactcggcacagttaaatctcagggaggatatctaaatggctcgcccctcatgccccatccttgccttcacgcttcctcttccagctggcagcgatcgacccttcacccttgacgatttacagtacatgatctttcatacacccttttgcaagatggtccagaagtctctggctcgcctgatgttcaatgacttcctgtcagccagcagtgacacacaaaccagcttatataaggggctggaggctttcgggtgagttctcttcttggggagcctagaggctggtgaggtgtgagcaagaaggaggcttcttcatgccttaagtctagaccaccagcacccctgtgggggacaaatggcaatcctccagcagaacaggaacaatcccaggtccttccacggggtagtgggttattgtctgggtagggccctccatgagttattgcaggg

SEQ ID NO: 446690 - DNA, 2005 bp, Homo sapiens
tggggatctctttcaaggtttctgctgggtttctgaactgctgggtttctgcttgctcctctggagatgcagcgtctgttgactccagtgaagcgcattctgcaactgacaagagcggtgcaggaaacctccctcacacctgctcgcctgctcccagtagcccaccaaaggttttctacagcctctgctgtccccctggccccagcccaatatgtggaccaaactgacctggagaagtataacaatgtggaagcaggaaagtatacagtgggcttgggccagacccgtatgggcttctgctcagtccaagaggacatcaactccctgtgcctgacggtggtgcaacggctgatggagcgcatacagctcccatgggactctgtgggcaggctggaagtaggcactgagaccatcattgacaagtccaaagctgtcaaaacagtgctcatggaactcttccaggattcaggcaatactgatattgagggcatagataccaccaatgcctgctacggtggtactgcctccctcttcaatgctgccaactggatggagtccagttcctgggatggtcgttatgccatggtggtctgtggagacattgccgtctatcccagtggtaatgctcgtcccacaggtggggccggagctgtggctatgctgattgggcccaaggcccctctggccctggagcgagggctgaggggaacccatatggagaatgtgtatgacttctacaaaccaaatttggcctcggagtacccaatagtggatgggaagctttccatccagtgctacttgcgggccttggatcgatgttacacatcataccgtaaaaaaatccagaatcagtggaagcaagctggcagcgatcgacccttcacccttgacgatttacagtacatgatctttcatacacccttttgcaagatggtccagaagtctctggctcgcctgatgttcaatgacttcctgtcagccagcagtgacacacaaaccagcttatataaggggctggaggctttcggggggctaaagctggaagacacctacaccaacaaggacctggataaagcacttctaaaggcctctcaggacatgttcgacaagaaaaccaaggcttccctttacctctccactcacaatgggaacatgtacacctcatccctgtacgggtgcctggcctcgcttctgtcccaccactctgcccaagaactggctggctccaggattggtgccttctcttatggctctggtttagcagcaagtttcttttcatttcgagtatcccaggatgctgctccaggctctcccctggacaagttggtgtccagcacatcagacctgccaaaacgcctagcctcccgaaagtgtgtgtctcctgaggagttcacagaaataatgaaccaaagagagcaattctaccataaggtgaatttctccccacctggtgacacaaacagccttttcccaggtacttggtacctggagcgagtggacgagcagcatcgccgaaagtatgcccggcgtcccgtctaaaggtgttctgcagatccatggaaagcttcctgggaaacgtatgctagcagagcttctccccgtgaatcatatttttaagatcccactcttagctggtaaatgaatttgaatcgacatagtagccccataagcatcagccctgtagagtgaggagccatctctagcgggcccttcattcctctccatgctgcaatcactgtcctgggcttatggtgctatggactaggggtcctttgtgaaagagcaagatggagcaatggagagaagacctcttcctgaatcactggactccagaaatgtgcatgcagatcagctgttgccttcaagatccagataaactttcctgtcatgtgttagaactttattattattaatattgttaaacttctgtgctgttcctgtgaatctccaaattttgtaccttgttctaagctaatatatagcaattaaaaagagagaaagagga

SEQ ID NO: 446691 - DNA, 2006 bp, Homo sapiens
tggggatctctttcaaggtttctgctgggtttctgaactgctgggtttctgcttgctcctctggagatgcagcgtctgttgactccagtgaagcgcattctgcaactgacaagagcggtgcaggaaacctccctcacacctgctcgcctgctcccagtagcccaccaaaggttttctacagcctctgctgtccccctggccaaaacagatacttggccaaaggacgtgggcatcctggccctggaggtctacttcccagcccaatatgtggaccaaactgacctggagaagtataacaatgtggaagcaggaaagtatacagtgggcttgggccagacccgtatgggcttctgctcagtccaagaggacatcaactccctgtgcctgacggtggtgcaacggctgatggagcgcatacagctcccatgggactctgtgggcaggctggaagtaggcactgagaccatcattgacaagtccaaagctgtcaaaacagtgctcatggaactcttccaggattcaggcaatactgatattgagggcatagataccaccaatgcctgctacggtggtactgcctccctcttcaatgctgccaactggatggagtccagttcctgggatggtcgttatgccatggtggtctgtggagacattgccgtctatcccagtggtaatgctcgtcccacaggtggggccggagctgtggctatgctgattgggcccaaggcccctctggccctggagcgagggctgaggggaacccatatggagaatgtgtatgacttctacaaaccaattgcgggccttggatcgatgttacacatcataccgtaaaaaaatccagaatcagtggaagcaagctggcagcgatcgacccttcacccttgacgatttacagtacatgatctttcatacacccttttgcaagatggtccagaagtctctggctcgcctgatgttcaatgacttcctgtcagccagcagtgacacacaaaccagcttatataaggggctggaggctttcggggggctaaagctggaagacacctacaccaacaaggacctggataaagcacttctaaaggcctctcaggacatgttcgacaagaaaaccaaggcttccctttacctctccactcacaatgggaacatgtacacctcatccctgtacgggtgcctggcctcgcttctgtcccaccactctgcccaagaactggctggctccaggattggtgccttctcttatggctctggtttagcagcaagtttcttttcatttcgagtatcccaggatgctgctccaggctctcccctggacaagttggtgtccagcacatcagacctgccaaaacgcctagcctcccgaaagtgtgtgtctcctgaggagttcacagaaataatgaaccaaagagagcaattctaccataaggtgaatttctccccacctggtgacacaaacagccttttcccaggtacttggtacctggagcgagtggacgagcagcatcgccgaaagtatgcccggcgtcccgtctaaaggtgttctgcagatccatggaaagcttcctgggaaacgtatgctagcagagcttctccccgtgaatcatatttttaagatcccactcttagctggtaaatgaatttgaatcgacatagtagccccataagcatcagccctgtagagtgaggagccatctctagcgggcccttcattcctctccatgctgcaatcactgtcctgggcttatggtgctatggactaggggtcctttgtgaaagagcaagatggagcaatggagagaagacctcttcctgaatcactggactccagaaatgtgcatgcagatcagctgttgccttcaagatccagataaactttcctgtcatgtgttagaactttattattattaatattgttaaacttctgtgctgttcctgtgaatctccaaattttgtaccttgttctaagctaatatatagcaattaaaaagagagaaagagga

SEQ ID NO: 446692 - DNA, 1894 bp, Homo sapiens
tggggatctctttcaaggtttctgctgggtttctgaactgctgggtttctgcttgctcctctggagatgcagcgtctgttgactccagtgaagcgcattctgcaactgacaagagcggtgcaggaaacctccctcacacctgctcgcctgctcccagtagcccaccaaaggttttctacagcctctgctgtccccctggccaaaacagatacttggccaaaggacgtgggcatcctggccctggaggtctacttcccagcccaatatgtggaccaaactgacctggagaagtataacaatgtggaagcaggaaagtatacagtgggcttgggccagacccgtatgggcttctgctcagtccaagaggacatcaactccctgtgcctgacggtggtgcaacggctgatggagcgcatacagctcccatgggactctgtgggcaggctggaagtaggcactgagaccatcattgacaagtccaaagctgtcaaaacagtgctcatggaactcttccaggattcaggcaatactgatattgagggcatagataccaccaatgcctgctacggtggtactgcctccctcttcaatgctgccaactggatggagtccagttcctgggatggtcgttatgccatggtggtctgtggagacattgccgtctatcccagtggtaatgctcgtcccacaggtggggccggagctgtggctatgctgattgggcccaaggcccctctggccctggagcgagctggcagcgatcgacccttcacccttgacgatttacagtacatgatctttcatacacccttttgcaagatggtccagaagtctctggctcgcctgatgttcaatgacttcctgtcagccagcagtgacacacaaaccagcttatataaggggctggaggctttcggggggctaaagctggaagacacctacaccaacaaggacctggataaagcacttctaaaggcctctcaggacatgttcgacaagaaaaccaaggcttccctttacctctccactcacaatgggaacatgtacacctcatccctgtacgggtgcctggcctcgcttctgtcccaccactctgcccaagaactggctggctccaggattggtgccttctcttatggctctggtttagcagcaagtttcttttcatttcgagtatcccaggatgctgctccaggctctcccctggacaagttggtgtccagcacatcagacctgccaaaacgcctagcctcccgaaagtgtgtgtctcctgaggagttcacagaaataatgaaccaaagagagcaattctaccataaggtgaatttctccccacctggtgacacaaacagccttttcccaggtacttggtacctggagcgagtggacgagcagcatcgccgaaagtatgcccggcgtcccgtctaaaggtgttctgcagatccatggaaagcttcctgggaaacgtatgctagcagagcttctccccgtgaatcatatttttaagatcccactcttagctggtaaatgaatttgaatcgacatagtagccccataagcatcagccctgtagagtgaggagccatctctagcgggcccttcattcctctccatgctgcaatcactgtcctgggcttatggtgctatggactaggggtcctttgtgaaagagcaagatggagcaatggagagaagacctcttcctgaatcactggactccagaaatgtgcatgcagatcagctgttgccttcaagatccagataaactttcctgtcatgtgttagaactttattattattaatattgttaaacttctgtgctgttcctgtgaatctccaaattttgtaccttgttctaagctaatatatagcaattaaaaagagagaaagagga

SEQ ID NO: 446693 - DNA, 1725 bp, Homo sapiens
aaatgggagaggggaatccgcgaggcttcctctcttgcatcatcaggcattgggataacgatgcatggaatgagtggtgcagatgatggtgaggaatcttagggaactcttctggcaattgaagattaaaatatataactggatataaagtgaaagtctttcctttgagactgttggcttctattctaggttttgttaagcccatgtaggtgaggaaagggaaatatacatctcatttttgtaataccaacaacctgtccaactccttttgaatatgcaagggatgttgaatgggcttgaacttgggcatgggacacagataatgaccagaaacctcctttatatggttctctcatcttttgtgctcaaggtaggctgcattgtgtagtctctgaaacactttgtgtgcctttccagggctgaggggaacccatatggagaatgtgtatgacttctacaaaccaaatttggcctcggagtacccaatagtggatgggaagctttccatccagtgctacttgcgggccttggatcgatgttacacatcataccgtaaaaaaatccagaatcagtggaagcaagctggcagcgatcgacccttcacccttgacgatttacagtacatgatctttcatacacccttttgcaagatggtccagaagtctctggctcgcctgatgttcaatgacttcctgtcagccagcagtgacacacaaaccagcttatataaggggctggaggctttcggggggctaaagctggaagacacctacaccaacaaggacctggataaagcacttctaaaggcctctcaggacatgttcgacaagaaaaccaaggcttccctttacctctccactcacaatgggaacatgtacacctcatccctgtacgggtgcctggcctcgcttctgtcccaccactctgcccaagaactggctggctccaggattggtgccttctcttatggctctggtttagcagcaagtttcttttcatttcgagtatcccaggatgctgctccaggctctcccctggacaagttggtgtccagcacatcagacctgccaaaacgcctagcctcccgaaagtgtgtgtctcctgaggagttcacagaaataatgaaccaaagagagcaattctaccataaggtgaatttctccccacctggtgacacaaacagccttttcccaggtacttggtacctggagcgagtggacgagcagcatcgccgaaagtatgcccggcgtcccgtctaaaggtgttctgcagatccatggaaagcttcctgggaaacgtatgctagcagagcttctccccgtgaatcatatttttaagatcccactcttagctggtaaatgaatttgaatcgacatagtagccccataagcatcagccctgtagagtgaggagccatctctagcgggcccttcattcctctccatgctgcaatcactgtcctgggcttatggtgctatggactaggggtcctttgtgaaagagcaagatggagcaatggagagaagacctcttcctgaatcactggactccagaaatgtgcatgcagatcagctgttgccttcaagatccagataaactttcctgtcatgtgttagaactttattattattaatattgttaaacttctgtgctgttcctgtgaatctccaaattttgtaccttgttctaagctaatatatagcaattaaaaagagagaaagagga

SEQ ID NO: 446694 - DNA, 1832 bp, Homo sapiens
tggggatctctttcaaggtttctgctgggtttctgaactgctgggtttctgcttgctcctctggagatgcagcgtctgttgactccagtgaagcgcattctgcaactgacaagagcggtgcaggaaacctccctcacacctgctcgcctgctcccagtagcccaccaaaggttttctacagcctctgctgtccccctggccaaaacagatacttggccaaaggacgtgggcatcctggccctggaggtctacttcccagcccaatatgtggaccaaactgacctggagaagtataacaatgtggaagcaggaaagtatacagtgggcttgggccagacccgtatgggcttctgctcagtccaagaggacatcaactccctgtgcctgacggtggtgcaacggctgatggagcgcatacagctcccatgggactctgtgggcaggctggaagtaggcactgagaccatcattgacaagtccaaagctgtcaaaacagtgctcatggaactcttccaggattcaggcaatactgatattgagggcatagataccaccaatgcctgctacggtggtactgcctccctcttcaatgctgccaactggatggagtccagttcctgggatggtcgttatgccatggtggtctgtggagacattgccgtctatcccagtggtaatgctcgtcccacaggtggggccggagctgtggctatgctgattgggcccaaggcccctctggccctggagcgagggctgaggggaacccatatggagaatgtgtatgacttctacaaaccaaatttggcctcggagtacccaatagtggatgggaagctttccatccagtgctacttgcgggccttggatcgatgttacacatcataccgtaaaaaaatccagaatcagtggaagcaagctggcagcgatcgacccttcacccttgacgatttacagtacatgatctttcatacacccttttgcaagatggtccagaagtctctggctcgcctgatgttcaatgacttcctgtcagccagcagtgacacacaaaccagcttatataaggggctggaggctttcggggggctaaagctggaagacacctacaccaacaaggacctggataaagcacttctaaaggcctctcaggacatgttcgacaagaaaaccaaggcttccctttacctctccactcacaatgggaacatgtacacctcatccctgtacgggtgcctggcctcgcttctgtcccaccactctgcccaagaactggctggctccaggattggtgccttctcttatggctctggtttagcagcaagtttcttttcatttcgagcgaaagtatgcccggcgtcccgtctaaaggtgttctgcagatccatggaaagcttcctgggaaacgtatgctagcagagcttctccccgtgaatcatatttttaagatcccactcttagctggtaaatgaatttgaatcgacatagtagccccataagcatcagccctgtagagtgaggagccatctctagcgggcccttcattcctctccatgctgcaatcactgtcctgggcttatggtgctatggactaggggtcctttgtgaaagagcaagatggagcaatggagagaagacctcttcctgaatcactggactccagaaatgtgcatgcagatcagctgttgccttcaagatccagataaactttcctgtcatgtgttagaactttattattattaatattgttaaacttctgtgctgttcctgtgaatctccaaattttgtaccttgttctaagctaatatatagcaattaaaaagagagaaagagga

SEQ ID NO: 446695 - DNA, 1226 bp, Homo sapiens
tggggatctctttcaaggtttctgctgggtttctgaactgctgggtttctgcttgctcctctggagatgcagcgtctgttgactccagtgaagcgcattctgcaactgacaagagcggtgcaggaaacctccctcacacctgctcgcctgctcccagtagcccaccaaaggttttctacagcctctgctgtccccctggccaaaacagatacttggccaaaggacgtgggcatcctggccctggaggtctacttcccagcccaatatgtggaccaaactgacctggagaagtataacaatgtggaagcaggaaagtatacagtgggcttgggccagacccgtatgggcttctgctcagtccaagaggacatcaactccctgtgcctgacggtggtgcaacggctgatggagcgcatacagctcccatgggactctgtgggcaggctggaagtaggcactgagaccatcattgacaagtccaaagctgtcaaaacagtgctcatggaactcttccaggattcaggcaatactgatattgagggcatagataccaccaatgcctgctacggtggtactgcctccctcttcaatgctgccaactggatggagtccagttcctgggatggtcgttatgccatggtggtctgtggagacattgccgtctatcccagtggtaatgctcgtcccacaggtggggccggagctgtggctatgctgattgggcccaaggcccctctggccctggagcgagggctgaggggaacccatatggagaatgtgtatgacttctacaaaccaaatttggcctcggagtacccaatagtggatgggaagctttccatccagtgctacttgcgggccttggatcgatgttacacatcataccgtaaaaaaatccagaatcagtggaagcaaggtatgagattcagagggcagaaagtgggggctctatttacataggccaagggtttgtacccaaaggccatgagatggtcttttctctcctgccttgaaaataatgtcaagagaattgtttcctgtcctctttcttacactcttccctgggtctatgctaaaatccatttggaagtcattcaacttcaggtgtaaaattgcttctaacttgagctaaataaaagaaagtaaataatccagggcaaggcccccagtgtgaaaccaagggatgtcagccacctgagaagatggtgttaagaggctgggcagtc

SEQ ID NO: 446696 - DNA, 710 bp, Homo sapiens
tggggatctctttcaaggtttctgctgggtttctgaactgctgggtttctgcttgctcctctggagatgcagcgtctgttgactccagtgaagcgcattctgcaactgacaagagcggtgcaggaaacctccctcacacctgctcgcctgctcccagtagcccaccaaaggttttctacagcctctgctgtccccctggccaaaacagatacttggccaaaggacgtgggcatcctggccctggaggtctacttcccagcccaatatgtggaccaaactgacctggagaagtataacaatgtggaagcaggaaagtatacagtgggcttgggccagacccgtatgggcttctgctcagtccaagaggacatcaactccctgtgcctgacggtggtgcaacggctgatggagcgcatacagctcccatgggactctgtgggcaggctggaagtaggcactgagaccatcattgacaagtccaaagctgtcaaaacagtgctcatggaactcttccaggattcaggcaatactgatattgagggcatagataccaccaatgcctgctacggtggtactgcctccctcttcaatgctgccaactggatggagtccagttcctgggatggtatgtacggccacgaaccttatgtaagggtgctggaattggaggctgatattaccagttttgcttttgttccccgtggcttcat

SEQ ID NO: 446697 - DNA, 4153 bp, Homo sapiens
cttcaaggttttgctgactcagtctggtagtcagagtctgcaggagaagacagttcaaggcagggcctggaggattggatcagtttagggacaggtcaaaggctggcttagagaccttagaggcaggttgcttgggtcgttgaatgctagtctggtcctgagagcccttttctctggcaactgtggactcagagctaaccaattgtagttggcagtgggggtgaagggtgatccagaggcctgagctgcagagggcacaagagagaaaagatgtcttagaaagagctttgagaacatgccttggctgctggcagggaccttggatggggtagtctacacccggaagtgcctgcctgccatcctctagtggctgccttggaaaatatgctcagtgcagccgcgtgcatgaatgaaaacgccgccgggcgcttctagtcggacaaaatgcagccgagaactccgctcgttctgtgcgttctcctgtcccaggtgctgctgctaacatctgcagaagatttggactgcactcctggatttcagcagaaagtgttccatatcaatcagccagctgaattcattgaggaccagtcaattctaaacttgaccttcagtgactgtaagggaaacgacaagctacgctatgaggtctcgagcccatacttcaaggtgaacagcgatggcggcttagttgctctgagaaacataactgcagtgggcaaaactctgttcgtccatgcacggaccccccatgcggaagatatggcagaactcgtgattgtcggggggaaagacatccagggctccttgcaggatatatttaaatttgcaagaacttctcctgtcccaagacaaaagaggtccattgtggtatctcccattttaattccagagaatcagagacagcctttcccaagagatgttggcaaggtagtcgatagtgacaggccagaaaggtccaagttccggctcactggaaagggagtggatcaagagcctaaaggaattttcagaatcaatgagaacacagggagcgtctccgtgacacggaccttggacagagaagtaatcgctgtttatcaactatttgtggagaccactgatgtcaatggcaaaactctcgaggggccggtgcctctggaagtcattgtgattgatcagaatgacaaccgaccgatctttcgggaaggcccctacatcggccacgtcatggaagggtcacccacaggcaccacagtgatgcggatgacagcctttgatgcagatgacccagccaccgataatgccctcctgcggtataatatccgtcaacagacgcctgacaagccatctcccaacatgttctacatcgatcctgagaaaggagacattgtcactgttgtgtcacctgcgctgctggaccgagagactctggaaaatcccaagtatgaactgatcatcgaggctcaagatatggctggactggatgttggattaacaggcacggccacagccacgatcatgatcgatgacaaaaatgatcactcaccaaaattcaccaagaaagagtttcaagccacagtcgaggaaggagctgtgggagttattgtcaatttgacagttgaagataaggatgaccccaccacaggtgcatggagggctgcctacaccatcatcaacggaaaccccgggcagagctttgaaatccacaccaaccctcaaaccaacgaagggatgctttctgttgtcaaaccattggactatgaaatttctgccttccacaccctgctgatcaaagtggaaaatgaagacccactcgtacccgacgtctcctacggccccagctccacagccaccgtccacatcactgtcctggatgtcaacgagggcccagtcttctacccagaccccatgatggtgaccaggcaggaggacctctctgtgggcagcgtgctgctgacagtgaatgccacggaccccgactccctgcagcatcaaaccatcaggtattctgtttacaaggacccagcaggttggctgaatattaaccccatcaatgggactgttgacaccacagctgtgctggaccgtgagtccccatttgtcgacaacagcgtgtacactgctctcttcctggcaattgacagtggcaaccctcccgctacgggcactgggactttgctgataaccctggaggacgtgaatgacaatgccccgttcatttaccccacagtagctgaagtctgtgatgatgccaaaaacctcagtgtagtcattttgggagcatcagataaggatcttcacccgaatacagatcctttcaaatttgaaatccacaaacaagctgttcctgataaagtctggaagatctccaagatcaacaatacacacgccctggtaagccttcttcaaaatctgaacaaagcaaactacaacctgcccatcatggtgacagattcagggaaaccacccatgacgaatatcacagatctcagggtacaagtgtgctcctgcaggaattccaaagtggactgcaacgcggcgggggccctgcgcttcagcctgccctcagtcctgctcctcagcctcttcagcttagcttgtctgtgagaactcctgacgtctgaagcttgactcccaagtttccatagcaacaggaaaaaaaaaaaatctatccaaatctgaagattgcggtttacagctatcgaacttcacaactaggcctcaattgttccggttttttattttctttacaatttcacttagtctgtacttcatcattttgacagcatcttcctccctcctttaattaatggaatcttctgaattttccctgaatgtttaaagatcatgacatatgacttgatcttctgggagcaggaacaatgactactttttctggtgtgttaacatgtcgctagccagtgctccaggcacccagctttgtctgtgggttagtattggtgtatgtatgagtatctgtatgtatatatacacggtatttatagagagagactatcctggagaagcctcgttttgatgccattcttccttgcaaggttaagcaaggtgggtggaaactaagacacctgaaccctccagggcctcccgcatcaaggtcagcatgaggacagaccacagagctgtcacttttgctccgaagctacttctccactgtcccgttcagtctgaatgctgccacaaccagccaggcaggtccacagagagggagagcagagaaagaagtcctttctctttattgagttcgaggactacaaccaatttacactgccatctgatgccgtgatcctgagccaaggaggtgaggagcagagcaggcaatttcaccaccaaatgccaagaaaagggctgacattttctttcatgggcaccaacctgcatttgtatgtgtcccgaatccacagtcgtactgattctaatggggacacagatcatggtagagaatctctccctcctcagtaaatgtacaactgcacctgtcatcatggaggtcatacatgcatacaaagaggtgtacaggtaccatcttgtatacacatatatacccacatgtacagacatacatttatgcacattcacgctgtttgtttcatatatacaggcataaaatagagtaaatacaggtagttttaaaagtacccttttgtgtgaattgactaccgttgtttgcaaacccgaaaataaaagacgttcattatgtatgaaaagtaactgatttgtattctgtgagcatgtaaaagcggaaagttagtgcttgttctaagattaccttcttgttgataaaccataaatgaatcatcaaagctcacaccaaatttttctatcaaataaaactagtgacagcttgtggctttttattagagctcgccacgaactagggtaaggtgagtgtcttagcatattttaatgcagttgcttactaaaggttttaaccgcacatgcacacacacacgctttcttatgcaatctatgtttgcacttgtgctttcagttagccttctgtaggaagtagaagtcatatgttgtctttgttgtagtgaaattatacagatagagttccatatattgtatttgtttcaatggtaaatccttttggaacatatagaatgcagagatttttttttccattaaaataaatgggtattggtggttaaaa

SEQ ID NO: 446698 - DNA, 4559 bp, Homo sapiens
cttcaaggttttgctgactcagtctggtagtcagagtctgcaggagaagacagttcaaggcagggcctggaggattggatcagtttagggacaggtcaaaggctggcttagagaccttagaggcaggttgcttgggtcgttgaatgctagtctggtcctgagagcccttttctctggcaactgtggactcagagctaaccaattgtagttggcagtgggggtgaagggtgatccagaggcctgagctgcagagggcacaagagagaaaagatgtcttagaaagagctttgagaacatgccttggctgctggcagggaccttggatggggtagtctacacccggaagtgcctgcctgccatcctctagtggctgccttggaaaatatgctcagtgcagccgcgtgcatgaatgaaaacgccgccgggcgcttctagtcggacaaaatgcagccgagaactccgctcgttctgtgcgttctcctgtcccaggtgctgctgctaacatctgcagaagatttggactgcactcctggatttcagcagaaagtgttccatatcaatcagccagctgaattcattgaggaccagtcaattctaaacttgaccttcagtgactgtaagggaaacgacaagctacgctatgaggtctcgagcccatacttcaaggtgaacagcgatggcggcttagttgctctgagaaacataactgcagtgggcaaaactctgttcgtccatgcacggaccccccatgcggaagatatggcagaactcgtgattgtcggggggaaagacatccagggctccttgcaggatatatttaaatttgcaagaacttctcctgtcccaagacaaaagaggtccattgtggtatctcccattttaattccagagaatcagagacagcctttcccaagagatgttggcaaggtagtcgatagtgacaggccagaaaggtccaagttccggctcactggaaagggagtggatcaagagcctaaaggaattttcagaatcaatgagaacacagggagcgtctccgtgacacggaccttggacagagaagtaatcgctgtttatcaactatttgtggagaccactgatgtcaatggcaaaactctcgaggggccggtgcctctggaagtcattgtgattgatcagaatgacaaccgaccgatctttcgggaaggcccctacatcggccacgtcatggaagggtcacccacaggcaccacagtgatgcggatgacagcctttgatgcagatgacccagccaccgataatgccctcctgcggtataatatccgtcaacagacgcctgacaagccatctcccaacatgttctacatcgatcctgagaaaggagacattgtcactgttgtgtcacctgcgctgctggaccgagagactctggaaaatcccaagtatgaactgatcatcgaggctcaagatatggctggactggatgttggattaacaggcacggccacagccacgatcatgatcgatgacaaaaatgatcactcaccaaaattcaccaagaaagagtttcaagccacagtcgaggaaggagctgtgggagttattgtcaatttgacagttgaagataaggatgaccccaccacaggtgcatggagggctgcctacaccatcatcaacggaaaccccgggcagagctttgaaatccacaccaaccctcaaaccaacgaagggatgctttctgttgtcaaaccattggactatgaaatttctgccttccacaccctgctgatcaaagtggaaaatgaagacccactcgtacccgacgtctcctacggccccagctccacagccaccgtccacatcactgtcctggatgtcaacgagggcccagtcttctacccagaccccatgatggtgaccaggcaggaggacctctctgtgggcagcgtgctgctgacagtgaatgccacggaccccgactccctgcagcatcaaaccatcaggtattctgtttacaaggacccagcaggttggctgaatattaaccccatcaatgggactgttgacaccacagctgtgctggaccgtgagtccccatttgtcgacaacagcgtgtacactgctctcttcctggcaattgacagtggcaaccctcccgctacgggcactgggactttgctgataaccctggaggacgtgaatgacaatgccccgttcatttaccccacagtagctgaagtctgtgatgatgccaaaaacctcagtgtagtcattttgggagcatcagataaggatcttcacccgaatacagatcctttcaaatttgaaatccacaaacaagctgttcctgataaagtctggaagatctccaagatcaacaatacacacgccctggtaagccttcttcaaaatctgaacaaagcaaactacaacctgcccatcatggtgacagattcagggaaaccacccatgacgaatatcacagatctcagggtacaagtgtgctcctgcaggaattccaaagtggactgcaacgcggcgggggccctgcgcttcagcctgccctcagtcctgctcctcagcctcttcagcttagcttgtctgtgagaactcctgacgtctgaagcttgactcccaagtttccatagcaacaggaaaaaaaaaaaatctatccaaatctgaagattgcggtttacagctatcgaacttcacaactaggcctcaattgttccggttttttattttctttacaatttcacttagtctgtacttcatcattttgacagcatcttcctccctcctttaattaatggaatcttctgaattttccctgaatgtttaaagatcatgacatatgacttgatcttctgggagcaggaacaatgactactttttctggtgtgttaacatgtcgctagccagtgctccaggcacccagctttgtctgtgggttagtattggtgtatgtatgagtatctgtatgtatatatacacggtatttatagagagagactatcctggagaagcctcgttttgatgccattcttccttgcaaggttaagcaaggtgggtggaaactaagacacctgaaccctccagggcctcccgcatcaaggtcagcatgaggacagaccacagagctgtcacttttgctccgaagctacttctccactgtcccgttcagtctgaatgctgccacaaccagccaggcaggtccacagagagggagagcagagaaagaagtcctttctctttattgagttcgaggactacaaccaatttacactgccatctgatgccgtgatcctgagccaaggaggtgaggagcagagcaggcaatttcaccaccaaatgccaagaaaagggctgacattttctttcatgggcaccaacctgcatttgtatgtgtcccgaatccacagtcgtactgattctaatggggacacagatcatggtagagaatctctccctcctcagtaaatgtacaactgcacctgtcatcatggaggtcatacatgcatacaaagaggtgtacaggtaccatcttgtatacacatatatacccacatgtacagacatacatttatgcacattcacgctgtttgtttcatatatacaggcataaaatagagtaaatacaggtagttttaaaagtacccttttgtgtgaattgactaccgttgtttgcaaacccgaaaataaaagacgttcattatgtatgaaaagtaactgatttgtattctgtgagcatgtaaaagcggaaagttagtgcttgttctaagattaccttcttgttgataaaccataaatgaatcatcaaagctcacaccaaatttttctatcaaataaaactagtgacagcttgtggctttttattagagctcgccacgaactagggtaaggtgagtgtcttagcatattttaatgcagttgcttactaaaggttttaaccgcacatgcacacacacacgctttcttatgcaatctatgtttgcacttgtgctttcagttagccttctgtaggaagtagaagtcatatgttgtctttgttgtagtgaaattatacagatagagttccatatattgtatttgtttcaatggtaaatccttttggaacatatagaatgcagagatttttttttccattaaaataaatgggtattggtggttaaaaaaaaaaaaaaaaaaaaaaaaaaaaaaaaaaaaaaaaaaaaaaaaaaaaaaaaaaaaaaagggggggggcccaaaaaaatatctcccccggggggccacatatctctctccgcactaccccttttttgttgtgctaaacaaggggccccactatatggggagctgttttatatataacccgcgggcgcgtgggccgcgtctataaaagtccctgccccggggaacaacacgcgcgacaacgggcgagcaccctgtggcgaagagagcccccctaccctagcgcgggcaggggaaacaaccacggcggacaaacacaccacagagaacataccaccccccccggcgccaaacaacaaacaccacaaggactaacggggccccacccaaccccccccaaaccccgcaca

SEQ ID NO: 446699 - DNA, 3836 bp, Homo sapiens
atcttttgggaagttggctggctggcgaggcagagcctctcctcaaagcctggctcccacggaaaatatgctcagtgcagccgcgtgcatgaatgaaaacgccgccgggcgcttctagtcggacaaaatgcagccgagaactccgctcgttctgtgcgttctcctgtcccaggtgctgctgctaacatctgcagaagatttggactgcactcctggatttcagcagaaagtgttccatatcaatcagccagctgaattcattgaggaccagtcaattctaaacttgaccttcagtgactgtaagggaaacgacaagctacgctatgaggtctcgagcccatacttcaaggtgaacagcgatggcggcttagttgctctgagaaacataactgcagtgggcaaaactctgttcgtccatgcacggaccccccatgcggaagatatggcagaactcgtgattgtcggggggaaagacatccagggctccttgcaggatatatttaaatttgcaagaacttctcctgtcccaagacaaaagaggtccattgtggtatctcccattttaattccagagaatcagagacagcctttcccaagagatgttggcaaggtagtcgatagtgacaggccagaaaggtccaagttccggctcactggaaagggagtggatcaagagcctaaaggaattttcagaatcaatgagaacacagggagcgtctccgtgacacggaccttggacagagaagtaatcgctgtttatcaactatttgtggagaccactgatgtcaatggcaaaactctcgaggggccggtgcctctggaagtcattgtgattgatcagaatgacaaccgaccgatctttcgggaaggcccctacatcggccacgtcatggaagggtcacccacaggcaccacagtgatgcggatgacagcctttgatgcagatgacccagccaccgataatgccctcctgcggtataatatccgtcaacagacgcctgacaagccatctcccaacatgttctacatcgatcctgagaaaggagacattgtcactgttgtgtcacctgcgctgctggaccgagagactctggaaaatcccaagtatgaactgatcatcgaggctcaagatatggctggactggatgttggattaacaggcacggccacagccacgatcatgatcgatgacaaaaatgatcactcaccaaaattcaccaagaaagagtttcaagccacagtcgaggaaggagctgtgggagttattgtcaatttgacagttgaagataaggatgaccccaccacaggtgcatggagggctgcctacaccatcatcaacggaaaccccgggcagagctttgaaatccacaccaaccctcaaaccaacgaagggatgctttctgttgtcaaaccattggactatgaaatttctgccttccacaccctgctgatcaaagtggaaaatgaagacccactcgtacccgacgtctcctacggccccagctccacagccaccgtccacatcactgtcctggatgtcaacgagggcccagtcttctacccagaccccatgatggtgaccaggcaggaggacctctctgtgggcagcgtgctgctgacagtgaatgccacggaccccgactccctgcagcatcaaaccatcaggtattctgtttacaaggacccagcaggttggctgaatattaaccccatcaatgggactgttgacaccacagctgtgctggaccgtgagtccccatttgtcgacaacagcgtgtacactgctctcttcctggcaattgacagtggcaaccctcccgctacgggcactgggactttgctgataaccctggaggacgtgaatgacaatgccccgttcatttaccccacagtagctgaagtctgtgatgatgccaaaaacctcagtgtagtcattttgggagcatcagataaggatcttcacccgaatacagatcctttcaaatttgaaatccacaaacaagctgttcctgataaagtctggaagatctccaagatcaacaatacacacgccctggtaagccttcttcaaaatctgaacaaagcaaactacaacctgcccatcatggtgacagattcagggaaaccacccatgacgaatatcacagatctcagggtacaagtgtgctcctgcaggaattccaaagtggactgcaacgcggcgggggccctgcgcttcagcctgccctcagtcctgctcctcagcctcttcagcttagcttgtctgtgagaactcctgacgtctgaagcttgactcccaagtttccatagcaacaggaaaaaaaaaaaatctatccaaatctgaagattgcggtttacagctatcgaacttcacaactaggcctcaattgttccggttttttattttctttacaatttcacttagtctgtacttcatcattttgacagcatcttcctccctcctttaattaatggaatcttctgaattttccctgaatgtttaaagatcatgacatatgacttgatcttctgggagcaggaacaatgactactttttctggtgtgttaacatgtcgctagccagtgctccaggcacccagctttgtctgtgggttagtattggtgtatgtatgagtatctgtatgtatatatacacggtatttatagagagagactatcctggagaagcctcgttttgatgccattcttccttgcaaggttaagcaaggtgggtggaaactaagacacctgaaccctccagggcctcccgcatcaaggtcagcatgaggacagaccacagagctgtcacttttgctccgaagctacttctccactgtcccgttcagtctgaatgctgccacaaccagccaggcaggtccacagagagggagagcagagaaagaagtcctttctctttattgagttcgaggactacaaccaatttacactgccatctgatgccgtgatcctgagccaaggaggtgaggagcagagcaggcaatttcaccaccaaatgccaagaaaagggctgacattttctttcatgggcaccaacctgcatttgtatgtgtcccgaatccacagtcgtactgattctaatggggacacagatcatggtagagaatctctccctcctcagtaaatgtacaactgcacctgtcatcatggaggtcatacatgcatacaaagaggtgtacaggtaccatcttgtatacacatatatacccacatgtacagacatacatttatgcacattcacgctgtttgtttcatatatacaggcataaaatagagtaaatacaggtagttttaaaagtacccttttgtgtgaattgactaccgttgtttgcaaacccgaaaataaaagacgttcattatgtatgaaaagtaactgatttgtattctgtgagcatgtaaaagcggaaagttagtgcttgttctaagattaccttcttgttgataaaccataaatgaatcatcaaagctcacaccaaatttttctatcaaataaaactagtgacagcttgtggctttttattagagctcgccacgaactagggtaaggtgagtgtcttagcatattttaatgcagttgcttactaaaggttttaaccgcacatgcacacacacacgctttcttatgcaatctatgtttgcacttgtgctttcagttagccttctgtaggaagtagaagtcatatgttgtctttgttgtagtgaaattatacagatagagttccatatattgtatttgtttcaatggtaaatccttttggaacatatagaatgcagagatttttttttccattaaaataaatgggtattggtggttaaaa

SEQ ID NO: 446700 - DNA, 3626 bp, Homo sapiens
agcagagctgccaaccagagcctctgatcaacacaggataaccagcaggagagttggtgtaattccagacagtgtgaccttcagtgactgtaagggaaacgacaagctacgctatgaggtctcgagcccatacttcaaggtgaacagcgatggcggcttagttgctctgagaaacataactgcagtgggcaaaactctgttcgtccatgcacggaccccccatgcggaagatatggcagaactcgtgattgtcggggggaaagacatccagggctccttgcaggatatatttaaatttgcaagaacttctcctgtcccaagacaaaagaggtccattgtggtatctcccattttaattccagagaatcagagacagcctttcccaagagatgttggcaaggtagtcgatagtgacaggccagaaaggtccaagttccggctcactggaaagggagtggatcaagagcctaaaggaattttcagaatcaatgagaacacagggagcgtctccgtgacacggaccttggacagagaagtaatcgctgtttatcaactatttgtggagaccactgatgtcaatggcaaaactctcgaggggccggtgcctctggaagtcattgtgattgatcagaatgacaaccgaccgatctttcgggaaggcccctacatcggccacgtcatggaagggtcacccacaggcaccacagtgatgcggatgacagcctttgatgcagatgacccagccaccgataatgccctcctgcggtataatatccgtcaacagacgcctgacaagccatctcccaacatgttctacatcgatcctgagaaaggagacattgtcactgttgtgtcacctgcgctgctggaccgagagactctggaaaatcccaagtatgaactgatcatcgaggctcaagatatggctggactggatgttggattaacaggcacggccacagccacgatcatgatcgatgacaaaaatgatcactcaccaaaattcaccaagaaagagtttcaagccacagtcgaggaaggagctgtgggagttattgtcaatttgacagttgaagataaggatgaccccaccacaggtgcatggagggctgcctacaccatcatcaacggaaaccccgggcagagctttgaaatccacaccaaccctcaaaccaacgaagggatgctttctgttgtcaaaccattggactatgaaatttctgccttccacaccctgctgatcaaagtggaaaatgaagacccactcgtacccgacgtctcctacggccccagctccacagccaccgtccacatcactgtcctggatgtcaacgagggcccagtcttctacccagaccccatgatggtgaccaggcaggaggacctctctgtgggcagcgtgctgctgacagtgaatgccacggaccccgactccctgcagcatcaaaccatcaggtattctgtttacaaggacccagcaggttggctgaatattaaccccatcaatgggactgttgacaccacagctgtgctggaccgtgagtccccatttgtcgacaacagcgtgtacactgctctcttcctggcaattgacagtggcaaccctcccgctacgggcactgggactttgctgataaccctggaggacgtgaatgacaatgccccgttcatttaccccacagtagctgaagtctgtgatgatgccaaaaacctcagtgtagtcattttgggagcatcagataaggatcttcacccgaatacagatcctttcaaatttgaaatccacaaacaagctgttcctgataaagtctggaagatctccaagatcaacaatacacacgccctggtaagccttcttcaaaatctgaacaaagcaaactacaacctgcccatcatggtgacagattcagggaaaccacccatgacgaatatcacagatctcagggtacaagtgtgctcctgcaggaattccaaagtggactgcaacgcggcgggggccctgcgcttcagcctgccctcagtcctgctcctcagcctcttcagcttagcttgtctgtgagaactcctgacgtctgaagcttgactcccaagtttccatagcaacaggaaaaaaaaaaaatctatccaaatctgaagattgcggtttacagctatcgaacttcacaactaggcctcaattgttccggttttttattttctttacaatttcacttagtctgtacttcatcattttgacagcatcttcctccctcctttaattaatggaatcttctgaattttccctgaatgtttaaagatcatgacatatgacttgatcttctgggagcaggaacaatgactactttttctggtgtgttaacatgtcgctagccagtgctccaggcacccagctttgtctgtgggttagtattggtgtatgtatgagtatctgtatgtatatatacacggtatttatagagagagactatcctggagaagcctcgttttgatgccattcttccttgcaaggttaagcaaggtgggtggaaactaagacacctgaaccctccagggcctcccgcatcaaggtcagcatgaggacagaccacagagctgtcacttttgctccgaagctacttctccactgtcccgttcagtctgaatgctgccacaaccagccaggcaggtccacagagagggagagcagagaaagaagtcctttctctttattgagttcgaggactacaaccaatttacactgccatctgatgccgtgatcctgagccaaggaggtgaggagcagagcaggcaatttcaccaccaaatgccaagaaaagggctgacattttctttcatgggcaccaacctgcatttgtatgtgtcccgaatccacagtcgtactgattctaatggggacacagatcatggtagagaatctctccctcctcagtaaatgtacaactgcacctgtcatcatggaggtcatacatgcatacaaagaggtgtacaggtaccatcttgtatacacatatatacccacatgtacagacatacatttatgcacattcacgctgtttgtttcatatatacaggcataaaatagagtaaatacaggtagttttaaaagtacccttttgtgtgaattgactaccgttgtttgcaaacccgaaaataaaagacgttcattatgtatgaaaagtaactgatttgtattctgtgagcatgtaaaagcggaaagttagtgcttgttctaagattaccttcttgttgataaaccataaatgaatcatcaaagctcacaccaaatttttctatcaaataaaactagtgacagcttgtggctttttattagagctcgccacgaactagggtaaggtgagtgtcttagcatattttaatgcagttgcttactaaaggttttaaccgcacatgcacacacacacgctttcttatgcaatctatgtttgcacttgtgctttcagttagccttctgtaggaagtagaagtcatatgttgtctttgttgtagtgaaattatacagatagagttccatatattgtatttgtttcaatggtaaatccttttggaacatatagaatgcagagatttttttttccattaaaataaatgggtattggtggttaaaa

SEQ ID NO: 446701 - DNA, 3774 bp, Homo sapiens
atcttttgggaagttggctggctggcgaggcagagcctctcctcaaagcctggctcccacggaaaatatgctcagtgcagccgcgtgcatgaatgaaaacgccgccgggcgcttctagtcggacaaaatgcagccgagaactccgctcgttctgtgcgttctcctgtcccaggtgctgctgctaacatctgcagaagatttggactgcactcctggatttcagcagaaagtgttccatatcaatcagccagctgaattcattgaggaccagtcaattctaaacttgaccttcagtgactgtaagggaaacgacaagctacgctatgaggtctcgagcccatacttcaaggtgaacagcgatggcggcttagttgctctgagaaacataactgcagtgggcaaaactctgttcgtccatgcacggaccccccatgcggaagatatggcagaactcgtgattgtcggggggaaagacatccagggctccttgcaggatatatttaaatttgcaagaacttctcctgtcccaagacaaaagaggtccattgtggtatctcccattttaattccagagaatcagagacagcctttcccaagagatgttggcaaggtagtcgatagtgacaggccagaaaggtccaagttccggctcactggaaagggagtggatcaagagcctaaaggaattttcagaatcaatgagaacacagggagcgtctccgtgacacggaccttggacagagaagtaatcgctgtttatcaactatttgtggagaccactgatgtcaatggcaaaactctcgaggggccggtgcctctggaagtcattgtgattgatcagaatgacaaccgaccgatctttcgggaaggcccctacatcggccacgtcatggaagggtcacccacaggcaccacagtgatgcggatgacagcctttgatgcagatgacccagccaccgataatgccctcctgcggtataatatccgtcaacagacgcctgacaagccatctcccaacatgttctacatcgatcctgagaaaggagacattgtcactgttgtgtcacctgcgctgctggaccgagagactctggaaaatcccaagtatgaactgatcatcgaggctcaagatatggctggactggatgttggattaacaggcacggccacagccacgatcatgatcgatgacaaaaatgatcactcaccaaaattcaccaagaaagagtttcaagccacagtcgaggaaggagctgtgggagttattgtcaatttgacagttgaagataaggatgaccccaccacaggtgcatggagggctgcctacaccatcatcaacggaaaccccgggcagagctttgaaatccacaccaaccctcaaaccaacgaagggatgctttctgttgtcaaaccattggactatgaaatttctgccttccacaccctgctgatcaaagtggaaaatgaagacccactcgtacccgacgtctcctacggccccagctccacagccaccgtccacatcactgtcctggatgtcaacgagggcccagtcttctacccagaccccatgatggtgaccaggcaggaggacctctctgtgggcagcgtgctgctgacagtgaatgccacggaccccgactccctgcagcatcaaaccatcaggtattctgtttacaaggacccagcaggttggctgaatattaaccccatcaatgggactgttgacaccacagctgtgctggaccgtgagtccccatttgtcgacaacagcgtgtacactgctctcttcctggcaattgacagtggcaaccctcccgctacgggcactgggactttgctgataaccctggaggacgtgaatgacaatgccccgttcatttaccccacagtagctgaagtctgtgatgatgccaaaaacctcagtgtagtcattttgggagcatcagataaggatcttcacccgaatacagatcctttcaaatttgaaatccacaaacaagctgttcctgataaagtctggaagatctccaagatcaacaatacacacgccctggtaagccttcttcaaaatctgaacaaagcaaactacaacctgcccatcatggtgacagattcagggaaaccacccatgacgaatatcacagatctcagggtacaagtgtgctcctgcaggaattccaaagtggactgcaacgcggcgggggccctgcgcttcagcctgccctcagtcctgctcctcagcctcttcagcttagcttgtctgtgagaactcctgacgtctgaagcttgactcccaagtttccatagcaacaggagcctcaattgttccggttttttattttctttacaatttcacttagtctgtacttcatcattttgacagcatcttcctccctcctttaattaatggaatcttctgaattttccctgaatgtttaaagatcatgacatatgacttgatcttctgggagcaggaacaatgactactttttctggtgtgttaacatgtcgctagccagtgctccaggcacccagctttgtctgtgggttagtattggtgtatgtatgagtatctgtatgtatatatacacggtatttatagagagagactatcctggagaagcctcgttttgatgccattcttccttgcaaggttaagcaaggtgggtggaaactaagacacctgaaccctccagggcctcccgcatcaaggtcagcatgaggacagaccacagagctgtcacttttgctccgaagctacttctccactgtcccgttcagtctgaatgctgccacaaccagccaggcaggtccacagagagggagagcagagaaagaagtcctttctctttattgagttcgaggactacaaccaatttacactgccatctgatgccgtgatcctgagccaaggaggtgaggagcagagcaggcaatttcaccaccaaatgccaagaaaagggctgacattttctttcatgggcaccaacctgcatttgtatgtgtcccgaatccacagtcgtactgattctaatggggacacagatcatggtagagaatctctccctcctcagtaaatgtacaactgcacctgtcatcatggaggtcatacatgcatacaaagaggtgtacaggtaccatcttgtatacacatatatacccacatgtacagacatacatttatgcacattcacgctgtttgtttcatatatacaggcataaaatagagtaaatacaggtagttttaaaagtacccttttgtgtgaattgactaccgttgtttgcaaacccgaaaataaaagacgttcattatgtatgaaaagtaactgatttgtattctgtgagcatgtaaaagcggaaagttagtgcttgttctaagattaccttcttgttgataaaccataaatgaatcatcaaagctcacaccaaatttttctatcaaataaaactagtgacagcttgtggctttttattagagctcgccacgaactagggtaaggtgagtgtcttagcatattttaatgcagttgcttactaaaggttttaaccgcacatgcacacacacacgctttcttatgcaatctatgtttgcacttgtgctttcagttagccttctgtaggaagtagaagtcatatgttgtctttgttgtagtgaaattatacagatagagttccatatattgtatttgtttcaatggtaaatccttttggaacatatagaatgcagagatttttttttccattaaaataaatgggtattggtggttaaaa

SEQ ID NO: 446702 - DNA, 1530 bp, Homo sapiens
  misc_feature (1530)..(1530): n is a, c, g, or t
atcttttgggaagttggctggctggcgaggcagagcctctcctcaaagcctggctcccacggaaaatatgctcagtgcagccgcgtgcatgaatgaaaacgccgccgggcgcttctagtcggacaaaatgcagccgagaactccgctcgttctgtgcgttctcctgtcccaggtgctgctgctaacatctgcagaagatttggactgcactcctggatttcagcagaaagtgttccatatcaatcagccagctgaattcattgaggaccagtcaattctaaactgtaagcaatgtcactcaaagatgcttttagactcttctcatatttgaatttactaatgtttatgactgtgtctcaggatgtggtatttcctaaactaagtgttttctgattatttttcttatgtcactgcttgacccaaagtggaaattcttgaatgagggcctggccaacttagaggttaatagagtgatatgcatctctttttagtattttatcatcagtgggtatctccatactgctgtcagaaaagggggctgtcagcctccaatgagagttgtacactgtgcaaaggaaatgaaattcatttcccctgggcagatccccaaaatcaaaatcattgccttctcgcagattgctgttctacctgtagtttctcatacatagcattagatcaaaataatggtgagagtatgacattggcttctgggaatttttagacacagacatcaaaaactcttattcttaaggctaataagatgggttttagaaagattcaaaacctctactgattattctatggattaagctcaactcatcctgaattccaattgatttatttaaaatatgcatctttcatatctgtggtgatgatctctttttgtttttaatgtcaatattatattgctttatctttaagaagtgttagggtacattgctaaatgcataacaagtacagttttagtgcaatagaatttaaaattggtggtagacaaatagctatttcattgtaggctcttgagtaccttgcttaacaactggaaatgaagaatatggaaacaactgatctaaactgatcagatgcagtcgggtgtgatggctcatgcctgtaatctcaccactttgggaggccgaggaggatggatggcttgaggccagaagttcaagaccagtctgggcaacctggtgaaaccccatctctactaaagttacaaaacttagctgggcatggtggcatatgcctatagtcccagctacgcgggaggctgcggcagaagaatcgctttaacccaggaggtggaggctgcagtgagccgagatcataccattgcactccaacctgggtgacagagcgagactgtgtctcaaaaaagaaaaaaaaaaaagaagaagaagaaaattaaaataagctgatcatacgctccaaggtcttttcaaggaaggtgattccacattggctcttatggtctcaggtttacgttccacgctagctaagttcctttagtcctatgctatgtggctgacaagn

SEQ ID NO: 446703 - DNA, 360 bp, Homo sapiens
ctgaacagcaaagatgttttcttctttatttcaggtcttttcatggaatgaaacagagagggaaaggaggaagaaaagctgaaacatagcaaagcttgggaaatacttttcttttttaatttggaaagtgatgggcacactgctgcactgctattgcccaggtggggaaggggctctggccgttgttgacccattgataaccattccgtgcctttctgtcttgccccggtaggcaccacagtgatgcggatgacagcctttgatgcagatgacccagccaccgataatgccctcctgcggtataatatccgtcaacagacgcctgacaagccatctcccaacatgttctacatcgatcct

SEQ ID NO: 446704 - DNA, 3700 bp, Homo sapiens
cttcaaggttttgctgactcagtctggtagtcagagtctgcaggagaagacagttcaaggcagggcctggaggattggatcagtttagggacaggtcaaaggctggcttagagaccttagaggcaggttgcttgggtcgttgaatgctagtctggtcctgagagcccttttctctggcaactgtggactcagagctaaccaattgtagttggcagtgggggtgaagggtgatccagaggcctgagctgcagagggcacaagagagaaaagatgtcttagaaagagctttgagaacatgccttggctgctggcagggaccttggatggggtagtctacacccggaagtgcctgcctgccatcctctagtggctgccttggaaaatatgctcagtgcagccgcgtgcatgaatgaaaacgccgccgggcgcttctagtcggacaaaatgcagccgagaactccgctcgttctgtgcgttctcctgtcccaggtgctgctgctaacatctgcagaagatttggactgcactcctggatttcagcagaaagtgttccatatcaatcagccagctgaattcattgaggaccagtcaattctaaacttgaccttcagtgactgtaagggaaacgacaagctacgctatgaggtctcgagcccatacttcaaggtgaacagcgatggcggcttagttgctctgagaaacataactgcagtgggcaaaactctgttcgtccatgcacggaccccccatgcggaagatatggcagaactcgtgattgtcggggggaaagacatccagggctccttgcaggatatatttaaatttgcaagaacttctcctgtcccaagacaaaagaggtccattgtggtatctcccattttaattccagagaatcagagacagcctttcccaagagatgttggcaaggtagtcgatagtgacaggccagaaaggtccaagttccggctcactggaaagggagtggatcaagagcctaaaggaattttcagaatcaatgagaacacagggagcgtctccgtgacacggaccttggacagagaagtaatcgctgtttatcaactatttgtggagaccactgatgtcaatggcaaaactctcgaggggccggtgcctctggaagtcattgtgattgatcagaatgacaaccgaccgatctttcgggaaggcccctacatcggccacgtcatggaagggtcacccacaggcaccacagtgatgcggatgacagcctttgatgcagatgacccagccaccgataatgccctcctgcggtataatatccgtcaacagacgcctgacaagccatctcccaacatgttctacatcgatcctgagaaaggagacattgtcactgttgtgtcacctgcgctgctggaccgagagactctggaaaatcccaagtatgaactgatcatcgaggctcaagatatggctggactggatgttggattaacaggcacggccacagccacgatcatgatcgatgacaaaaatgatcactcaccaaaattcaccaagaaagagtttcaagccacagtcgaggaaggagctgtgggagttattgtcaatttgacagttgaagataaggatgaccccaccacaggtgcatggagggctgcctacaccatcatcaacggaaaccccgggcagagctttgaaatccacaccaaccctcaaaccaacgaagggatgctttctgttgtcaaaccattggactatgaaatttctgccttccacaccctgctgatcaaagtggaaaatgaagacccactcgtacccgacgtctcctacggccccagctccacagccaccgtccacatcactgtcctggatgtcaacgagggcccagtcttctacccagaccccatgatggtgaccaggcaggaggacctctctgtgggcagcgtgctgctgacagtgaatgccacggaccccgactccctgcagcatcaaaccatcaggtattctgtttacaaggacccagcaggttggctgaatattaaccccatcaatgggactgttgacaccacagctgtgctggaccgtgagtccccatttgtcgacaacagcgtgtacactgctctcttcctggcaattgacagtggcaaccctcccgctacgggcactgggactttgctgataaccctggaggacgtgaatgacaatgccccgttcatttaccccacagtagctgaagtctgtgatgatgccaaaaacctcagtgtagtcattttgggagcatcagataaggatcttcacccgaatacagatcctttcaaatttgaaatccacaaacaagctgttcctgataaagtctggaagatctccaagatcaacaatacacacgccctggtaagccttcttcaaaatctgaacaaagcaaactacaacctgcccatcatggtgacagattcagggaaaccacccatgacgaatatcacagatctcagggtacaagtgtgctcctgcaggaattccaaagtggactgcaacgcggcgggggccctgcgcttcagcctgccctcagtcctgctcctcagcctcttcagcttagcttgtctgtgagaactcctgacgtctgaagcttgactcccaagtttccatagcaacaggaaaaaaaaaaaatctatccaaatctgaagattgcggtttacagctatcgaacttcacaactaggcctcaattgttccggttttttattttctttacaatttcacttagtctgtacttcatcattttgacagcatcttcctccctcctttaattaatggaatcttctgaattttccctgaatgtttaaagatcatgacatatgacttgatcttctgggagcaggaacaatgactactttttctggtgtgttaacatgtcgctagccagtgctccaggcacccagctttgtctgtgggttagtattggtgtatgtatgagtatctgtatgtatatatacacggtatttatagagagagactatcctggagaagcctcgttttgatgccattcttccttgcaaggttaagcaaggtgggtggaaactaagacacctgaaccctccagggcctcccgcatcaaggtcagcatgaggacagaccacagagctgtcacttttgctccgaagctacttctccactgtcccgttcagtctgaatgctgccacaaccagccaggcaggtccacagagagggagagcagagaaagaagtcctttctctttattgagttcgaggactacaaccaatttacactgccatctgatgccgtgatcctgagccaaggaggtgaggagcagagcaggcaatttcaccaccaaatgccaagaaaagggctgacattttctttcatgggcaccaacctgcatttgtatgtgtcccgaatccacagtcgtactgattctaatggggacacagatcatggtagagaatctctccctcctcagtaaatgtacaactgcacctgtcatcatggaggtcatacatgcatacaaagaggtgtacaggtaccatcttgtatacacatatatacccacatgtacagacatacatttatgcacattcacgctgtttgtttcatatatacaggcataaaatagagtaaatacaggtagttttaaaagtacccttttgtgtgaattgactaccgttgtttgcaaacccgaaaataaaagacgttcattatgtatg

SEQ ID NO: 446705 - DNA, 4174 bp, Homo sapiens
cttcaaggttttgctgactcagtctggtagtcagagtctgcaggagaagacagttcaaggcagggcctggaggattggatcagtttagggacaggtcaaaggctggcttagagaccttagaggcaggttgcttgggtcgttgaatgctagtctggtcctgagagcccttttctctggcaactgtggactcagagctaaccaattgtagttggcagtgggggtgaagggtgatccagaggcctgagctgcagagggcacaagagagaaaagatgtcttagaaagagctttgagaacatgccttggctgctggcagggaccttggatggggtagtctacacccggaagtgcctgcctgccatcctctagtggctgccttggaaaatatgctcagtgcagccgcgtgcatgaatgaaaacgccgccgggcgcttctagtcggacaaaatgcagccgagaactccgctcgttctgtgcgttctcctgtcccaggtgctgctgctaacatctgcagaagatttggactgcactcctggatttcagcagaaagtgttccatatcaatcagccagctgaattcattgaggaccagtcaattctaaacttgaccttcagtgactgtaagggaaacgacaagctacgctatgaggtctcgagcccatacttcaaggtgaacagcgatggcggcttagttgctctgagaaacataactgcagtgggcaaaactctgttcgtccatgcacggaccccccatgcggaagatatggcagaactcgtgattgtcggggggaaagacatccagggctccttgcaggatatatttaaatttgcaagaacttctcctgtcccaagacaaaagaggtccattgtggtatctcccattttaattccagagaatcagagacagcctttcccaagagatgttggcaaggtagtcgatagtgacaggccagaaaggtccaagttccggctcactggaaagggagtggatcaagagcctaaaggaattttcagaatcaatgagaacacagggagcgtctccgtgacacggaccttggacagagaagtaatcgctgtttatcaactatttgtggagaccactgatgtcaatggcaaaactctcgaggggccggtgcctctggaagtcattgtgattgatcagaatgacaaccgaccgatctttcgggaaggcccctacatcggccacgtcatggaagggtcacccacaggcaccacagtgatgcggatgacagcctttgatgcagatgacccagccaccgataatgccctcctgcggtataatatccgtcaacagacgcctgacaagccatctcccaacatgttctacatcgatcctgagaaaggagacattgtcactgttgtgtcacctgcgctgctggaccgagagactctggaaaatcccaagtatgaactgatcatcgaggctcaagatatggctggactggatgttggattaacaggcacggccacagccacgatcatgatcgatgacaaaaatgatcactcaccaaaattcaccaagaaagagtttcaagccacagtcgaggaaggagctgtgggagttattgtcaatttgacagttgaagataaggatgaccccaccacaggtgcatggagggctgcctacaccatcatcaacggaaaccccgggcagagctttgaaatccacaccaaccctcaaaccaacgaagggatgctttctgttgtcaaaccattggactatgaaatttctgccttccacaccctgctgatcaaagtggaaaatgaagacccactcgtacccgacgtctcctacggccccagctccacagccaccgtccacatcactgtcctggatgtcaacgagggcccagtcttctacccagaccccatgatggtgaccaggcaggaggacctctctgtgggcagcgtgctgctgacagtgaatgccacggaccccgactccctgcagcatcaaaccatcaggtattctgtttacaaggacccagcaggttggctgaatattaaccccatcaatgggactgttgacaccacagctgtgctggaccgtgagtccccatttgtcgacaacagcgtgtacactgctctcttcctggcaattgacagtggcaaccctcccgctacgggcactgggactttgctgataaccctggaggacgtgaatgacaatgccccgttcatttaccccacagtagctgaagtctgtgatgatgccaaaaacctcagtgtagtcattttgggagcatcagataaggatcttcacccgaatacagatcctttcaaatttgaaatccacaaacaagctgttcctgataaagtctggaagatctccaagatcaacaatacacacgccctggtaagccttcttcaaaatctgaacaaagcaaactacaacctgcccatcatggtgacagattcagggaaaccacccatgacgaatatcacagatctcagggtacaagtgtgctcctgcaggaattccaaagtggactgcaacgcggcgggggccctgcgcttcagcctgccctcagtcctgctcctcagcctcttcagcttagcttgtctgtgagaactcctgacgtctgaagcttgactcccaagtttccatagcaacaggaaaaaaaaaaaatctatccaaatctgaagattgcggtttacagctatcgaacttcacaactaggcctcaattgttccggttttttattttctttacaatttcacttagtctgtacttcatcattttgacagcatcttcctccctcctttaattaatggaatcttctgaattttccctgaatgtttaaagatcatgacatatgacttgatcttctgggagcaggaacaatgactactttttctggtgtgttaacatgtcgctagccagtgctccaggcacccagctttgtctgtgggttagtattggtgtatgtatgagtatctgtatgtatatatacacggtatttatagagagagactatcctggagaagcctcgttttgatgccattcttccttgcaaggttaagcaaggtgggtggaaactaagacacctgaaccctccagggcctcccgcatcaaggtcagcatgaggacagaccacagagctgtcacttttgctccgaagctacttctccactgtcccgttcagtctgaatgctgccacaaccagccaggcaggtccacagagagggagagcagagaaagaagtcctttctctttattgagttcgaggactacaaccaatttacactgccatctgatgccgtgatcctgagccaaggaggtgaggagcagagcaggcaatttcaccaccaaatgccaagaaaagggctgacattttctttcatgggcaccaacctgcatttgtatgtgtcccgaatccacagtcgtactgattctaatggggacacagatcatggtagagaatctctccctcctcagtaaatgtacaactgcacctgtcatcatggaggtcatacatgcatacaaagaggtgtacaggtaccatcttgtatacacatatatacccacatgtacagacatacatttatgcacattcacgctgtttgtttcatatatacaggcataaaatagagtaaatacaggtagttttaaaagtacccttttgtgtgaattgactaccgttgtttgcaaacccgaaaataaaagacgttcattatgtatgaaaagtaactgatttgtattctgtgagcatgtaaaagcggaaagttagtgcttgttctaagattaccttcttgttgataaaccataaatgaatcatcaaagctcacaccaaatttttctatcaaataaaactagtgacagcttgtggctttttattagagctcgccacgaactagggtaaggtgagtgtcttagcatattttaatgcagttgcttactaaaggttttaaccgcacatgcacacacacacgctttcttatgcaatctatgtttgcacttgtgctttcagttagccttctgtaggaagtagaagtcatatgttgtctttgttgtagtgaaattatacagatagagttccatatattgtatttgtttcaatggtaaatccttttggaacatatagaatgcagagatttttttttccattaaaataaatgggtattggtggttaaaactgctggacagtaaaaattct

SEQ ID NO: 446706 - DNA, 3782 bp, Homo sapiens
  misc_feature (771)..(771): n is a, c, g, or t
atcttttgggaagttggctggctggcgaggcagagcctctcctcaaagcctggctcccacggaaaatatgctcagtgcagccgcgtgcatgaatgaaaacgccgccgggcgcttctagtcggacaaaatgcagccgagaactccgctcgttctgtgcgttctcctgtcccaggtgctgctgctaacatctgcagaagatttggactgcactcctggatttcagcagaaagtgttccatatcaatcagccagctgaattcattgaggaccagtcaattctaaacttgaccttcagtgactgtaagggaaacgacaagctacgctatgaggtctcgagcccatacttcaaggtgaacagcgatggcggcttagttgctctgagaaacataactgcagtgggcaaaactctgttcgtccatgcacggaccccccatgcggaagatatggcagaactcgtgattgtcggggggaaagacatccagggctccttgcaggatatatttaaatttgcaagaacttctcctgtcccaagacaaaagaggtccattgtggtatctcccattttaattccagagaatcagagacagcctttcccaagagatgttggcaaggtagtcgatagtgacaggccagaaaggtccaagttccggctcactggaaagggagtggatcaagagcctaaaggaattttcagaatcaatgagaacacagggagcgtctccgtgacacggaccttggacagagaagtaatcgctgtttatcaactatttgnggagaccactgatgtcaatgacaaccgaccgatctttcgggaaggcccctacatcggccacgtcatggaagggtcacccacaggcaccacagtgatgcggatgacagcctttgatgcagatgacccagccaccgataatgccctcctgcggtataatatccgtcaacagacgcctgacaagccatctcccaacatgttctacatcgatcctgagaaaggagacattgtcactgttgtgtcacctgcgctgctggaccgagagactctggaaaatcccaagtatgaactgatcatcgaggctcaagatatggctggactggatgttggattaacaggcacggccacagccacgatcatgatcgatgacaaaaatgatcactcaccaaaattcaccaagaaagagtttcaagccacagtcgaggaaggagctgtgggagttattgtcaatttgacagttgaagataaggatgaccccaccacaggtgcatggagggctgcctacaccatcatcaacggaaaccccgggcagagctttgaaatccacaccaaccctcaaaccaacgaagggatgctttctgttgtcaaaccattggactatgaaatttctgccttccacaccctgctgatcaaagtggaaaatgaagacccactcgtacccgacgtctcctacggccccagctccacagccaccgtccacatcactgtcctggatgtcaacgagggcccagtcttctacccagaccccatgatggtgaccaggcaggaggacctctctgtgggcagcgtgctgctgacagtgaatgccacggaccccgactccctgcagcatcaaaccatcaggtattctgtttacaaggacccagcaggttggctgaatattaaccccatcaatgggactgttgacaccacagctgtgctggaccgtgagtccccatttgtcgacaacagcgtgtacactgctctcttcctggcaattgacagtggcaaccctcccgctacgggcactgggactttgctgataaccctggaggacgtgaatgacaatgccccgttcatttaccccacagtagctgaagtctgtgatgatgccaaaaacctcagtgtagtcattttgggagcatcagataaggatcttcacccgaatacagatcctttcaaatttgaaatccacaaacaagctgttcctgataaagtctggaagatctccaagatcaacaatacacacgccctggtaagccttcttcaaaatctgaacaaagcaaactacaacctgcccatcatggtgacagattcagggaaaccacccatgacgaatatcacagatctcagggtacaagtgtgctcctgcaggaattccaaagtggactgcaacgcggcgggggccctgcgcttcagcctgccctcagtcctgctcctcagcctcttcagcttagcttgtctgtgagaactcctgacgtctgaagcttgactcccaagtttccatagcaacaggaaaaaaaaaaaatctatccaaatctgaagattgcggtttacagctatcgaacttcacaactaggcctcaattgttccggttttttattttctttacaatttcacttagtctgtacttcatcattttgacagcatcttcctccctcctttaattaatggaatcttctgaattttccctgaatgtttaaagatcatgacatatgacttgatcttctgggagcaggaacaatgactactttttctggtgtgttaacatgtcgctagccagtgctccaggcacccagctttgtctgtgggttagtattggtgtatgtatgagtatctgtatgtatatatacacggtatttatagagagagactatcctggagaagcctcgttttgatgccattcttccttgcaaggttaagcaaggtgggtggaaactaagacacctgaaccctccagggcctcccgcatcaaggtcagcatgaggacagaccacagagctgtcacttttgctccgaagctacttctccactgtcccgttcagtctgaatgctgccacaaccagccaggcaggtccacagagagggagagcagagaaagaagtcctttctctttattgagttcgaggactacaaccaatttacactgccatctgatgccgtgatcctgagccaaggaggtgaggagcagagcaggcaatttcaccaccaaatgccaagaaaagggctgacattttctttcatgggcaccaacctgcatttgtatgtgtcccgaatccacagtcgtactgattctaatggggacacagatcatggtagagaatctctccctcctcagtaaatgtacaactgcacctgtcatcatggaggtcatacatgcatacaaagaggtgtacaggtaccatcttgtatacacatatatacccacatgtacagacatacatttatgcacattcacgctgtttgtttcatatatacaggcataaaatagagtaaatacaggtagttttaaaagtacccttttgtgtgaattgactaccgttgtttgcaaacccgaaaataaaagacgttcattatgtatgaaaagtaactgatttgtattctgtgagcatgtaaaagcggaaagttagtgcttgttctaagattaccttcttgttgataaaccataaatgaatcatcaaagctcacaccaaatttttctatcaaataaaactagtgacagcttgtggctttttattagagctcgccacgaactagggtaaggtgagtgtcttagcatattttaatgcagttgcttactaaaggttttaaccgcacatgcacacacacacgctttcttatgcaatctatgtttgcacttgtgctttcagttagccttctgtaggaagtagaagtcatatgttgtctttgttgtagtgaaattatacagatagagttccatatattgtatttgtttcaatggtaaatccttttggaacatatagaatgcagagatttttttttccattaaaataaatgggtattggtggttaaaa

SEQ ID NO: 446707 - DNA, 839 bp, Homo sapiens
atcttttgggaagttggctggctggcgaggcagagcctctcctcaaagcctggctcccacggaaaatatgctcagtgcagccgcgtgcatgaatgaaaacgccgccgggcgcttctagtcggacaaaatgcagccgagaactccgctcgttctgtgcgttctcctgtcccaggtgctgctgctaacatctgcagaagatttggactgcactcctggatttcagcagaaagtgttccatatcaatcagccagctgaattcattgaggaccagtcaattctaaacttgaccttcagtgactgtaagggaaacgacaagctacgctatgaggtctcgagcccatacttcaaggtgaacagcgatggcggcttagttgctctgagaaacataactgcagtgggcaaaactctgttcgtccatgcacggaccccccatgcggaagatatggcagaactcgtgattgtcggggggaaagacatccagggctccttgcaggatatatttaaatttgcaagaacttctcctgtcccaagacaaaagaggtccattgtggtatctcccattttaattccagagaatcagagacagcctttcccaagagatgttggcaaggtaagaacccacaatcctattaacagcgaacttctcttgaatgaaggcattacagcagatttaaatccatgcattacaattttagcaatttaatgaacatcctatttggcgacattattgctttaaaggaataaatcacaaacattttacttcccactagcactcggtatttcaaatccattttctctacagaatgatgtgtttaaataaatcctgagttgactgaatt

SEQ ID NO: 446708 - DNA, 1550 bp, Homo sapiens
tggagctaagctgtttccagggtgacagagtggcgacctcggtggtcgattgagcaggtctgagaattgttcccaaagggttgtgcgtcaccgagtcgttggcgctgtcatggcgggtgtgctgaagaagaccactggccttgtgggattggctgtgtgcaatactcctcacgagaggctaagaatattgtacacaaagattcttgatgttcttgaggaaatccctaaaaatgcagcatatagaaagtatacagaacagattacaaatgagaagctggctatggttaaagcggaaccagatgttaaaaaattagaagaccaacttcaaggcggtcaattagaagaggtgattcttcaggctgaacatgaactaaatctggcaagaaaaatgagggaatggaaactatgggagccattagtggaagagcctcctgccgatcagtggaaatggccaatataattattaagtgactttggtgtgttcatgggaaactgatgtaattaaatattctgttatattaagagcgtgttcttattactgacattttgtaatcaagaaaagtgatatagaaaatatgtaggagactgttaaaattggtgattatggtaatatggtcatgtgaatcaatttttgatttataaagtactcacacaagttgtttcaaagatgatatttctgtgaacagagaggccatgggaagatttgaaaattattaaagaaaaattcctacagattttcaatgcagagaccataatcaaaaagtaaactttctttagtagtatgttcaatacatcatttaattttttaagttatcctgaagaaggaaaggtccttaattattatagtctaaacaaatttatagattactgtttgaagtaaataatacgagtgaatattttcaaatgtgataaaatagcacaagtggctggtgataaaatttgaaattatggttaacctcagctgtgatcttatgtatgtaaagtgaaatttaaatagataattataggttgattacaaaatccatagtgtcattttattttagtcattattgaattataccatttactctgttttcttatagtcttaattttattatattttgttgttactgtattatatttgaaaaccttcaaattagaatacattgtacagttaaagaaattgacttggtacttaaaagaaagatttcccattgcatacaggttattggagaaattttccttttgttgcatttgtggaagttagttttctggcccgtggcctttaattttcttaatcaacctaattacatcaggatagaggtagagtttctgtaaaagaagagacattaagagttcctgaaatttatatctggcatacggataggcttatattcaaaacatcttagtcatacgaccataaattaaaagtggagtcactaaatagtttgcagtacgtttctaatataagtgtaggtgggtatcaaaacaagacaaatgctgttcagggaaagaagttggcaagcttaaggttaaacaaaaataaaattacatgtgttttcgccttccta

SEQ ID NO: 446709 - DNA, 951 bp, Homo sapiens
  misc_feature (839)..(839): n is a, c, g, or t
  misc_feature (893)..(893): n is a, c, g, or t
  misc_feature (895)..(895): n is a, c, g, or t
  misc_feature (897)..(897): n is a, c, g, or t
  misc_feature (899)..(899): n is a, c, g, or t
tggagctaagctgtttccagggtgacagagtggcgacctcggtggtcgattgagcaggtctgagaattgttcccaaagggttgtgcgtcaccgagtcgttggcgctgtcatggcgggtgtgctgaagaagaccactggccttgtgggattggctgtgtgcaatactcctcacgagaggctaagaatattgtacacaaagattcttgatgttcttgaggaaatccctaaaaatgcagcatatagaaagtatacagaacagattacaaatgagaagctggctatggttaaagcggaaccagatgttaaaaaattagaagaccaacttcaaggcggtcaattagaagaggtgattcttcaggctgaacatgaactaaatctggcaagaaaaatgagggaatggaaactatgggagccattagtggaagagcctcctgccgatcagtggaaatggccaatataattattaagtgactttggtgtgttcatgggaaactgatgtaattaaatattctgttatattaagagcgtgttcttattactgacattttgtaatcaagaaaagtgatatagaaaatatgtaggagactgttaaaattggtgattatggtaatatggtcatgtgaatcaatttttgatttataaagtactcacacaagttgtttcaaagatgatatttctgtgaacagagaggccatgggaagatttgaaaattattaaagaaaaattcctacagattttcaatgcagagaccataatcaaaaagtaaactttctttagtagtatgttcaatacatcatttaattttttaagttatcctgaagaaggcctaatttttggtnaaccaattttgatcgggggggaaaaaagggggatttccggttaagccggggggnanangnatggggcccgcggctctgtacgacaacttgtggtcaccccggttttctgagc

SEQ ID NO: 446710 - DNA, 2886 bp, Homo sapiens
  misc_feature (1740)..(1740): n is a, c, g, or t
  misc_feature (1845)..(1845): n is a, c, g, or t
  misc_feature (1852)..(1852): n is a, c, g, or t
  misc_feature (2718)..(2718): n is a, c, g, or t
tggagctaagctgtttccagggtgacagagtggcgacctcggtggtcgattgagcaggtctgagaattgttcccaaagggttgtgcgtcaccgagtcgttggcgctgtcatggcgggtgtgctgaagaagaccactggccttgtgggattggctgtgtgcaatactcctcacgaggtatgtacctttgttctttcttcgttcttgaattcccaaggaagactaaattcctgtcactttgcttattgcagggttaacgggatacagatgtttcaagcccttaattacaagccgcgtgagctcttgagacacgggcgctgtccacctacttcgttgatccgatgtcacatttttatttattttcgccatgacctctttattaagccagttttcttgttgactttttccttgacattttcatggcttcacttgtgcttgcttctgtcagcgccatctcaaatttatatctccgttttccatcttttctccttgccttaccgtttctgcttaggtgcgttggattacatatatttaggcttactaaaggtactgcccccttttccttctgttaggtcttttccatctgtattcacgaatgttttcatcaaaaaaacccacaaaattttttttattcttcttgtcccttctataatcacaccatttctttgcttcactttacagataactcaaaagagttatctctattttctccaatttctttcttattcacccttgaatgcactcagtcacccttggcgtttttcaagttcaccaattatctccatgctgccaaatccaatggtcagctcatatttctcaccttcattgacctaatagcagcgtttttttgacacatttgacactttttccatcacgctcttttcaagttcaccagttatctccatgttgccaaatccaatggtcagcttatgtttctcaccttcattgacctaatagcagcgtttttttttttttgacacatttgacactttttccatcatgcgctttctttactgggcttcaggactcccccagtctcctgattttttccccctactctttggctttctctttttctggttatttctcttatgcccacttttaaaatttgagttagtcaggatttagttcttggaccttttcttttggacctgtactctgtcaccaagagagagcaaatccaaatagagaacggttttaaataccacctatacactgacaacagatttccatgtaaagcactgacctcttcctttataaaagtcctgaatatttaattgcttagtgggcatctctatttgtatgtgtcagacaggcaacccaaacttaacatgtccaaaatggggttcctgatcttctgcctaaaacctgctcttctctcagtcttgctcatctcaattaatggcagctcaattattttgactcaggtcagaaacttgaaatcatctttgattccttcctttctcttacactccacatttgttatttcagtaaaccctctaggttccaccttcaaaatatatcttgattttgacaacatctcactacctcctctgctactaccctcttcctcagtcaccatcatcactgatgtggataattgcattcacttcttaactgcctctcaatgcttgtcacagcctccatttggtctttttttccagccaggctactagagttagtctgttaaaatatgaggtaggtcagatctctcctttccttaaaactaatggctttccatntcactctaaataaagacaagtttcttactgtgaccctctggttcactattctactgatttattttgttatgtctctactagaatgtaggtttcatgaaggcaggnatttgtnattgtttcactgctagaactctgtcacatagtatgtgctcagtaaatagtgttagttgaatgagtgtcttgcacttcctatgatttcataataactttattgtcattgatgtaaagaactgaactcatggtttttcccttctaaatatatttcttcctctgtgggctgtatttttcttgatagtttcagatctttctactccctaggctgggaatttggacatcatagttggtatttctcttatacttgtactctcatattcattccaatgatgatttttatttttattttttttgctgatccttttctataacagctctccagtctgacttctgtttactatttctattgttactaccatagttcaggtccttgttcttgtttagagaattgcaacaacctccttactggcctttctgccttgtttctccttcagtccttttaactcactacaatgaagctaattttcctaatctaatcatatgattttcctaaatcttttaattgtccacaggataaagcccgaatgctttaacttggaatgcagaaccacttataatgtgacattttctctaactttatctcctatgcatttccttatgtgtcctgtacagcagtatattccaaaatccccagtggatgtctgaaaaccacatatagtaccaaactgtatatatgctatgttttgtttcatacatacctataataaagtttaatttatgaattaggcacaataagagataagcaggctggacgtgctggctcacgcctgtaatcccagcactttgggaggctgaggcgggtggattgctttagcccaggagtttaagaccagcctggccaacatggcaaaaccccgtctctanaaaaaatgtggaaattaatcaggtgtggtggtgtgcacctagtcccagctactcgggaggcagaggcagcaggattgcttgagccccagaggttgaggctgcagtgagctgtgatgatgccattacactctagcctgggtgatggagtgagaccctgtctcaaaaaag

SEQ ID NO: 446711 - DNA, 558 bp, Homo sapiens
  misc_feature (558)..(558): n is a, c, g, or t
caaacactgcacagcaatcagaaacttttcagtttcttgcagatatattaccaaagaagaggtgattcttcgctgaacatgaactaaatctggcaagaaaaatgagggaatggaaactatgggagccattagtggaagagcctcctgccgatcagtggaaatggccaatataattattaagtgactttggtgtgttcatgggaaactgatgtaattaaatattctgttataaaaaaaaaaaaaaaaaaaaaaaaaaaaaattttggggggcgtggcaccctcgagaagacgctttctaaaacccactcgcgtgggggggagccgggccccagaatgaggttacggagcacaccgggccaaacaagccggttccctaagaagaagtactgcggcgcacagcaccaaagctgggggggctttccccacaaataaaaaaacggcccgcgggggcacagacgaccggttgtggaacaacatcccgaaggagaccgaggagcaacaacgagcgtcaaaaccagagggctccaagagagccgatattaattagccgcccggagn

SEQ ID NO: 446712 - DNA, 370 bp, Homo sapiens
actgaaaatcaaacaactgaaaacatgagccaaatctattagcactgaactcctccaacagcactgatgtcacaggcccctggaagaatccacgttgttgacattactctggtcatttagttgccatgtagccaagcaaagagatggggtttgaccttgttgtccaggctggtttcaaactcctgagttcgagcaatctacccacccttcaaagtgttgggatcacaggtgactcttagaatcatctagtcaaaatggaattgtgactgtaagtgcactaagaaaagatccctttgggaagaatgaacttattttgacaaatatgttcaatatttttacatatttaaaatattgactctcacccaggaaa

SEQ ID NO: 446713 - DNA, 1213 bp, Homo sapiens
  misc_feature (1127)..(1127): n is a, c, g, or t
  misc_feature (1154)..(1154): n is a, c, g, or t
  misc_feature (1156)..(1156): n is a, c, g, or t
tggagctaagctgtttccagggtgacagagtggcgacctcggtggtcgattgagcaggtctgagaattgttcccaaagggttgtgcgtcaccgagtcgttggcgctgtcatggcgggtgtgctgaagaagaccactggccttgtgggattggctgtgtgcaatactcctcacgagaggctaagaatattgtacacaaagattcttgatgttcttgaggaaatccctaaaaatgcagcatatagaaagtatacagaacagattacaaatgagaagctggctatggttaaagcggaaccagatgttaaaaaattagaagaccaacttcaaggcggtcaattagaagaggtgattcttcaggctgaacatgaactaaatctggcaagaaaaatgagggaatggaaactatgggagccattagtggaagagcctcctgccgatcagtggaaatggccaatataattattaagtgactttggtgtgttcatgggaaactgatgtaattaaatattctgttatattaagagcgtgttcttattactgacattttgtaatcaagaaaagtgatatagaaaatatgtaggagactgttaaaattggtgattatggtaatatggtcatgtgaatcaatttttgatttataaagtactcacacaagttgtttcaaagatgatatttctgtgaacagagaggccatgggaagatttgaaaattattaaagaaaaattcctacagattttcaatgcagagaccataatcaaaaagtaaactttctttagtagtatgttcaatacatcatttaattttttaagttatcctgaagaaggaaaggtccttaattattatagtctaaacaaatttatagattactgtttgaagtaaataatacgagtgaatattttcaaatgtgataaaatagcacaagtggctggtgataaaatttgaaattatggttaacctcagctgtgatcttatgtatgtaaagtgaaatttaaatagataattataggttgattacaaaatccatagtgtcattttattttagtcattattgaattataccatttactctgttttcttatagtcttaaatataattgggggcggttaattggactcaattgaattgncgaaaagcgtgggttaaaaaaatcccngnacgttggaaacttggggggaaaaaggggggaattaaacaaaagaggagtggaaaaat

SEQ ID NO: 446714 - DNA, 1617 bp, Homo sapiens
tggagctaagctgtttccagggtgacagagtggcgacctcggtggtcgattgagcaggtctgagaattgttcccaaagggttgtgcgtcaccgagtcgttggcgctgtcatggcgggtgtgctgaagaagaccactggccttgtgggattggctgtgtgcaatactcctcacgagaggctaagaatattgtacacaaagattcttgatgttcttgaggaaatccctaaaaatgcagcatatagaaagtatacagaacagattacaaatgagaagctggctatggttaaagcggaaccagatgttaaaaaattagaagaccaacttcaaggcggtcaattagaagaggtgattcttcaggctgaacatgaactaaatctggcaagaaaaatgagggaatggaaactatgggagccattagtggaagagcctcctgccgatcagtggaaatggccaatataattattaagtgactttggtgtgttcatgggaaactgatgtaattaaatattctgttatattaagagcgtgttcttattactgacattttgtaatcaagaaaagtgatatagaaaatatgtaggagactgttaaaattggtgattatggtaatatggtcatgtgaatcaatttttgatttataaagtactcacacaagttgtttcaaagatgatatttctgtgaacagagaggccatgggaagatttgaaaattattaaagaaaaattcctacagattttcaatgcagagaccataatcaaaaagtaaactttctttagtagtatgttcaatacatcatttaattttttaagttatcctgaagaaggaaaggtccttaattattatagtctaaacaaatttatagattactgtttgaagtaaataatacgagtgatgcagttgaactattgattccaaagtcgttgagtatatacattcagccacataagtagagacatgggctgcagtgaagagactatatcgcagaaaagtttgacttgggttgtaaacacttctaggcattgagtgattctttattggtattgttaataggaaatttaaatagataattataggttgattacaaaatccatagtgtcattttattttagtcattattgaattataccatttactctgttttcttatagtcttaattttattatattttgttgttactgtattatatttgaaaaccttcaaattagaatacattgtacagttaaagaaattgacttggtacttaaaagaaagatttcccattgcatacaggttattggagaaattttccttttgttgcatttgtggaagttagttttctggcccgtggcctttaattttcttaatcaacctaattacatcaggatagaggtagagtttctgtaaaagaagagacattaagagttcctgaaatttatatctggcatacggataggcttatattcaaaacatcttagtcatacgaccataaattaaaagtggagtcactaaatagtttgcagtacgtttctaatataagtgtaggtgggtatcaaaacaagacaaatgctgttcagggaaagaagttggcaagcttaaggttaaacaaaaataaaattacatgtgttttcgccttccta

SEQ ID NO: 446715 - DNA, 1490 bp, Homo sapiens
tggagctaagctgtttccagggtgacagagtggcgacctcggtggtcgattgagcaggtctgagaattgttcccaaagggttgtgcgtcaccgagtcgttggcgctgtcatggcgggtgtgctgaagaagaccactggccttgtgggattggctgtgtgcaatactcctcacgagaggctaagaatattgtacacaaagattcttgatgttcttgaggaaatccctaaaaatgcagcatatagaaagtatacagaacagattacaaatgagaagctggctatggttaaagcggaaccagatgttaaaaaattagaagaccaacttcaaggcggtcaattagaagaggtgattcttcaggctgaacatgaactaaatctggcaagaaaaatgagggaatggaaactatgggagccattagtggaagagcctcctgccgatcagtggaaatggccaatataattattaagtgactttggtgtgttcatgggaaactgatgtaattaaatattctgttatattaagagcgtgttcttattactgacattttgtaatcaagaaaagtgatatagaaaatatgtaggagactgttaaaattggtgattatggtaatatggtcatgtgaatcaatttttgatttataaagtactcacacaagttgtttcaaagatgatatttctgtgaacagagaggccatgggaagatttgaaaattattaaagaaaaattcctacagattttcaatgcagagaccataatcaaaaagggaaaggtccttaattattatagtctaaacaaatttatagattactgtttgaagtaaataatacgagtgaatattttcaaatgtgataaaatagcacaagtggctggtgataaaatttgaaattatggttaacctcagctgtgatcttatgtatgtaaagtgaaatttaaatagataattataggttgattacaaaatccatagtgtcattttattttagtcattattgaattataccatttactctgttttcttatagtcttaattttattatattttgttgttactgtattatatttgaaaaccttcaaattagaatacattgtacagttaaagaaattgacttggtacttaaaagaaagatttcccattgcatacaggttattggagaaattttccttttgttgcatttgtggaagttagttttctggcccgtggcctttaattttcttaatcaacctaattacatcaggatagaggtagagtttctgtaaaagaagagacattaagagttcctgaaatttatatctggcatacggataggcttatattcaaaacatcttagtcatacgaccataaattaaaagtggagtcactaaatagtttgcagtacgtttctaatataagtgtaggtgggtatcaaaacaagacaaatgctgttcagggaaagaagttggcaagcttaaggttaaacaaaaataaaattacatgtgttttcgccttccta

SEQ ID NO: 446716 - DNA, 1678 bp, Homo sapiens
caattcagctgcagggagtgttgctactgatggaacaaaaccaaaccacttggaattaacgcacaatttaaagagatggggtttgaccttgttgtccaggctggtttcaaactcctgagttcgagcaatctacccacccttcaaagtgttgggatcacaggtgactcttagaatcatctagtcaaaatggaattgtgactatggaaatattggcatagttccagaggagttaaaggactcacccaggccgtacagctgaccactggccttgtgggattggctgtgtgcaatactcctcacgagaggctaagaatattgtacacaaagattcttgatgttcttgaggaaatccctaaaaatgcagcatatagaaagtatacagaacagattacaaatgagaagctggctatggttaaagcggaaccagatgttaaaaaattagaagaccaacttcaaggcggtcaattagaagaggtgattcttcaggctgaacatgaactaaatctggcaagaaaaatgagggaatggaaactatgggagccattagtggaagagcctcctgccgatcagtggaaatggccaatataattattaagtgactttggtgtgttcatgggaaactgatgtaattaaatattctgttatattaagagcgtgttcttattactgacattttgtaatcaagaaaagtgatatagaaaatatgtaggagactgttaaaattggtgattatggtaatatggtcatgtgaatcaatttttgatttataaagtactcacacaagttgtttcaaagatgatatttctgtgaacagagaggccatgggaagatttgaaaattattaaagaaaaattcctacagattttcaatgcagagaccataatcaaaaagtaaactttctttagtagtatgttcaatacatcatttaattttttaagttatcctgaagaaggaaaggtccttaattattatagtctaaacaaatttatagattactgtttgaagtaaataatacgagtgaatattttcaaatgtgataaaatagcacaagtggctggtgataaaatttgaaattatggttaacctcagctgtgatcttatgtatgtaaagtgaaatttaaatagataattataggttgattacaaaatccatagtgtcattttattttagtcattattgaattataccatttactctgttttcttatagtcttaattttattatattttgttgttactgtattatatttgaaaaccttcaaattagaatacattgtacagttaaagaaattgacttggtacttaaaagaaagatttcccattgcatacaggttattggagaaattttccttttgttgcatttgtggaagttagttttctggcccgtggcctttaattttcttaatcaacctaattacatcaggatagaggtagagtttctgtaaaagaagagacattaagagttcctgaaatttatatctggcatacggataggcttatattcaaaacatcttagtcatacgaccataaattaaaagtggagtcactaaatagtttgcagtacgtttctaatataagtgtaggtgggtatcaaaacaagacaaatgctgttcagggaaagaagttggcaagcttaaggttaaacaaaaataaaattacatgtgttttcgccttccta

SEQ ID NO: 446717 - DNA, 1458 bp, Homo sapiens
gcggccgctccaagctgtcatggcgggtgtgctgaagaaccactggccttgtgggattggctgtgtgcaatactcctcacgagaggctaagaatattgtacacaaagattcttgatgttcttgaggaaatccctaaaaatgcagcatatagaaagtatacagaacagattacaaatgagaagctggctatggttaaagcggaaccagatgttaaaaaattagaagaccaacttcaaggcggtcaattagaagaggtgattcttcaggctgaacatgaactaaatctggcaagaaaaatgagggaatggaaactatgggagccattagtggaagagcctcctgccgatcagtggaaatggccaatataattattaagtgactttggtgtgttcatgggaaactgatgtaattaaatattctgttatattaagagcgtgttcttattactgacattttgtaatcaagaaaagtgatatagaaaatatgtaggagactgttaaaattggtgattatggtaatatggtcatgtgaatcaatttttgatttataaagtactcacacaagttgtttcaaagatgatatttctgtgaacagagaggccatgggaagatttgaaaattattaaagaaaaattcctacagattttcaatgcagagaccataatcaaaaagtaaactttctttagtagtatgttcaatacatcatttaattttttaagttatcctgaagaaggaaaggtccttaattattatagtctaaacaaatttatagattactgtttgaagtaaataatacgagtgaatattttcaaatgtgataaaatagcacaagtggctggtgataaaatttgaaattatggttaacctcagctgtgatcttatgtatgtaaagtgaaatttaaatagataattataggttgattacaaaatccatagtgtcattttattttagtcattattgaattataccatttactctgttttcttatagtcttaattttattatattttgttgttactgtattatatttgaaaaccttcaaattagaatacattgtacagttaaagaaattgacttggtacttaaaagaaagatttcccattgcatacaggttattggagaaattttccttttgttgcatttgtggaagttagttttctggcccgtggcctttaattttcttaatcaacctaattacatcaggatagaggtagagtttctgtaaaagaagagacattaagagttcctgaaatttatatctggcatacggataggcttatattcaaaacatcttagtcatacgaccataaattaaaagtggagtcactaaatagtttgcagtacgtttctaatataagtgtaggtgggtatcaaaacaagacaaatgctgttcagggaaagaagttggcaagcttaaggttaaacaaaaataaaattacatgtgttttcgccttccta

SEQ ID NO: 446718 - DNA, 1505 bp, Homo sapiens
tggagctaagctgtttccagggtgacagagtggcgacctcggtggtcgattgagcaggtctgagaattgttcccaaagggttgtgcgtcaccgagtcgttggcgctgtcatggcgggtgtgctgaagaagaggctaagaatattgtacacaaagattcttgatgttcttgaggaaatccctaaaaatgcagcatatagaaagtatacagaacagattacaaatgagaagctggctatggttaaagcggaaccagatgttaaaaaattagaagaccaacttcaaggcggtcaattagaagaggtgattcttcaggctgaacatgaactaaatctggcaagaaaaatgagggaatggaaactatgggagccattagtggaagagcctcctgccgatcagtggaaatggccaatataattattaagtgactttggtgtgttcatgggaaactgatgtaattaaatattctgttatattaagagcgtgttcttattactgacattttgtaatcaagaaaagtgatatagaaaatatgtaggagactgttaaaattggtgattatggtaatatggtcatgtgaatcaatttttgatttataaagtactcacacaagttgtttcaaagatgatatttctgtgaacagagaggccatgggaagatttgaaaattattaaagaaaaattcctacagattttcaatgcagagaccataatcaaaaagtaaactttctttagtagtatgttcaatacatcatttaattttttaagttatcctgaagaaggaaaggtccttaattattatagtctaaacaaatttatagattactgtttgaagtaaataatacgagtgaatattttcaaatgtgataaaatagcacaagtggctggtgataaaatttgaaattatggttaacctcagctgtgatcttatgtatgtaaagtgaaatttaaatagataattataggttgattacaaaatccatagtgtcattttattttagtcattattgaattataccatttactctgttttcttatagtcttaattttattatattttgttgttactgtattatatttgaaaaccttcaaattagaatacattgtacagttaaagaaattgacttggtacttaaaagaaagatttcccattgcatacaggttattggagaaattttccttttgttgcatttgtggaagttagttttctggcccgtggcctttaattttcttaatcaacctaattacatcaggatagaggtagagtttctgtaaaagaagagacattaagagttcctgaaatttatatctggcatacggataggcttatattcaaaacatcttagtcatacgaccataaattaaaagtggagtcactaaatagtttgcagtacgtttctaatataagtgtaggtgggtatcaaaacaagacaaatgctgttcagggaaagaagttggcaagcttaaggttaaacaaaaataaaattacatgtgttttcgccttccta

SEQ ID NO: 446719 - DNA, 1759 bp, Homo sapiens
tggagctaagctgtttccagggtgacagagtggcgacctcggtggtcgattgagcaggtctgagaattgttcccaaagggttgtgcgtcaccgagtcgttggcgctgtcatggcgggtgtgctgaagaagaccactggccttgtgggattggctgtgtgcaatactcctcacgagaaattcaaataagaaaaattaaaaaaaaaaatttgcagtgcttcggacctcactttgaaaaatactgattcaggctgggtgggctcacgcctgtaatcccagcactttgggaggctgaggtgggcggatcacctgaagtcaggagtttgagaccatcctggccaacatggcaaaaccctgtctctactaaaaatagaaaaaatagccagaggctaagaatattgtacacaaagattcttgatgttcttgaggaaatccctaaaaatgcagcatatagaaagtatacagaacagattacaaatgagaagctggctatggttaaagcggaaccagatgttaaaaaattagaagaccaacttcaaggcggtcaattagaagaggtgattcttcaggctgaacatgaactaaatctggcaagaaaaatgagggaatggaaactatgggagccattagtggaagagcctcctgccgatcagtggaaatggccaatataattattaagtgactttggtgtgttcatgggaaactgatgtaattaaatattctgttatattaagagcgtgttcttattactgacattttgtaatcaagaaaagtgatatagaaaatatgtaggagactgttaaaattggtgattatggtaatatggtcatgtgaatcaatttttgatttataaagtactcacacaagttgtttcaaagatgatatttctgtgaacagagaggccatgggaagatttgaaaattattaaagaaaaattcctacagattttcaatgcagagaccataatcaaaaagtaaactttctttagtagtatgttcaatacatcatttaattttttaagttatcctgaagaaggaaaggtccttaattattatagtctaaacaaatttatagattactgtttgaagtaaataatacgagtgaatattttcaaatgtgataaaatagcacaagtggctggtgataaaatttgaaattatggttaacctcagctgtgatcttatgtatgtaaagtgaaatttaaatagataattataggttgattacaaaatccatagtgtcattttattttagtcattattgaattataccatttactctgttttcttatagtcttaattttattatattttgttgttactgtattatatttgaaaaccttcaaattagaatacattgtacagttaaagaaattgacttggtacttaaaagaaagatttcccattgcatacaggttattggagaaattttccttttgttgcatttgtggaagttagttttctggcccgtggcctttaattttcttaatcaacctaattacatcaggatagaggtagagtttctgtaaaagaagagacattaagagttcctgaaatttatatctggcatacggataggcttatattcaaaacatcttagtcatacgaccataaattaaaagtggagtcactaaatagtttgcagtacgtttctaatataagtgtaggtgggtatcaaaacaagacaaatgctgttcagggaaagaagttggcaagcttaaggttaaacaaaaataaaattacatgtgttttcgccttccta

SEQ ID NO: 446720 - DNA, 1608 bp, Homo sapiens
cacagaaaatacagaatgttcccatgtttatatacaggtttttcctaagttataaagggtgtagatagggcacagacataaagaagtcagagcaaagaagagttaaattaaaaaaaaaaagcaaaaaaaaaaaacagatgtgagttttgtttgttttgtctttgagacaagtgttccattaagtctttggtaatattttaacctatggaaatttgtatggtttgtcttttcagaggctaagaatattgtacacaaagattcttgatgttcttgaggaaatccctaaaaatgcagcatatagaaagtatacagaacagattacaaatgagaagctggctatggttaaagcggaaccagatgttaaaaaattagaagaccaacttcaaggcggtcaattagaagaggtgattcttcaggctgaacatgaactaaatctggcaagaaaaatgagggaatggaaactatgggagccattagtggaagagcctcctgccgatcagtggaaatggccaatataattattaagtgactttggtgtgttcatgggaaactgatgtaattaaatattctgttatattaagagcgtgttcttattactgacattttgtaatcaagaaaagtgatatagaaaatatgtaggagactgttaaaattggtgattatggtaatatggtcatgtgaatcaatttttgatttataaagtactcacacaagttgtttcaaagatgatatttctgtgaacagagaggccatgggaagatttgaaaattattaaagaaaaattcctacagattttcaatgcagagaccataatcaaaaagtaaactttctttagtagtatgttcaatacatcatttaattttttaagttatcctgaagaaggaaaggtccttaattattatagtctaaacaaatttatagattactgtttgaagtaaataatacgagtgaatattttcaaatgtgataaaatagcacaagtggctggtgataaaatttgaaattatggttaacctcagctgtgatcttatgtatgtaaagtgaaatttaaatagataattataggttgattacaaaatccatagtgtcattttattttagtcattattgaattataccatttactctgttttcttatagtcttaattttattatattttgttgttactgtattatatttgaaaaccttcaaattagaatacattgtacagttaaagaaattgacttggtacttaaaagaaagatttcccattgcatacaggttattggagaaattttccttttgttgcatttgtggaagttagttttctggcccgtggcctttaattttcttaatcaacctaattacatcaggatagaggtagagtttctgtaaaagaagagacattaagagttcctgaaatttatatctggcatacggataggcttatattcaaaacatcttagtcatacgaccataaattaaaagtggagtcactaaatagtttgcagtacgtttctaatataagtgtaggtgggtatcaaaacaagacaaatgctgttcagggaaagaagttggcaagcttaaggttaaacaaaaataaaattacatgtgttttcgccttccta

SEQ ID NO: 446721 - DNA, 1433 bp, Homo sapiens
tggagctaagctgtttccagggtgacagagtggcgacctcggtggtcgattgagcaggtctgagaattgttcccaaagggttgtgcgtcaccgagtcgttggcgctgtcatggcgggtgtgctgaagaagaccactggccttgtgggattggctgtgtgcaatactcctcacgaggaaccagatgttaaaaaattagaagaccaacttcaaggcggtcaattagaagaggtgattcttcaggctgaacatgaactaaatctggcaagaaaaatgagggaatggaaactatgggagccattagtggaagagcctcctgccgatcagtggaaatggccaatataattattaagtgactttggtgtgttcatgggaaactgatgtaattaaatattctgttatattaagagcgtgttcttattactgacattttgtaatcaagaaaagtgatatagaaaatatgtaggagactgttaaaattggtgattatggtaatatggtcatgtgaatcaatttttgatttataaagtactcacacaagttgtttcaaagatgatatttctgtgaacagagaggccatgggaagatttgaaaattattaaagaaaaattcctacagattttcaatgcagagaccataatcaaaaagtaaactttctttagtagtatgttcaatacatcatttaattttttaagttatcctgaagaaggaaaggtccttaattattatagtctaaacaaatttatagattactgtttgaagtaaataatacgagtgaatattttcaaatgtgataaaatagcacaagtggctggtgataaaatttgaaattatggttaacctcagctgtgatcttatgtatgtaaagtgaaatttaaatagataattataggttgattacaaaatccatagtgtcattttattttagtcattattgaattataccatttactctgttttcttatagtcttaattttattatattttgttgttactgtattatatttgaaaaccttcaaattagaatacattgtacagttaaagaaattgacttggtacttaaaagaaagatttcccattgcatacaggttattggagaaattttccttttgttgcatttgtggaagttagttttctggcccgtggcctttaattttcttaatcaacctaattacatcaggatagaggtagagtttctgtaaaagaagagacattaagagttcctgaaatttatatctggcatacggataggcttatattcaaaacatcttagtcatacgaccataaattaaaagtggagtcactaaatagtttgcagtacgtttctaatataagtgtaggtgggtatcaaaacaagacaaatgctgttcagggaaagaagttggcaagcttaaggttaaacaaaaataaaattacatgtgttttcgccttccta

SEQ ID NO: 446722 - DNA, 1363 bp, Homo sapiens
  misc_feature (48)..(48): n is a, c, g, or t
ggctggtgcatcccccccgggggctagatcccaagctggtgtctgggnatcctaaatgcgcggaagtttccgaccggttccaatgagagctggcttggttaagcggaaccagatgttaaaaaattagaagaccaacttcaaggcggtcaattagaagaggtgattcttcaggctgaacatgaactaaatctggcaagaaaaatgagggaatggaaactatgggagccattagtggaagagcctcctgccgatcagtggaaatggccaatataattattaagtgactttggtgtgttcatgggaaactgatgtaattaaatattctgttatattaagagcgtgttcttattactgacattttgtaatcaagaaaagtgatatagaaaatatgtaggagactgttaaaattggtgattatggtaatatggtcatgtgaatcaatttttgatttataaagtactcacacaagttgtttcaaagatgatatttctgtgaacagagaggccatgggaagatttgaaaattattaaagaaaaattcctacagattttcaatgcagagaccataatcaaaaagtaaactttctttagtagtatgttcaatacatcatttaattttttaagttatcctgaagaaggaaaggtccttaattattatagtctaaacaaatttatagattactgtttgaagtaaataatacgagtgaatattttcaaatgtgataaaatagcacaagtggctggtgataaaatttgaaattatggttaacctcagctgtgatcttatgtatgtaaagtgaaatttaaatagataattataggttgattacaaaatccatagtgtcattttattttagtcattattgaattataccatttactctgttttcttatagtcttaattttattatattttgttgttactgtattatatttgaaaaccttcaaattagaatacattgtacagttaaagaaattgacttggtacttaaaagaaagatttcccattgcatacaggttattggagaaattttccttttgttgcatttgtggaagttagttttctggcccgtggcctttaattttcttaatcaacctaattacatcaggatagaggtagagtttctgtaaaagaagagacattaagagttcctgaaatttatatctggcatacggataggcttatattcaaaacatcttagtcatacgaccataaattaaaagtggagtcactaaatagtttgcagtacgtttctaatataagtgtaggtgggtatcaaaacaagacaaatgctgttcagggaaagaagttggcaagcttaaggttaaacaaaaataaaattacatgtgttttcgccttccta

SEQ ID NO: 446723 - DNA, 1710 bp, Homo sapiens
tggagctaagctgtttccagggtgacagagtggcgacctcggtggtcgattgagcaggtctgagaattgttcccaaagggttgtgcgtcaccgagtcgttggcgctgtcatggcgggtgtgctgaagaagaccactggccttgtgggattggctgtgtgcaatactcctcacgagaggctaagaatattgtacacaaagattcttgatgttcttgaggaaatccctaaaaatgcagcatatagaaagtatacagaacagattacaaatgagaagctggctatggttaaagcgcctatcataatgcaaattatcagtagttaatcaataagaaggtgttatttgagcaaagatttgaaaagtggtgaagaaacaagtgatgcagataccctgggccatccagcaagataccctgaggcagtaacatatcacgtcttgtgttgaaaagcaaaatgaaccagatgttaaaaaattagaagaccaacttcaaggcggtcaattagaagaggtgattcttcaggctgaacatgaactaaatctggcaagaaaaatgagggaatggaaactatgggagccattagtggaagagcctcctgccgatcagtggaaatggccaatataattattaagtgactttggtgtgttcatgggaaactgatgtaattaaatattctgttatattaagagcgtgttcttattactgacattttgtaatcaagaaaagtgatatagaaaatatgtaggagactgttaaaattggtgattatggtaatatggtcatgtgaatcaatttttgatttataaagtactcacacaagttgtttcaaagatgatatttctgtgaacagagaggccatgggaagatttgaaaattattaaagaaaaattcctacagattttcaatgcagagaccataatcaaaaagtaaactttctttagtagtatgttcaatacatcatttaattttttaagttatcctgaagaaggaaaggtccttaattattatagtctaaacaaatttatagattactgtttgaagtaaataatacgagtgaatattttcaaatgtgataaaatagcacaagtggctggtgataaaatttgaaattatggttaacctcagctgtgatcttatgtatgtaaagtgaaatttaaatagataattataggttgattacaaaatccatagtgtcattttattttagtcattattgaattataccatttactctgttttcttatagtcttaattttattatattttgttgttactgtattatatttgaaaaccttcaaattagaatacattgtacagttaaagaaattgacttggtacttaaaagaaagatttcccattgcatacaggttattggagaaattttccttttgttgcatttgtggaagttagttttctggcccgtggcctttaattttcttaatcaacctaattacatcaggatagaggtagagtttctgtaaaagaagagacattaagagttcctgaaatttatatctggcatacggataggcttatattcaaaacatcttagtcatacgaccataaattaaaagtggagtcactaaatagtttgcagtacgtttctaatataagtgtaggtgggtatcaaaacaagacaaatgctgttcagggaaagaagttggcaagcttaaggttaaacaaaaataaaattacatgtgttttcgccttccta

SEQ ID NO: 446724 - DNA, 1317 bp, Homo sapiens
  misc_feature (80)..(80): n is a, c, g, or t
ttgaaacagcactcacacaagttgtttcaaagatgatatttctgtgaacagagaggccatgggaagatttgaaaattatnaaagaaaaattcctacagattttcaatgcagagaccataatcaaaaagtaaactttctttagtagtatgttcaatacatcatttaattttttaagttatccattagtggaagagcctcctgccgatcagtggaaatggccaatataattattaagtgactttggtgtgttcatgggaaactgatgtaattaaatattctgttatattaagagcgtgttcttattactgacattttgtaatcaagaaaagtgatatagaaaatatgtaggagactgttaaaattggtgattatggtaatatggtcatgtgaatcaatttttgatttataaagtactcacacaagttgtttcaaagatgatatttctgtgaacagagaggccatgggaagatttgaaaattattaaagaaaaattcctacagattttcaatgcagagaccataatcaaaaagtaaactttctttagtagtatgttcaatacatcatttaattttttaagttatcctgaagaaggaaaggtccttaattattatagtctaaacaaatttatagattactgtttgaagtaaataatacgagtgaatattttcaaatgtgataaaatagcacaagtggctggtgataaaatttgaaattatggttaacctcagctgtgatcttatgtatgtaaagtgaaatttaaatagataattataggttgattacaaaatccatagtgtcattttattttagtcattattgaattataccatttactctgttttcttatagtcttaattttattatattttgttgttactgtattatatttgaaaaccttcaaattagaatacattgtacagttaaagaaattgacttggtacttaaaagaaagatttcccattgcatacaggttattggagaaattttccttttgttgcatttgtggaagttagttttctggcccgtggcctttaattttcttaatcaacctaattacatcaggatagaggtagagtttctgtaaaagaagagacattaagagttcctgaaatttatatctggcatacggataggcttatattcaaaacatcttagtcatacgaccataaattaaaagtggagtcactaaatagtttgcagtacgtttctaatataagtgtaggtgggtatcaaaacaagacaaatgctgttcagggaaagaagttggcaagcttaaggttaaacaaaaataaaattacatgtgttttcgccttccta

SEQ ID NO: 446725 - DNA, 1401 bp, Homo sapiens
tggagctaagctgtttccagggtgacagagtggcgacctcggtggtcgattgagcaggtctgagaattgttcccaaagggttgtgcgtcaccgagtcgttggcgctgtcatggcgggtgtgctgaagaagaccactggccttgtgggattggctgtgtgcaatactcctcacgagaggctaagaatattgtacacaaagattcttgatgttcttgaggaaatccctaaaaatgcagcatatagaaagtatacagaacagattacaaatgagaagctggctatggttaaagcggtggaaatggccaatataattattaagtgactttggtgtgttcatgggaaactgatgtaattaaatattctgttatattaagagcgtgttcttattactgacattttgtaatcaagaaaagtgatatagaaaatatgtaggagactgttaaaattggtgattatggtaatatggtcatgtgaatcaatttttgatttataaagtactcacacaagttgtttcaaagatgatatttctgtgaacagagaggccatgggaagatttgaaaattattaaagaaaaattcctacagattttcaatgcagagaccataatcaaaaagtaaactttctttagtagtatgttcaatacatcatttaattttttaagttatcctgaagaaggaaaggtccttaattattatagtctaaacaaatttatagattactgtttgaagtaaataatacgagtgaatattttcaaatgtgataaaatagcacaagtggctggtgataaaatttgaaattatggttaacctcagctgtgatcttatgtatgtaaagtgaaatttaaatagataattataggttgattacaaaatccatagtgtcattttattttagtcattattgaattataccatttactctgttttcttatagtcttaattttattatattttgttgttactgtattatatttgaaaaccttcaaattagaatacattgtacagttaaagaaattgacttggtacttaaaagaaagatttcccattgcatacaggttattggagaaattttccttttgttgcatttgtggaagttagttttctggcccgtggcctttaattttcttaatcaacctaattacatcaggatagaggtagagtttctgtaaaagaagagacattaagagttcctgaaatttatatctggcatacggataggcttatattcaaaacatcttagtcatacgaccataaattaaaagtggagtcactaaatagtttgcagtacgtttctaatataagtgtaggtgggtatcaaaacaagacaaatgctgttcagggaaagaagttggcaagcttaaggttaaacaaaaataaaattacatgtgttttcgccttccta

SEQ ID NO: 446726 - DNA, 1245 bp, Homo sapiens
gttcagagcgtgacgttgtagactcaaattctcgaggcatggaagataactgagggatcaattgtgactaggtatcgtatacgaccatgtgagtgcgcaaggacggactctctgactgtctacaagtgagagacacgtggaaatggccaatataattattaagtgactttggtgtgttcatgggaaactgatgtaattaaatattctgttatattaagagcgtgttcttattactgacattttgtaatcaagaaaagtgatatagaaaatatgtaggagactgttaaaattggtgattatggtaatatggtcatgtgaatcaatttttgatttataaagtactcacacaagttgtttcaaagatgatatttctgtgaacagagaggccatgggaagatttgaaaattattaaagaaaaattcctacagattttcaatgcagagaccataatcaaaaagtaaactttctttagtagtatgttcaatacatcatttaattttttaagttatcctgaagaaggaaaggtccttaattattatagtctaaacaaatttatagattactgtttgaagtaaataatacgagtgaatattttcaaatgtgataaaatagcacaagtggctggtgataaaatttgaaattatggttaacctcagctgtgatcttatgtatgtaaagtgaaatttaaatagataattataggttgattacaaaatccatagtgtcattttattttagtcattattgaattataccatttactctgttttcttatagtcttaattttattatattttgttgttactgtattatatttgaaaaccttcaaattagaatacattgtacagttaaagaaattgacttggtacttaaaagaaagatttcccattgcatacaggttattggagaaattttccttttgttgcatttgtggaagttagttttctggcccgtggcctttaattttcttaatcaacctaattacatcaggatagaggtagagtttctgtaaaagaagagacattaagagttcctgaaatttatatctggcatacggataggcttatattcaaaacatcttagtcatacgaccataaattaaaagtggagtcactaaatagtttgcagtacgtttctaatataagtgtaggtgggtatcaaaacaagacaaatgctgttcagggaaagaagttggcaagcttaaggttaaacaaaaataaaattacatgtgttttcgccttccta

SEQ ID NO: 446727 - DNA, 1352 bp, Homo sapiens
tggagctaagctgtttccagggtgacagagtggcgacctcggtggtcgattgagcaggtctgagaattgttcccaaagggttgtgcgtcaccgagtcgttggcgctgtcatggcgggtgtgctgaagaagaccactggccttgtgggattggctgtgtgcaatactcctcacgagaggctaagaatattgtacacaaagattcttgatgttcttgaggaaatccctaaaaatgcagcatatagaaagtatacagaacagattacaaatgagaagctggctatggttaaagcggaaccagatgttaaaaaattagaagaccaacttcaaggcggtcaattagaagaggtgattcttcaggctgaacatgaactaaatctggcaagaaaaatgagggaatggaaactatgggagccattagtggaagagcctcctgccgatcagtggaaatggccaatataattattaagtgactttggtgtgttcatgggaaactgatgtaattaaatattctgttatattaagagcgtgttcttattactgacattttgtaatcaagaaaagtgataaactttctttagtagtatgttcaatacatcatttaattttttaagttatcctgaagaaggaaaggtccttaattattatagtctaaacaaatttatagattactgtttgaagtaaataatacgagtgaatattttcaaatgtgataaaatagcacaagtggctggtgataaaatttgaaattatggttaacctcagctgtgatcttatgtatgtaaagtgaaatttaaatagataattataggttgattacaaaatccatagtgtcattttattttagtcattattgaattataccatttactctgttttcttatagtcttaattttattatattttgttgttactgtattatatttgaaaaccttcaaattagaatacattgtacagttaaagaaattgacttggtacttaaaagaaagatttcccattgcatacaggttattggagaaattttccttttgttgcatttgtggaagttagttttctggcccgtggcctttaattttcttaatcaacctaattacatcaggatagaggtagagtttctgtaaaagaagagacattaagagttcctgaaatttatatctggcatacggataggcttatattcaaaacatcttagtcatacgaccataaattaaaagtggagtcactaaatagtttgcagtacgtttctaatataagtgtaggtgggtatcaaaacaagacaaatgctgttcagggaaagaagttggcaagcttaaggttaaacaaaaataaaattacatgtgttttcgccttccta

SEQ ID NO: 446728 - DNA, 1304 bp, Homo sapiens
gcggccgctccaagctgtcatggcgggtgtgctgaagaaccactggccttgtgggattggctgtgtgcaatactcctcacgagaggctaagaatattgtacacaaagattcttgatgttcttgaggaaatccctaaaaatgcagcatatagaaagtatacagaacagattacaaatgagaagctggctatggttaaagcggaaccagatgttaaaaaattagaagaccaacttcaaggcggtcaattagaagaggtgattcttcaggctgaacatgaactaaatctggcaagaaaaatgagggaatggaaactatgggagccattagtggaagagcctcctgccgatcagtggaaatggccaatataattattaagtgactttggtgtgttcatgggaaactgatgtaattaaatattctgttatattaagagcgtgttcttattactgacattttgtaatcaagaaaagtgaaaaaattcctacagattttcaatgcagagaccataatcaaaaagtaaactttctttagtagtatgttcaatacatcatttaattttttaagttatcctgaagaaggaaaggtccttaattattatagtctaaacaaatttatagattactgtttgaagtaaataatacgagtgaatattttcaaatgtgataaaatagcacaagtggctggtgataaaatttgaaattatggttaacctcagctgtgatcttatgtatgtaaagtgaaatttaaatagataattataggttgattacaaaatccatagtgtcattttattttagtcattattgaattataccatttactctgttttcttatagtcttaattttattatattttgttgttactgtattatatttgaaaaccttcaaattagaatacattgtacagttaaagaaattgacttggtacttaaaagaaagatttcccattgcatacaggttattggagaaattttccttttgttgcatttgtggaagttagttttctggcccgtggcctttaattttcttaatcaacctaattacatcaggatagaggtagagtttctgtaaaagaagagacattaagagttcctgaaatttatatctggcatacggataggcttatattcaaaacatcttagtcatacgaccataaattaaaagtggagtcactaaatagtttgcagtacgtttctaatataagtgtaggtgggtatcaaaacaagacaaatgctgttcagggaaagaagttggcaagcttaaggttaaacaaaaataaaattacatgtgttttcgccttccta

SEQ ID NO: 446729 - DNA, 849 bp, Homo sapiens
gaagaagttcatggatcaacatccagagatggatttttccaaggctaaattcaactagcccctgttttttcctccctgaactcttggggctgagctgcaaccacccgactttctttcccactcttctctgggacttgtgggcctcagggcttggggtggcatcgataaacaccggtgtttatcgatgccactatattttcaaatgtgataaaatagcacaagtggctggtgataaaatttgaaattatggttaacctcagctgtgatcttatgtatgtaaagtgaaatttaaatagataattataggttgattacaaaatccatagtgtcattttattttagtcattattgaattataccatttactctgttttcttatagtcttaattttattatattttgttgttactgtattatatttgaaaaccttcaaattagaatacattgtacagttaaagaaattgacttggtacttaaaagaaagatttcccattgcatacaggttattggagaaattttccttttgttgcatttgtggaagttagttttctggcccgtggcctttaattttcttaatcaacctaattacatcaggatagaggtagagtttctgtaaaagaagagacattaagagttcctgaaatttatatctggcatacggataggcttatattcaaaacatcttagtcatacgaccataaattaaaagtggagtcactaaatagtttgcagtacgtttctaatataagtgtaggtgggtatcaaaacaagacaaatgctgttcagggaaagaagttggcaagcttaaggttaaacaaaaataaaattacatgtgttttcgccttccta

SEQ ID NO: 446730 - DNA, 723 bp, Homo sapiens
ggaaacacgcggttttaaaaaacaacttacaaaatttaaacccggagaacggttttgcaaacacttatattttcaaatgtgataaaatagcacaagtggctggtgataaaatttgaaattatggttaacctcagctgtgatcttatgtatgtaaagtgaaatttaaatagataattataggttgattacaaaatccatagtgtcattttattttagtcattattgaattataccatttactctgttttcttatagtcttaattttattatattttgttgttactgtattatatttgaaaaccttcaaattagaatacattgtacagttaaagaaattgacttggtacttaaaagaaagatttcccattgcatacaggttattggagaaattttccttttgttgcatttgtggaagttagttttctggcccgtggcctttaattttcttaatcaacctaattacatcaggatagaggtagagtttctgtaaaagaagagacattaagagttcctgaaatttatatctggcatacggataggcttatattcaaaacatcttagtcatacgaccataaattaaaagtggagtcactaaatagtttgcagtacgtttctaatataagtgtaggtgggtatcaaaacaagacaaatgctgttcagggaaagaagttggcaagcttaaggttaaacaaaaataaaattacatgtgttttcgccttccta

SEQ ID NO: 446731 - DNA, 451 bp, Homo sapiens
gtttgttttgtctttgagacaagtgttccattaagtctttggtaatattttaacctatggaaatttgtatggtttgtcttttcagaggctaagaatattgtacacaaagattcttgatgttcttgaggaaatccctaaaaatgcagcatatagaaagtatacagaacagattacaaatgagaagctggctatggttaaagcggtaagtagctaagtcagttttgttgtcttgtgtaacatttaaccaaaaaagtttagttccttattttttatatattcgacacacttttcttctattctccttccttgaatgctcttttcccatcattcctcccttttattcagcaaactcttgtttattgagtgttttctatatgcaggcctctgttacatactggagtttgagactaggatcagatccttccttgaagtaacattgtagctgttcctt

SEQ ID NO: 446732 - DNA, 1877 bp, Homo sapiens
  misc_feature (1877)..(1877): n is a, c, g, or t
tggagctaagctgtttccagggtgacagagtggcgacctcggtggtcgattgagcaggtctgagaattgttcccaaagggttgtgcgtcaccgagtcgttggcgctgtcatggcgggtgtgctgaagaagaccactggccttgtgggattggctgtgtgcaatactcctcacgagaggctaagaatattgtacacaaagattcttgatgttcttgaggaaatccctaaaaatgcagcatatagaaagtatacagaacagattacaaatgagaagctggctatggttaaagcggaaccagatgttaaaaaattagaagaccaacttcaaggcggtcaattagaagaggtgattcttcaggctgaacatgaactaaatctggcaagaaaaatgagggaatggaaactatgggagccattagtggaagagcctcctgccgatcagtggaaatggccaatataattattaagtgactttggtgtgttcatgggaaactgatgtaattaaatattctgttatattaagagcgtgttcttattactgacattttgtaatcaagaaaagtgatatagaaaatatgtaggagactgttaaaattggtgattatggtaatatggtcatgtgaatcaatttttgatttataaagtactcacacaagttgtttcaaagatgatatttctgtgaacagagaggccatgggaagatttgaaaattattaaagaaaaattcctacagattttcaatgcagagaccataatcaaaaagtaaactttctttagtagtatgttcaatacatcatttaattttttaagttatcctgaagaaggaaaggtccttaattattatagtctaaacaaatttatagattactgtttgaagtaaataatacgagtgaatattttcaaatgtgataaaatagcacaagtggctggtgataaaatttgaaattatggttaacctcagctgtgatcttatgtatgtaaagtgaaatttaaatagataattataggttgattacaaaatccatagtgtcattttattttagtcattattgaattataccatttactctgttttcttatagtcttaattttattatattttgttgttactgtattatatttgaaaaccttcaaattagaatacattgtacagttaaagaaattgacttggtacttaaaagaaagatttcccattgcatacaggttattggagaaattttccttttgttgcatttgtggaagttagttttctggcccgtggcctttaattttcttaatcaacctaattacatcaggatagaggtagagtttctgtaaaagaagagacattaagagttcctgaaatttatatctggcatacggataggcttatattcaaaacatcttagtcatacgaccataaattaaaagtggagtcactaaatagtttgcagtacgtttctaatataagtgtaggtgggtatcaaaacaagacaaatgctgttcagggaaagaagttggcaagcttaaggttaaacaaaaataaaattacatgtgttttcgccttcctaaaaaaaaaaaaaaaaaaaaaaaaaaaaaattttggggggcgtggcaccctcgagaagacgctttctaaaacccactcgcgtgggggggagccgggccccagaatgaggttacggagcacaccgggccaaacaagccggttccctaagaagaagtactgcggcgcacagcaccaaagctgggggggctttccccacaaataaaaaaacggcccgcgggggcacagacgaccggttgtggaacaacatcccgaaggagaccgaggagcaacaacgagcgtcaaaaccagagggctccaagagagccgatattaattagccgcccggagn

SEQ ID NO: 446733 - DNA, 962 bp, Homo sapiens
  misc_feature (776)..(776): n is a, c, g, or t
tggagctaagctgtttccagggtgacagagtggcgacctcggtggtcgattgagcaggtctgagaattgttcccaaagggttgtgcgtcaccgagtcgttggcgctgtcatggcgggtgtgctgaagaagaccactggccttgtgggattggctgtgtgcaatactcctcacgagaggctaagaatattgtacacaaagattcttgatgttcttgaggaaatccctaaaaatgcagcatatagaaagtatacagaacagattacaaatgagaagctggctatggttaaagcggaaccagatgttaaaaaattagaagaccaacttcaaggcggtcaattagaagaggtgattcttcaggctgaacatgaactaaatctggcaagaaaaatgagggaatggaaactatgggagccattagtggaagagcctcctgccgatcagtggaaatggccaatataattattaagtgactttggtgtgttcatgggaaactgatgtaattaaatattctgttatattaagagcgtgttcttattactgacattttgtaatcaagaaaagtgatatagaaaatatgtaggagactgttaaaattggtgattatggtaatatggtcatgtgaatcaatttttgatttataaagtactcacacaagttgtttcaaagatgatatttctgtgaacagagaggccatgggaagatttgaaaattattaaagaaaaattcctacagattttcaatgcagagaccataatcaaaaaggagaggttgtcancctcttaattttagtatcgaagaaggaggccattttgtcaaccctttgatacggggggatatacgggtttccgggaaccccgggggacttgaaggccccggcccttgtgagaaatggggacaggcttttccggaccgctcaattaggcttaccggaggacgcgctggccgacgaagtagtgttcaa

SEQ ID NO: 446734 - DNA, 1547 bp, Homo sapiens
tggagctaagctgtttccagggtgacagagtggcgacctcggtggtcgattgagcaggtctgagaattgttcccaaagggttgtgcgtcaccgagtcgttggcgctgtcatggcgggtgtgctgaagaagaccactggccttgtgggattggctgtgtgcaatactcctcacgagaggctaagaatattgtacacaaagattcttgatgttcttgaggaaatccctaaaaatgcagcatatagaaagtatacagaacagattacaaatgagaagctggctatggttaaagcggaaccagatgttaaaaaattagaagaccaacttcaaggcggtcaattagaagaggtgattcttcaggctgaacatgaactaaatctggcaagaaaaatgagggaatggaaactatgggagccattagtggaagagcctcctgccgatcagtggaaatggccaatataattattaagtgactttggtgtgttcatgggaaactgatgtaattaaatattctgttatattaagagcgtgttcttattactgacattttgtaatcaagaaaagtgatatagaaaatatgtaggagactgttaaaattggtgattatggtaatatggtcatgtgaatcaatttttgatttataaagtactcacacaagttgtttcaaagatgatatttctgtgaacagagaggccatgggaagatttgaaaattattaaagaaaaattcctacagattttcaatgcagagaccataatcaaaaagtaaactttctttagtagtatgttcaatacatcatttaattttttaagttatcctgaagaaggaaaggtccttaattattatagtctaaacaaatttatagattactgtttgaagtaaataatacgagtgaatattttcaaatgtgataaaatagcacaagtggctggtgataaaatttgaaattatggttaacctcagctgtgatcttatgtatgtaaagtgaaatttaaatagataattataggttgattacaaaatccatagtgtcattttattttagtcattattgaattataccatttactctgttttcttatagtcttaattttattatattttgttgttactgtattatatttgaaaaccttcaaattagaatacattgtacagttaaagaaattgacttggtacttaaaagaaagatttcccattgcatacaggttattggagaaattttccttttgttgcatttgtggaagttagttttctggcccgtggcctttaattttcttaatcaacctaattacatcaggatagaggtagagtttaatgaagaaaaaacagctgaggagctgcgctgaggcgaaactgcaaggaagctccctcctcagcagtcagcacagtggataggagctgtctcttcccaagggcgcagtcacaagtcatcccaaagctgccgcagtgtcccgtccagcaagtcctgagggacctggagtgcttcactttctcctcactgtggacgcacacctgccacacggtgcctgtagtccagctgcttgggagg

SEQ ID NO: 446735 - DNA, 1508 bp, Homo sapiens
tggagctaagctgtttccagggtgacagagtggcgacctcggtggtcgattgagcaggtctgagaattgttcccaaagggttgtgcgtcaccgagtcgttggcgctgtcatggcgggtgtgctgaagaagaccactggccttgtgggattggctgtgtgcaatactcctcacgagaggctaagaatattgtacacaaagattcttgatgttcttgaggaaatccctaaaaatgcagcatatagaaagtatacagaacagattacaaatgagaagctggctatggttaaagcggaaccagatgttaaaaaattagaagaccaacttcaaggcggtcaattagaagaggtgattcttcaggctgaacatgaactaaatctggcaagaaaaatgagggaatggaaactatgggagccattagtggaagagcctcctgccgatcagtggaaatggccaatataattattaagtgactttggtgtgttcatgggaaactgatgtaattaaatattctgttatattaagagcgtgttcttattactgacattttgtaatcaagaaaagtgatatagaaaatatgtaggagactgttaaaattggtgattatggtaatatggtcatgtgaatcaatttttgatttataaagtactcacacaagttgtttcaaagatgatatttctgtgaacagagaggccatgggaagatttgaaaattattaaagaaaaattcctacagattttcaatgcagagaccataatcaaaaagtaaactttctttagtagtatgttcaatacatcatttaattttttaagttatcctgaagaatactgtttgaagtaaataatacgagtgaatattttcaaatgtgataaaatagcacaagtggctggtgataaaatttgaaattatggttaacctcagctgtgatcttatgtatgtaaagtgaaatttaaatagataattataggttgattacaaaatccatagtgtcattttattttagtcattattgaattataccatttactctgttttcttatagtcttaattttattatattttgttgttactgtattatatttgaaaaccttcaaattagaatacattgtacagttaaagaaattgacttggtacttaaaagaaagatttcccattgcatacaggttattggagaaattttccttttgttgcatttgtggaagttagttttctggcccgtggcctttaattttcttaatcaacctaattacatcaggatagaggtagagtttctgtaaaagaagagacattaagagttcctgaaatttatatctggcatacggataggcttatattcaaaacatcttagtcatacgaccataaattaaaagtggagtcactaaatagtttgcagtacgtttctaatataagtgtaggtgggtatcaaaacaagacaaatgctgttcagggaaagaagttggcaagcttaaggttaaacaaaaataaaattacatgtgttttcgccttccta

SEQ ID NO: 446736 - DNA, 1691 bp, Homo sapiens
tggagctaagctgtttccagggtgacagagtggcgacctcggtggtcgattgagcaggtctgagaattgttcccaaagggttgtgcgtcaccgagtcgttggcgctgtcatggcgggtgtgctgaagaaggtgagacgaatggaggtcactgttggaatttagactgtgggggtagactcagtccgatagccctacttcccgcgggtgttgacccctactgtcgcgggctcggcggtgcttttcggggactcgttctgcatgccttaccggaccactggccttgtgggattggctgtgtgcaatactcctcacgagaggctaagaatattgtacacaaagattcttgatgttcttgaggaaatccctaaaaatgcagcatatagaaagtatacagaacagattacaaatgagaagctggctatggttaaagcggaaccagatgttaaaaaattagaagaccaacttcaaggcggtcaattagaagaggtgattcttcaggctgaacatgaactaaatctggcaagaaaaatgagggaatggaaactatgggagccattagtggaagagcctcctgccgatcagtggaaatggccaatataattattaagtgactttggtgtgttcatgggaaactgatgtaattaaatattctgttatattaagagcgtgttcttattactgacattttgtaatcaagaaaagtgatatagaaaatatgtaggagactgttaaaattggtgattatggtaatatggtcatgtgaatcaatttttgatttataaagtactcacacaagttgtttcaaagatgatatttctgtgaacagagaggccatgggaagatttgaaaattattaaagaaaaattcctacagattttcaatgcagagaccataatcaaaaagtaaactttctttagtagtatgttcaatacatcatttaattttttaagttatcctgaagaaggaaaggtccttaattattatagtctaaacaaatttatagattactgtttgaagtaaataatacgagtgaatattttcaaatgtgataaaatagcacaagtggctggtgataaaatttgaaattatggttaacctcagctgtgatcttatgtatgtaaagtgaaatttaaatagataattataggttgattacaaaatccatagtgtcattttattttagtcattattgaattataccatttactctgttttcttatagtcttaattttattatattttgttgttactgtattatatttgaaaaccttcaaattagaatacattgtacagttaaagaaattgacttggtacttaaaagaaagatttcccattgcatacaggttattggagaaattttccttttgttgcatttgtggaagttagttttctggcccgtggcctttaattttcttaatcaacctaattacatcaggatagaggtagagtttctgtaaaagaagagacattaagagttcctgaaatttatatctggcatacggataggcttatattcaaaacatcttagtcatacgaccataaattaaaagtggagtcactaaatagtttgcagtacgtttctaatataagtgtaggtgggtatcaaaacaagacaaatgctgttcagggaaagaagttggcaagcttaaggttaaacaaaaataaaattacatgtgttttcgccttccta

SEQ ID NO: 446737 - DNA, 1714 bp, Homo sapiens
caattcagctgcagggagtgttgctactgatggaacaaaaccaaaccacttggaattaacgcacaatttaaagagatggggtttgaccttgttgtccaggctggtttcaaactcctgagttcgagcaatctacccacccttcaaagtgttgggatcacagatattttaccattacaatatagatggagattttcatctattaataaaagatgttctctattcacaaatggaaatggagcaacagtacacaatttctgccccagaattcatggctggtgcagatggaaatattggcatagttccagaggagttaaaggactcacccaggccgtacagctgaggctaagaatattgtacacaaagattcttgatgttcttgaggaaatccctaaaaatgcagcatatagaaagtatacagaacagattacaaatgagaagctggctatggttaaagcggaaccagatgttaaaaaattagaagaccaacttcaaggcggtcaattagaagaggtgattcttcaggctgaacatgaactaaatctggcaagaaaaatgagggaatggaaactatgggagccattagtggaagagcctcctgccgatcagtggaaatggccaatataattattaagtgactttggtgtgttcatgggaaactgatgtaattaaatattctgttatattaagagcgtgttcttattactgacattttgtaatcaagaaaagtgatatagaaaatatgtaggagactgttaaaattggtgattatggtaatatggtcatgtgaatcaatttttgatttataaagtactcacacaagttgtttcaaagatgatatttctgtgaacagagaggccatgggaagatttgaaaattattaaagaaaaattcctacagattttcaatgcagagaccataatcaaaaagtaaactttctttagtagtatgttcaatacatcatttaattttttaagttatcctgaagaaggaaaggtccttaattattatagtctaaacaaatttatagattactgtttgaagtaaataatacgagtgaatattttcaaatgtgataaaatagcacaagtggctggtgataaaatttgaaattatggttaacctcagctgtgatcttatgtatgtaaagtgaaatttaaatagataattataggttgattacaaaatccatagtgtcattttattttagtcattattgaattataccatttactctgttttcttatagtcttaattttattatattttgttgttactgtattatatttgaaaaccttcaaattagaatacattgtacagttaaagaaattgacttggtacttaaaagaaagatttcccattgcatacaggttattggagaaattttccttttgttgcatttgtggaagttagttttctggcccgtggcctttaattttcttaatcaacctaattacatcaggatagaggtagagtttctgtaaaagaagagacattaagagttcctgaaatttatatctggcatacggataggcttatattcaaaacatcttagtcatacgaccataaattaaaagtggagtcactaaatagtttgcagtacgtttctaatataagtgtaggtgggtatcaaaacaagacaaatgctgttcagggaaagaagttggcaagcttaaggttaaacaaaaataaaattacatgtgttttcgccttccta

SEQ ID NO: 446738 - DNA, 1085 bp, Homo sapiens
tggagctaagctgtttccagggtgacagagtggcgacctcggtggtcgattgagcaggtctgagaattgttcccaaagggttgtgcgtcaccgagtcgttggcgctgtcatggcgggtgtgctgaagaagaccactggccttgtgggattggctgtgtgcaatactcctcacgagaggctaagaatattgtacacaaagattcttgatgttcttgaggaaatccctaaaaatgcagcatatagaaagtatacagaacagattacaaatgagaagctggctatggttaaagcggaaccagatgttaaaaaattagaagaccaacttcaaggcggtcaattagaagaggtgattcttcagggaaaggtccttaattattatagtctaaacaaatttatagattactgtttgaagtaaataatacgagtgaatattttcaaatgtgataaaatagcacaagtggctggtgataaaatttgaaattatggttaacctcagctgtgatcttatgtatgtaaagtgaaatttaaatagataattataggttgattacaaaatccatagtgtcattttattttagtcattattgaattataccatttactctgttttcttatagtcttaattttattatattttgttgttactgtattatatttgaaaaccttcaaattagaatacattgtacagttaaagaaattgacttggtacttaaaagaaagatttcccattgcatacaggttattggagaaattttccttttgttgcatttgtggaagttagttttctggcccgtggcctttaattttcttaatcaacctaattacatcaggatagaggtagagtttctgtaaaagaagagacattaagagttcctgaaatttatatctggcatacggataggcttatattcaaaacatcttagtcatacgaccataaattaaaagtggagtcactaaatagtttgcagtacgtttctaatataagtgtaggtgggtatcaaaacaagacaaatgctgttcagggaaagaagttggcaagcttaaggttaaacaaaaataaaattacatgtgttttcgccttccta

SEQ ID NO: 446739 - DNA, 1996 bp, Homo sapiens
  misc_feature (56)..(59): n is a, c, g, or t
aaattttttagagacagggtctcactctgctgcccaggctggagtgcagtggcacnnnnacctgtcattcgttcgtcctcagtgcagggcaacaggactttaggttcaagatggtgactgcagccatgctgctacagtgctgcccagtgcttgcccggggccccacaagcctcctaggcaaggtggttaagactcaccagttcctgtttggtattggacgctgtcccatcctggctacccaaggaccaaactgttctcaaatccaccttaaggcaacaaaggctggaggagattctccatcttgggcgaagggccactgtcccttcatgctgtcggaactccaggatgggaagagcaagattgtgcagaaggcagccccagaagtccaggaagatgtgaaggctttcaagacagatctgcctagctccctggtctcagtcagcctaaggaagccattttccggtccccaggagcaggagcagatctctgggaaggtcacacacctgattcagaacaatatgcctggaaactatgtcttcagttatgaccagtttttcagggacaagatcatggagaagaaacaggatcacacctaccgtgtgttcaagactgtgaaccgctgggctgatgcatatccctttgcccaacatttctctgaggcatctgtggcctcaaaggatgtgtccgtctggtgtagtaatgattacctgggcatgagccgacaccctcaggtcttgcaagccacacaggagaccctgcagcgtcatggtgctggagctggtggcacccgcaacatctcaggcaccagtaagtttcatgtggagcttgagcaggagctggctgagctgcaccagaaggactcagccctgctcttctcctcctgctttgttgccaatgactctactctcttcaccttggccaagatcctgccagggtgcgagatttactcagacgcaggcaaccatgcttccatgatccaaggtatccgtaacagtggagcagccaagtttgtcttcaggcacaatgaccctgaccacctaaagaaacttctagagaagtctaaccctaagatacccaaaattgtggcctttgagactgtccactccatggatggtgccatctgtcccctcgaggagttgtgtgatgtgtcccaccagtatggggccctgaccttcgtggatgaggtccatgctgtaggactgtatgggtcccggggcgctgggattggggagcgtgatggaattatgcataagattgacatcatctctggaactcttggcaaggcctttggctgtgtgggcggctacattgccagcacccgtgacttggtggacatggtgcgctcctatgctgcaggcttcatctttaccacttctctgccccccatggtgctctctggagctctagaatctgtgcggctgctcaagggagaggagggccaagccctgaggcgagcccaccagcgcaatgtcaagcacatgcgccagctactcatggacaggggccttcctgtcatcccctgccccagccacatcatccccatccgggtgggcaatgcagcactcaacagcaagctctgtgatctcctgctctccaagcatggcatctatgtgcaggccatcaactacccaactgtcccccggggtgaagagctcctgcgcttggcaccctccccccaccacagccctcagatgatggaagattttgtggagaagctgctgctggcttggactgcggtggggctgcccctccaggatgtgtctgtggctgcctgcaatttctgtcgccgtcctgtacactttgagctcatgagtgagtgggaacgttcctacttcgggaacatggggccccagtatgtcaccacctatgcctgagaagccagctgcctaggattcacaccccacctgcgcttcacttgggtccaggcctactcctgtcttctgctttgttgtgtgcctctagctgaattgagcctaaaaataaagcacaaaccaca

SEQ ID NO: 446740 - DNA, 216 bp, Homo sapiens
tggagactgaatttcactcttgttgcccaggctggagtgcaatgcatgatctcagcccactgcaacctccgcctcccagtgctgggattacaggcgtgcaccactgtgcctggtctaccagtcccattttcaaaggtgagaagaggcttggctagagcaagcactgtgttcaaagcaatgctcccactttccaggtcacagtatacaggaaacatt

SEQ ID NO: 446741 - DNA, 2057 bp, Homo sapiens
gcaggttggtacagccccggattaatgggatcctcagtgcaggcaacagggcccacatgccttggccccacataccaacccaggctgctgtgacagcccatgagagggggagaggttgctctgggatggaacaagaaaaagaggttgttttgtgaggactttaggttcaagatggtgactgcagccatgctgctacagtgctgcccagtgcttgcccggggccccacaagcctcctaggcaaggtggttaagactcaccagttcctgtttggtattggacgctgtcccatcctggctacccaaggaccaaactgttctcaaatccaccttaaggcaacaaaggctggaggagattctccatcttgggcgaagggccactgtcccttcatgctgtcggaactccaggatgggaagagcaagattgtgcagaaggcagccccagaagtccaggaagatgtgaaggctttcaagacagatctgcctagctccctggtctcagtcagcctaaggaagccattttccggtccccaggagcaggagcagatctctgggaaggtcacacacctgattcagaacaatatgcctggaaactatgtcttcagttatgaccagtttttcagggacaagatcatggagaagaaacaggatcacacctaccgtgtgttcaagactgtgaaccgctgggctgatgcatatccctttgcccaacatttctctgaggcatctgtggcctcaaaggatgtgtccgtctggtgtagtaatgattacctgggcatgagccgacaccctcaggtcttgcaagccacacaggagaccctgcagcgtcatggtgctggagctggtggcacccgcaacatctcaggcaccagtaagtttcatgtggagcttgagcaggagctggctgagctgcaccagaaggactcagccctgctcttctcctcctgctttgttgccaatgactctactctcttcaccttggccaagatcctgccagggtgcgagatttactcagacgcaggcaaccatgcttccatgatccaaggtatccgtaacagtggagcagccaagtttgtcttcaggcacaatgaccctgaccacctaaagaaacttctagagaagtctaaccctaagatacccaaaattgtggcctttgagactgtccactccatggatggtgccatctgtcccctcgaggagttgtgtgatgtgtcccaccagtatggggccctgaccttcgtggatgaggtccatgctgtaggactgtatgggtcccggggcgctgggattggggagcgtgatggaattatgcataagattgacatcatctctggaactcttggcaaggcctttggctgtgtgggcggctacattgccagcacccgtgacttggtggacatggtgcgctcctatgctgcaggcttcatctttaccacttctctgccccccatggtgctctctggagctctagaatctgtgcggctgctcaagggagaggagggccaagccctgaggcgagcccaccagcgcaatgtcaagcacatgcgccagctactcatggacaggggccttcctgtcatcccctgccccagccacatcatccccatccgggtgggcaatgcagcactcaacagcaagctctgtgatctcctgctctccaagcatggcatctatgtgcaggccatcaactacccaactgtcccccggggtgaagagctcctgcgcttggcaccctccccccaccacagccctcagatgatggaagattttgtggagaagctgctgctggcttggactgcggtggggctgcccctccaggatgtgtctgtggctgcctgcaatttctgtcgccgtcctgtacactttgagctcatgagtgagtgggaacgttcctacttcgggaacatggggccccagtatgtcaccacctatgcctgagaagccagctgcctaggattcacaccccacctgcgcttcacttgggtccaggcctactcctgtcttctgctttgttgtgtgcctctagctgaattgagcctaaaaataaagcacaaaccaca

SEQ ID NO: 446742 - DNA, 2308 bp, Homo sapiens
  misc_feature (56)..(59): n is a, c, g, or t
aaattttttagagacagggtctcactctgctgcccaggctggagtgcagtggcacnnnnacctgtcattcgttcgtcctcagtgcagggcaacaggactttaggttcaagatggtgactgcagccatgctgctacagtgctgcccagtgcttgcccggggccccacaagcctcctaggcaaggtggttaagactcaccagttcctgtttggtattggacgctgtcccatcctggctacccaaggaccaaactgttctcaaatccaccttaaggcaacaaaggctggaggagattctccatcttgggcgaagggccactgtcccttcatgctgtcggaactccaggatgggaagagcaagattgtgcagaaggcagccccagaagtccaggaagatgtgaaggctttcaagacagatctgcctagctccctggtctcagtcagcctaaggaagccattttccggtccccaggagcaggagcagatctctgggaaggtcacacacctgattcagaacaatatgcctggaaactatgtcttcagttatgaccagtttttcagggacaagatcatggagaagaaacaggatcacacctaccgtgtgttcaagactgtgaaccgctgggctgatgcatatccctttgcccaacatttctctgaggcatctgtggcctcaaaggatgtgtccgtctggtgtagtaatgattacctgggcatgagccgacaccctcaggtcttgcaagccacacaggagaccctgcagcgtcatggtgctggagctggtggcacccgcaacatctcaggcaccagtaagtttcatgtggagcttgagcaggagctggctgagctgcaccagaaggactcagccctgctcttctcctcctgctttgttgccaatgactctactctcttcaccttggccaagatcctgccagggtgcgagatttactcagacgcaggcaaccatgcttccatgatccaaggtatccgtaacagtggagcagccaagtttgtcttcaggcacaatgaccctgaccacctaaagaaacttctagagaagtctaaccctaagatacccaaaattgtggcctttgagactgtccactccatggatggtgccatctgtcccctcgaggagttgtgtgatgtgtcccaccagtatggggccctgaccttcgtggatgaggtccatgctgtaggactgtatgggtcccggggcgctgggattggggagcgtgatggaattatgcataagattgacatcatctctggaactcttggcaaggcctttggctgtgtgggcggctacattgccagcacccgtgacttggtggacatggtgcgctcctatgctgcaggcttcatctttaccacttctctgccccccatggtgctctctggagctctagaatctgtgcggctgctcaagggagaggagggccaagccctgaggcgagcccaccagcgcaatgtcaagcacatgcgccagctactcatggacaggggccttcctgtcatcccctgccccagccacatcatccccatccggagaagctgctgctggcttggactgcggtggggctgcccctccaggatgtgtctgtggctgcctgcaatttctgtcgccgtcctgtacactttgagctcatgagtgagtgggaacgttcctacttcgggaacatggggccccagtatgtcaccacctatgcctgagaagccagctgcctaggattcacaccccacctgcgcttcacttgggtccaggcctactcctgtcttctgctttgttgtgtgcctctagctgaattgagcctaaaaataaagcacaaaccacagcaaaaaaaagccttttattggacagggaacagacaagtgcattctgactccctcagacaagtggcagatctatgaggtaaccataggtcacttgttggtcaccattccattttaccaacagggaaacagaatgagaaagaggaaggaaatgcccaaaaactacacagtgagttgcaaagagctaggatacttggcagatttatttgagatggctcttctccaatggtttcaataaaaatccagggattgacgcttcactggtaatccgggccctggaaatctgggcccagggtagcccctgaagccaggaaatgagtcagccctaaccaaattccctagaaaggagtggttccccaaaaccaaagaggtattttccataaggggatatggatgtcttcctcaatccattatcctctctccctcccacggcatcccacagaacaggatttaccagtcccattctttttcttttct

SEQ ID NO: 446743 - DNA, 1880 bp, Homo sapiens
  misc_feature (56)..(59): n is a, c, g, or t
aaattttttagagacagggtctcactctgctgcccaggctggagtgcagtggcacnnnnacctgtcattcgttcgtcctcagtgcagggcaacaggactttaggttcaagatggtgactgcagccatgctgctacagtgctgcccagtgcttgcccggggccccacaagcctcctaggcaaggtggttaagactcaccagttcctgtttggtattggacgctgtcccatcctggctacccaaggaccaaactgttctcaaatccaccttaaggcaacaaaggctggaggagattctccatcttgggcgaagggccactgtcccttcatgctgtcggaactccaggatgggaagagcaagattgtgcagaaggcagccccagaagtccaggaagatgtgaaggctttcaagacagatctgcctagctccctggtctcagtcagcctaaggaagccattttccggtccccaggagcaggagcagatctctgggaaggtcacacacctgattcagaacaatatgcctggaaactatgtcttcagttatgaccagtttttcagggacaagatcatggagaagaaacaggatcacacctaccgtgtgttcaagactgtgaaccgctgggctgatgcatatccctttgcccaacatttctctgaggcatctgtggcctcaaaggatgtgtccgtctggtgtagtaatgattacctgggcatgagccgacaccctcaggtcttgcaagccacacaggagaccctgcagcgtcatggtgctggagctggtggcacccgcaacatctcaggcaccagtaagtttcatgtggagcttgagcaggagctggctgagctgcaccagaaggactcagccctgctcttctcctcctgctttgttgccaatgactctactctcttcaccttggccaagatcctgccagggtgcgagatttactcagacgcaggcaaccatgcttccatgatccaaggtatccgtaacagtggagcagccaagtttgtcttcaggcacaatgaccctgaccacctaaagaaacttctagagaagtctaaccctaagatacccaaaattgtggcctttgagactgtccactccatggatggtgccatctgtcccctcgaggagttgtgtgatgtgtcccaccagtatggggccctgaccttcgtggatgaggtccatgctgtaggactgtatgggtcccggggcgctgggattggggagcgtgatggaattatgcataagattgacatcatctctggaactcttggcaaggcctttggctgtgtgggcggctacattgccagcacccgtgacttggtggacatggtgcgctcctatgctgcaggcttcatctttaccacttctctgccccccatggtgctctctggagctctagaatctgtgcggctgctcaagggagaggagggccaagccctgaggcgagcccaccagcgcaatgtcaagcacatgcgccagctactcatggacaggggccttcctgtcatcccctgccccagccacatcatccccatccgggtgagagccccaccatgcccattgccctctccacctatttattctgggagcctcacgctcccaacaaacctacatctgttgctgtcttcaattatttgctttcctgctaaccattccctttattgccagctttgtttccctttttgaaaaattatcagccattctggattaaccagtcttttccttgcatcagccattacctcatgcttattagattatcctaaccctaacaatagcgagtgctcacagcctataattcagagtttttcaaactggatcaagacaattaatgggtcacaaaatcagcttagtgggttatcattagcattaaaa

SEQ ID NO: 446744 - DNA, 734 bp, Homo sapiens
cacagcaaaaaaaagccttttattggacagggaacagacaagtgcattctgactccctcagacaagtggcagatctatgaggtaaccataggtcacttgttggtcaccattccattttaccaacagggaaacagaatgagaaagaggaaggaaatgcccaaaaactacacagtgagttgcaaagagctaggatacttggcagatttatttgagatggctcttctccaatggtttcaataaaaatccagggattgacgcttcactggtaatccgggccctggaaatctgggcccagggtagcccctgaagccaggaaatgagtcagccctaaccaaattccctagaaaggagtggttccccaaaaccaaagaggtattttccataaggggatatggatgtcttcctcaatccattatcctctctccctcccacggcatcccacagaacaggatttaccagtcccattctttttcttttctttttttttttttggagactgaatttcactcttgttgcccaggctggagtgcaatgcatgatctcagcccactgcaacctccgcctcccaggtacaagctattctcctgtctcagcctcctaagtagcttggattacaggcacgcgccaccacgcccagttaatttttttgtatttagtagagacggggtctcaccatgttaggctggttgcgaactcctgacctcaggtgatccacccatctcagcctcccaaag

SEQ ID NO: 446745 - DNA, 2471 bp, Homo sapiens
  misc_feature (56)..(59): n is a, c, g, or t
aaattttttagagacagggtctcactctgctgcccaggctggagtgcagtggcacnnnnacctgtcattcgttcgtcctcagtgcagggcaacaggactttaggttcaagatggtgactgcagccatgctgctacagtgctgcccagtgcttgcccggggccccacaagcctcctaggcaaggtggttaagactcaccagttcctgtttggtattggacgctgtcccatcctggctacccaaggaccaaactgttctcaaatccaccttaaggcaacaaaggctggaggagattctccatcttgggcgaagggccactgtcccttcatgctgtcggaactccaggatgggaagagcaagattgtgcagaaggcagccccagaagtccaggaagatgtgaaggctttcaagacagatctgcctagctccctggtctcagtcagcctaaggaagccattttccggtccccaggagcaggagcagatctctgggaaggtcacacacctgattcagaacaatatgcctggaaactatgtcttcagttatgaccagtttttcagggacaagatcatggagaagaaacaggatcacacctaccgtgtgttcaagactgtgaaccgctgggctgatgcatatccctttgcccaacatttctctgaggcatctgtggcctcaaaggatgtgtccgtctggtgtagtaatgattacctgggcatgagccgacaccctcaggtcttgcaagccacacaggagaccctgcagcgtcatggtgctggagctggtggcacccgcaacatctcaggcaccagtaagtttcatgtggagcttgagcaggagctggctgagctgcaccagaaggactcagccctgctcttctcctcctgctttgttgccaatgactctactctcttcaccttggccaagatcctgccagggtgcgagatttactcagacgcaggcaaccatgcttccatgatccaaggtatccgtaacagtggagcagccaagtttgtcttcaggcacaatgaccctgaccacctaaagaaacttctagagaagtctaaccctaagatacccaaaattgtggcctttgagactgtccactccatggatggtgccatctgtcccctcgaggagttgtgtgatgtgtcccaccagtatggggccctgaccttcgtggatgaggtccatgctgtaggactgtatgggtcccggggcgctgggattggggagcgtgatggaattatgcataagattgacatcatctctggaactcttggcaaggcctttggctgtgtgggcggctacattgccagcacccgtgacttggtggacatggtgcgctcctatgctgcaggcttcatctttaccacttctctgccccccatggtgctctctggagctctagaatctgtgcggctgctcaagggagaggagggccaagccctgaggcgagcccaccagcgcaatgtcaagcacatgcgccagctactcatggacaggggccttcctgtcatcccctgccccagccacatcatccccatccgggtgggcaatgcagcactcaacagcaagctctgtgatctcctgctctccaagcatggcatctatgtgcaggccatcaactacccaactgtcccccggggtgaagagctcctgcgcttggcaccctccccccaccacagccctcagatgatggaagattttgtggagaagctgctgctggcttggactgcggtggggctgcccctccaggatgtgtctgtggctgcctgcaatttctgtcgccgtcctgtacactttgagctcatgagtgagtgggaacgttcctacttcgggaacatggggccccagtatgtcaccacctatgcctgagaagccagctgcctaggattcacaccccacctgcgcttcacttgggtccaggcctactcctgtcttctgctttgttgtgtgcctctagctgaattgagcctaaaaataaagcacaaaccacagcaaaaaaaagccttttattggacagggaacagacaagtgcattctgactccctcagacaagtggcagatctatgaggtaaccataggtcacttgttggtcaccattccattttaccaacagggaaacagaatgagaaagaggaaggaaatgcccaaaaactacacagtgagttgcaaagagctaggatacttggcagatttatttgagatggctcttctccaatggtttcaataaaaatccagggattgacgcttcactggtaatccgggccctggaaatctgggcccagggtagcccctgaagccaggaaatgagtcagccctaaccaaattccctagaaaggagtggttccccaaaaccaaagaggtattttccataaggggatatggatgtcttcctcaatccattatcctctctccctcccacggcatcccacagaacaggatttaccagtcccattctttttcttttct

SEQ ID NO: 446746 - DNA, 1946 bp, Homo sapiens
gcaggttggtacagccccggattaatgggatcctcagtgcaggcaacagggcccacatgccttggccccacataccaacccaggctgctgtgacagcccatgagagggggagaggttgctctgggatggaacaagaaaaagaggttgttttgtgaggactttaggttcaagatggtgactgcagccatgctgctacagtgctgcccagtgcttgcccggggccccacaagcctcctaggcaaggtggttaagactcaccagttcctgtttggtattggacgctgtcccatcctggctacccaaggaccaaactgttctcaaatccaccttaaggcaacaaaggctggaggagattctccatcttgggcgaagggccactgtcccttcatgctgtcggaactccaggatgggaagagcaagattgtgcagaaggcagccccagaagtccaggaagatgtgaaggctttcaagacaggaaactatgtcttcagttatgaccagtttttcagggacaagatcatggagaagaaacaggatcacacctaccgtgtgttcaagactgtgaaccgctgggctgatgcatatccctttgcccaacatttctctgaggcatctgtggcctcaaaggatgtgtccgtctggtgtagtaatgattacctgggcatgagccgacaccctcaggtcttgcaagccacacaggagaccctgcagcgtcatggtgctggagctggtggcacccgcaacatctcaggcaccagtaagtttcatgtggagcttgagcaggagctggctgagctgcaccagaaggactcagccctgctcttctcctcctgctttgttgccaatgactctactctcttcaccttggccaagatcctgccagggtgcgagatttactcagacgcaggcaaccatgcttccatgatccaaggtatccgtaacagtggagcagccaagtttgtcttcaggcacaatgaccctgaccacctaaagaaacttctagagaagtctaaccctaagatacccaaaattgtggcctttgagactgtccactccatggatggtgccatctgtcccctcgaggagttgtgtgatgtgtcccaccagtatggggccctgaccttcgtggatgaggtccatgctgtaggactgtatgggtcccggggcgctgggattggggagcgtgatggaattatgcataagattgacatcatctctggaactcttggcaaggcctttggctgtgtgggcggctacattgccagcacccgtgacttggtggacatggtgcgctcctatgctgcaggcttcatctttaccacttctctgccccccatggtgctctctggagctctagaatctgtgcggctgctcaagggagaggagggccaagccctgaggcgagcccaccagcgcaatgtcaagcacatgcgccagctactcatggacaggggccttcctgtcatcccctgccccagccacatcatccccatccgggtgggcaatgcagcactcaacagcaagctctgtgatctcctgctctccaagcatggcatctatgtgcaggccatcaactacccaactgtcccccggggtgaagagctcctgcgcttggcaccctccccccaccacagccctcagatgatggaagattttgtggagaagctgctgctggcttggactgcggtggggctgcccctccaggatgtgtctgtggctgcctgcaatttctgtcgccgtcctgtacactttgagctcatgagtgagtgggaacgttcctacttcgggaacatggggccccagtatgtcaccacctatgcctgagaagccagctgcctaggattcacaccccacctgcgcttcacttgggtccaggcctactcctgtcttctgctttgttgtgtgcctctagctgaattgagcctaaaaataaagcacaaaccaca

SEQ ID NO: 446747 - DNA, 2984 bp, Homo sapiens
cagcgggagaggggcggctccgcgtcatgtgactggagtccgcgtaggaggggtcggaggtcttacccaacagattgacgcggcgttagtattggccgtgtacccgaaaaactgattgactgggctggcgttaactgtgcggaggcagttggccgtgtttacatcagtggttggagaccagacctaacagacaggtgtgtcctgtttgcaaagctggcatcagccgagacaaggtcatccccctctatggaaggggcagcactgggcaacaggaccccagagagaagacccctcctcgtcctcaaggacagaggccagagccggagaatagagggggatttcaaggatttggatttggagatggtggcttccagatgtcttttggaattggggcatttccctttgggatatttgccacagcatttaatataaatgatgggcggcctcctccagctgtccctgggacaccccagtatgtggacgagcagttcctgtcacgcctcttcctatttgtggccctggtgatcatgttctggctcctgattgcctaatgctgggctcctgcctacatccgtggcagggctctggactggtgacgtgccaccccaactcctggtgtttggcttcctggctaatcttgactcctggaatcagtgggatcagtaacacatcaaggagtcttgtttcttcatcagagctttggaactcgagaccagttggcgatgacccctgaatatcgccaccgctgtaaacactctataacttcaggccttggcattgagtcatctctcatgggtgacaccatgaaatcttgtttcagccagttctgcaggtcctgactctgcagagggaagaggcagaaagagagaaactgtcagagtataatttcacctgagtttaatattacagaaacaaagggatgcaccaaatggtatttctggaaattttcatgtctttaaataccccttggtaagttgcttctgaagccagtgggggctcctcagatagagaggttcccctttcaaatcccagtgccgctctgttctctttccttcccctcccactccccctcttcttcctctgtagagatgcaagaaattgctgtcccataaaaatcataattgcagtagctaaagctggggtcacttcgtgaattcaccagagactcaaagatcttttattggctctgggctgtgctcagtgtctttggcctcagagaacaacttgaatgacttcctggtttcctggcataaattattcctggtgagacatgtggcttaactcacaggtttcccatcagctttctccctaaaactatgttcatctgcctctctctgccagagaacatacagccgagaatactgccgaagctgagactgactactgtgcattaggaaagacctggagtcaggactttggtgggatttggagctccgaggcagtaataactgaacaagcagccctgtcccctaggctgcagaagcttgaatgcatcctctcccagaacctgccacaggaaactgggggctttgtcaggtcagcccaactgcatgcaaaagaccaccatcctcagaagccaagttgtcttttatgaagaggcaaggaaaggggaaacccacatgtgaccctgattttggtatggcttgatagagttccctgaaaactccttgtatgtgtgctaaaaccagggaagcatgtgactgccaagcaggcaacccctgatgatttgtaaagccaggtggcagggccttggggagccccagcacaatgatattgtgtggtcttccctcctgtggaatcgaggggaaattattcttcccaataccttgatttgattttcagtttcataagcttcttcctctgaatcttattgagggactatggtaccaagcaggtaggactgttcacctggtggaacagttcttgctctgccttctaggcttcatcccagaaatccagcctctttctggagaccccaaagctggagggagatgggctttcctctgggcctctctcctactttgccatccacactgctcctggctaaccccagcaataaccaacaaatggtaggaagccccatctattgctttttctcaattatgactgcatagtttgtggaaacaaagatcttgaggaagatgagggaagccctcccctcttcatagtccccatctcttctcctttgtacctgtcaacaccagagttcagtgtttaaacagacaaaatataaagtattgagtaggtggttcatatgccgaatccacttggtaggaagaaaccaccagctttatagtgtgcctgatagattttaaacattcctgggcacccactcaagagtgctctttttatcaccttctggaaatccgcaaagttgcaggggcctctggagtgtctcttctctagagagaattggtgggacccccctcagtgcagtggccccaactagtggagggagagaggacttaagtcagatggactcaacagaaatgggtttccagaagaataatgaaaagttgtgggtaggaaaatgaatcatttggactcttcaatgaaatggagtgagcccaggagagctcagccaacagaggcactctgggaacctgttagtaaagccaggctggccaaatgccatttgattttgaacctcgtaggtccccactcaccctctgccaggagctaagtaaggcaggagagctgacttgggactcctggctcggccccaacagggagcccccttcccaccatccctcggcaagctcaccacctcatccttctgccaaggcagctttcctttcttttgtgtgttttctgtgttcttagcctccaccctcctcctgccacccttgtggactaggaccaggtcctgaccccagtcagaaaatgatgatatgtacagtggcacaccttaaccagtcactaattttcactgttgtgaaagtgatttgatttagaattaaacaaatggttttacattactatga

SEQ ID NO: 446748 - DNA, 2625 bp, Homo sapiens
cagcgggagaggggcggctccgcgtcatgtgactggagtccgcgtaggaggggtcggaggtcttacccaacagattgacgcggcgttagtattggccgtgtacccgaaaaactgattgactgggctggcgttaactgtgcggaggcaggatttccctggggaaagtcttcactcagagcttcgctgacagccaaggatggcaagcaaggggccctcggcctctgcatctcctgagaactccagtgcaggggggcccagtgggagcagcaatggcgctggcgagagcggagggcaggacagcactttcgagtgcaacatctgcttggacacagccaaggatgccgtcatcagcctgtgtggccacctcttctgttggccgtgtttacatcagtggttggagaccagacctaacagacaggtgtgtcctgtttgcaaagctggcatcagccgagacaaggtcatccccctctatggaaggggcagcactgggcaacaggaccccagagagaagacccctcctcgtcctcaaggacagaggccagagccggagaatagagggggatttcaaggatttggatttggagatggtggcttccagatgtcttttggaattggggcatttccctttgggatatttgccacagcatttaatataaatgatgggcggcctcctccagctgtccctgggacaccccagtatgtggacgagcagttcctgtcacgcctcttcctatttgtggccctggtgatcatgttctggctcctgattgcctaaagctggggtcacttcgtgaattcaccagagactcaaagatcttttattggctctgggctgtgctcagtgtctttggcctcagagaacaacttgaatgacttcctggtttcctggcataaattattcctggtgagacatgtggcttaactcacaggtttcccatcagctttctccctaaaactatgttcatctgcctctctctgccagagaacatacagccgagaatactgccgaagctgagactgactactgtgcattaggaaagacctggagtcaggactttggtgggatttggagctccgaggcagtaataactgaacaagcagccctgtcccctaggctgcagaagcttgaatgcatcctctcccagaacctgccacaggaaactgggggctttgtcaggtcagcccaactgcatgcaaaagaccaccatcctcagaagccaagttgtcttttatgaagaggcaaggaaaggggaaacccacatgtgaccctgattttggtatggcttgatagagttccctgaaaactccttgtatgtgtgctaaaaccagggaagcatgtgactgccaagcaggcaacccctgatgatttgtaaagccaggtggcagggccttggggagccccagcacaatgatattgtgtggtcttccctcctgtggaatcgaggggaaattattcttcccaataccttgatttgattttcagtttcataagcttcttcctctgaatcttattgagggactatggtaccaagcaggtaggactgttcacctggtggaacagttcttgctctgccttctaggcttcatcccagaaatccagcctctttctggagaccccaaagctggagggagatgggctttcctctgggcctctctcctactttgccatccacactgctcctggctaaccccagcaataaccaacaaatggtaggaagccccatctattgctttttctcaattatgactgcatagtttgtggaaacaaagatcttgaggaagatgagggaagccctcccctcttcatagtccccatctcttctcctttgtacctgtcaacaccagagttcagtgtttaaacagacaaaatataaagtattgagtaggtggttcatatgccgaatccacttggtaggaagaaaccaccagctttatagtgtgcctgatagattttaaacattcctgggcacccactcaagagtgctctttttatcaccttctggaaatccgcaaagttgcaggggcctctggagtgtctcttctctagagagaattggtgggacccccctcagtgcagtggccccaactagtggagggagagaggacttaagtcagatggactcaacagaaatgggtttccagaagaataatgaaaagttgtgggtaggaaaatgaatcatttggactcttcaatgaaatggagtgagcccaggagagctcagccaacagaggcactctgggaacctgttagtaaagccaggctggccaaatgccatttgattttgaacctcgtaggtccccactcaccctctgccaggagctaagtaaggcaggagagctgacttgggactcctggctcggccccaacagggagcccccttcccaccatccctcggcaagctcaccacctcatccttctgccaaggcagctttcctttcttttgtgtgttttctgtgttcttagcctccaccctcctcctgccacccttgtggactaggaccaggtcctgaccccagtcagaaaatgatgatatgtacagtggcacaccttaaccagtcactaattttcactgttgtgaaagtgatttgatttagaattaaacaaatggttttacattactatga

SEQ ID NO: 446749 - DNA, 599 bp, Homo sapiens
ctcgtgccgaattcggcatgaggagaattggtgggacccccctcagtgcagtggccccaactagtggagggagagaggacttaagtcagatggactcaacagaaatgggtttccagaagaataatgaaaagttgtgggtaggaaaatgaatcatttggactcttcaatgaaatggagtgagcccaggagagctcagccaacagaggcactctgggaacctgttagtaaagccaggctggccaaatgccatttgattttgaacctcgtaggtccccactcaccctctgccaggagctaagtaaggcaggagagctgacttgggactcctggctcggccccaacagggagcccccttcccaccatccctcggcaagctcaccacctcatccttctgccaaggcagctttcctttcttttgtgtgttttctgtgttcttagcctccaccctcctcctgccacccttgtggactaggaccaggtcctgaccccagtcagaaaatgatgatatgtacagtggcacaccttaaccagtcactaattttcactgttgtgaaagtgatttgatttagaattaaacaaatggttttacattactatga

SEQ ID NO: 446750 - DNA, 176 bp, Homo sapiens
gatgatatgtacagtggcacaccttaaccagtcatcattttctgactggggtcaggacctggtcccagtcagaaaatgatgatatgtacagtggcacaccttaaccagtcactaattttcactgttgtgaaagtgatttgatttagaattaaacaaatggttttacattactatga

SEQ ID NO: 446751 - DNA, 3208 bp, Homo sapiens
cagcgggagaggggcggctccgcgtcatgtgactggagtccgcgtaggaggggtcggaggtcttacccaacagattgacgcggcgttagtattggccgtgtacccgaaaaactgattgactgggctggcgttaactgtgcggaggcaggatttccctggggaaagtcttcactcagagcttcgctgacagccaaggatggcaagcaaggggccctcggcctctgcatctcctgagaactccagtgcaggggggcccagtgggagcagcaatggcgctggcgagagcggagggcaggacagcactttcgagtgcaacatctgcttggacacagccaaggatgccgtcatcagcctgtgtggccacctcttctgttggccgtgtttacatcagtggttggagaccagacctaacagacaggtgtgtcctgtttgcaaagctggcatcagccgagacaaggtcatccccctctatggaaggggcagcactgggcaacaggaccccagagagaagacccctcctcgtcctcaaggacagaggccagagccggagaatagagggggatttcaaggatttggatttggagatggtggcttccagatgtcttttggaattggggcatttccctttgggatatttgccacagcatttaatataaatgatgggcggcctcctccagctgtccctgggacaccccagtatgtggacgagcagttcctgtcacgcctcttcctatttgtggccctggtgatcatgttctggctcctgattgcctaatgctgggctcctgcctacatccgtggcagggctctggactggtgacgtgccaccccaactcctggtgtttggcttcctggctaatcttgactcctggaatcagtgggatcagtaacacatcaaggagtcttgtttcttcatcagagctttggaactcgagaccagttggcgatgacccctgaatatcgccaccgctgtaaacactctataacttcaggccttggcattgagtcatctctcatgggtgacaccatgaaatcttgtttcagccagttctgcaggtcctgactctgcagagggaagaggcagaaagagagaaactgtcagagtataatttcacctgagtttaatattacagaaacaaagggatgcaccaaatggtatttctggaaattttcatgtctttaaataccccttggtaagttgcttctgaagccagtgggggctcctcagatagagaggttcccctttcaaatcccagtgccgctctgttctctttccttcccctcccactccccctcttcttcctctgtagagatgcaagaaattgctgtcccataaaaatcataattgcagtagctaaagctggggtcacttcgtgaattcaccagagactcaaagatcttttattggctctgggctgtgctcagtgtctttggcctcagagaacaacttgaatgacttcctggtttcctggcataaattattcctggtgagacatgtggcttaactcacaggtttcccatcagctttctccctaaaactatgttcatctgcctctctctgccagagaacatacagccgagaatactgccgaagctgagactgactactgtgcattaggaaagacctggagtcaggactttggtgggatttggagctccgaggcagtaataactgaacaagcagccctgtcccctaggctgcagaagcttgaatgcatcctctcccagaacctgccacaggaaactgggggctttgtcaggtcagcccaactgcatgcaaaagaccaccatcctcagaagccaagttgtcttttatgaagaggcaaggaaaggggaaacccacatgtgaccctgattttggtatggcttgatagagttccctgaaaactccttgtatgtgtgctaaaaccagggaagcatgtgactgccaagcaggcaacccctgatgatttgtaaagccaggtggcagggccttggggagccccagcacaatgatattgtgtggtcttccctcctgtggaatcgaggggaaattattcttcccaataccttgatttgattttcagtttcataagcttcttcctctgaatcttattgagggactatggtaccaagcaggtaggactgttcacctggtggaacagttcttgctctgccttctaggcttcatcccagaaatccagcctctttctggagaccccaaagctggagggagatgggctttcctctgggcctctctcctactttgccatccacactgctcctggctaaccccagcaataaccaacaaatggtaggaagccccatctattgctttttctcaattatgactgcatagtttgtggaaacaaagatcttgaggaagatgagggaagccctcccctcttcatagtccccatctcttctcctttgtacctgtcaacaccagagttcagtgtttaaacagacaaaatataaagtattgagtaggtggttcatatgccgaatccacttggtaggaagaaaccaccagctttatagtgtgcctgatagattttaaacattcctgggcacccactcaagagtgctctttttatcaccttctggaaatccgcaaagttgcaggggcctctggagtgtctcttctctagagagaattggtgggacccccctcagtgcagtggccccaactagtggagggagagaggacttaagtcagatggactcaacagaaatgggtttccagaagaataatgaaaagttgtgggtaggaaaatgaatcatttggactcttcaatgaaatggagtgagcccaggagagctcagccaacagaggcactctgggaacctgttagtaaagccaggctggccaaatgccatttgattttgaacctcgtaggtccccactcaccctctgccaggagctaagtaaggcaggagagctgacttgggactcctggctcggccccaacagggagcccccttcccaccatccctcggcaagctcaccacctcatccttctgccaaggcagctttcctttcttttgtgtgttttctgtgttcttagcctccaccctcctcctgccacccttgtggactaggaccaggtcctgaccccagtcagaaaatgatgatatgtacagtggcacaccttaaccagtcactaattttcactgttgtgaaagtgatttgatttagaattaaacaaatggttttacattactatga

SEQ ID NO: 446752 - DNA, 3040 bp, Homo sapiens
cagcgggagaggggcggctccgcgtcatgtgactggagtccgcgtaggaggggtcggaggtcttacccaacagattgacgcggcgttagtattggccgtgtacccgaaaaactgattgactgggctggcgttaactgtgcggaggcaggatttccctggggaaagtcttcactcagagcttcgctgacagccaaggatggcaagcaaggggccctcggcctctgcatctcctgagaactccagtgcaggggggcccagtgggagcagcaatggcgctggcgagagcggagggcaggacagcactttcgagtgcaacatctgcttggacacagccaaggatgccgtcatcagcctgtgtggccacctcttctgttggccgtgtttacatcagggatttcaaggatttggatttggagatggtggcttccagatgtcttttggaattggggcatttccctttgggatatttgccacagcatttaatataaatgatgggcggcctcctccagctgtccctgggacaccccagtatgtggacgagcagttcctgtcacgcctcttcctatttgtggccctggtgatcatgttctggctcctgattgcctaatgctgggctcctgcctacatccgtggcagggctctggactggtgacgtgccaccccaactcctggtgtttggcttcctggctaatcttgactcctggaatcagtgggatcagtaacacatcaaggagtcttgtttcttcatcagagctttggaactcgagaccagttggcgatgacccctgaatatcgccaccgctgtaaacactctataacttcaggccttggcattgagtcatctctcatgggtgacaccatgaaatcttgtttcagccagttctgcaggtcctgactctgcagagggaagaggcagaaagagagaaactgtcagagtataatttcacctgagtttaatattacagaaacaaagggatgcaccaaatggtatttctggaaattttcatgtctttaaataccccttggtaagttgcttctgaagccagtgggggctcctcagatagagaggttcccctttcaaatcccagtgccgctctgttctctttccttcccctcccactccccctcttcttcctctgtagagatgcaagaaattgctgtcccataaaaatcataattgcagtagctaaagctggggtcacttcgtgaattcaccagagactcaaagatcttttattggctctgggctgtgctcagtgtctttggcctcagagaacaacttgaatgacttcctggtttcctggcataaattattcctggtgagacatgtggcttaactcacaggtttcccatcagctttctccctaaaactatgttcatctgcctctctctgccagagaacatacagccgagaatactgccgaagctgagactgactactgtgcattaggaaagacctggagtcaggactttggtgggatttggagctccgaggcagtaataactgaacaagcagccctgtcccctaggctgcagaagcttgaatgcatcctctcccagaacctgccacaggaaactgggggctttgtcaggtcagcccaactgcatgcaaaagaccaccatcctcagaagccaagttgtcttttatgaagaggcaaggaaaggggaaacccacatgtgaccctgattttggtatggcttgatagagttccctgaaaactccttgtatgtgtgctaaaaccagggaagcatgtgactgccaagcaggcaacccctgatgatttgtaaagccaggtggcagggccttggggagccccagcacaatgatattgtgtggtcttccctcctgtggaatcgaggggaaattattcttcccaataccttgatttgattttcagtttcataagcttcttcctctgaatcttattgagggactatggtaccaagcaggtaggactgttcacctggtggaacagttcttgctctgccttctaggcttcatcccagaaatccagcctctttctggagaccccaaagctggagggagatgggctttcctctgggcctctctcctactttgccatccacactgctcctggctaaccccagcaataaccaacaaatggtaggaagccccatctattgctttttctcaattatgactgcatagtttgtggaaacaaagatcttgaggaagatgagggaagccctcccctcttcatagtccccatctcttctcctttgtacctgtcaacaccagagttcagtgtttaaacagacaaaatataaagtattgagtaggtggttcatatgccgaatccacttggtaggaagaaaccaccagctttatagtgtgcctgatagattttaaacattcctgggcacccactcaagagtgctctttttatcaccttctggaaatccgcaaagttgcaggggcctctggagtgtctcttctctagagagaattggtgggacccccctcagtgcagtggccccaactagtggagggagagaggacttaagtcagatggactcaacagaaatgggtttccagaagaataatgaaaagttgtgggtaggaaaatgaatcatttggactcttcaatgaaatggagtgagcccaggagagctcagccaacagaggcactctgggaacctgttagtaaagccaggctggccaaatgccatttgattttgaacctcgtaggtccccactcaccctctgccaggagctaagtaaggcaggagagctgacttgggactcctggctcggccccaacagggagcccccttcccaccatccctcggcaagctcaccacctcatccttctgccaaggcagctttcctttcttttgtgtgttttctgtgttcttagcctccaccctcctcctgccacccttgtggactaggaccaggtcctgaccccagtcagaaaatgatgatatgtacagtggcacaccttaaccagtcactaattttcactgttgtgaaagtgatttgatttagaattaaacaaatggttttacattactatga

SEQ ID NO: 446753 - DNA, 3021 bp, Homo sapiens
cagcgggagaggggcggctccgcgtcatgtgactggagtccgcgtaggaggggtcggaggtcttacccaacagattgacgcggcgttagtattggccgtgtacccgaaaaactgattgactgggctggcgttaactgtgcggaggcaggatttccctggggaaagtcttcactcagagcttcgctgacagccaaggatggcaagcaaggggccctcggcctctgcatctcctgagaactccagtgcaggggggcccagtgggagcagcaatggcgctggcgagagcggagggcaggacagcactttcgagtgcaacatctgcttggacacagccaaggatgccgtcatcagcctgtgtggccacctcttctgggatttcaaggatttggatttggagatggtggcttccagatgtcttttggaattggggcatttccctttgggatatttgccacagcatttaatataaatgatgggcggcctcctccagctgtccctgggacaccccagtatgtggacgagcagttcctgtcacgcctcttcctatttgtggccctggtgatcatgttctggctcctgattgcctaatgctgggctcctgcctacatccgtggcagggctctggactggtgacgtgccaccccaactcctggtgtttggcttcctggctaatcttgactcctggaatcagtgggatcagtaacacatcaaggagtcttgtttcttcatcagagctttggaactcgagaccagttggcgatgacccctgaatatcgccaccgctgtaaacactctataacttcaggccttggcattgagtcatctctcatgggtgacaccatgaaatcttgtttcagccagttctgcaggtcctgactctgcagagggaagaggcagaaagagagaaactgtcagagtataatttcacctgagtttaatattacagaaacaaagggatgcaccaaatggtatttctggaaattttcatgtctttaaataccccttggtaagttgcttctgaagccagtgggggctcctcagatagagaggttcccctttcaaatcccagtgccgctctgttctctttccttcccctcccactccccctcttcttcctctgtagagatgcaagaaattgctgtcccataaaaatcataattgcagtagctaaagctggggtcacttcgtgaattcaccagagactcaaagatcttttattggctctgggctgtgctcagtgtctttggcctcagagaacaacttgaatgacttcctggtttcctggcataaattattcctggtgagacatgtggcttaactcacaggtttcccatcagctttctccctaaaactatgttcatctgcctctctctgccagagaacatacagccgagaatactgccgaagctgagactgactactgtgcattaggaaagacctggagtcaggactttggtgggatttggagctccgaggcagtaataactgaacaagcagccctgtcccctaggctgcagaagcttgaatgcatcctctcccagaacctgccacaggaaactgggggctttgtcaggtcagcccaactgcatgcaaaagaccaccatcctcagaagccaagttgtcttttatgaagaggcaaggaaaggggaaacccacatgtgaccctgattttggtatggcttgatagagttccctgaaaactccttgtatgtgtgctaaaaccagggaagcatgtgactgccaagcaggcaacccctgatgatttgtaaagccaggtggcagggccttggggagccccagcacaatgatattgtgtggtcttccctcctgtggaatcgaggggaaattattcttcccaataccttgatttgattttcagtttcataagcttcttcctctgaatcttattgagggactatggtaccaagcaggtaggactgttcacctggtggaacagttcttgctctgccttctaggcttcatcccagaaatccagcctctttctggagaccccaaagctggagggagatgggctttcctctgggcctctctcctactttgccatccacactgctcctggctaaccccagcaataaccaacaaatggtaggaagccccatctattgctttttctcaattatgactgcatagtttgtggaaacaaagatcttgaggaagatgagggaagccctcccctcttcatagtccccatctcttctcctttgtacctgtcaacaccagagttcagtgtttaaacagacaaaatataaagtattgagtaggtggttcatatgccgaatccacttggtaggaagaaaccaccagctttatagtgtgcctgatagattttaaacattcctgggcacccactcaagagtgctctttttatcaccttctggaaatccgcaaagttgcaggggcctctggagtgtctcttctctagagagaattggtgggacccccctcagtgcagtggccccaactagtggagggagagaggacttaagtcagatggactcaacagaaatgggtttccagaagaataatgaaaagttgtgggtaggaaaatgaatcatttggactcttcaatgaaatggagtgagcccaggagagctcagccaacagaggcactctgggaacctgttagtaaagccaggctggccaaatgccatttgattttgaacctcgtaggtccccactcaccctctgccaggagctaagtaaggcaggagagctgacttgggactcctggctcggccccaacagggagcccccttcccaccatccctcggcaagctcaccacctcatccttctgccaaggcagctttcctttcttttgtgtgttttctgtgttcttagcctccaccctcctcctgccacccttgtggactaggaccaggtcctgaccccagtcagaaaatgatgatatgtacagtggcacaccttaaccagtcactaattttcactgttgtgaaagtgatttgatttagaattaaacaaatggttttacattactatga

SEQ ID NO: 446754 - DNA, 2797 bp, Homo sapiens
cagcgggagaggggcggctccgcgtcatgtgactggagtccgcgtaggaggggtcggaggtcttacccaacagattgacgcggcgttagtattggccgtgtacccgaaaaactgattgactgggctggcgttaactgtgcggaggcagggatttcaaggatttggatttggagatggtggcttccagatgtcttttggaattggggcatttccctttgggatatttgccacagcatttaatataaatgatgggcggcctcctccagctgtccctgggacaccccagtatgtggacgagcagttcctgtcacgcctcttcctatttgtggccctggtgatcatgttctggctcctgattgcctaatgctgggctcctgcctacatccgtggcagggctctggactggtgacgtgccaccccaactcctggtgtttggcttcctggctaatcttgactcctggaatcagtgggatcagtaacacatcaaggagtcttgtttcttcatcagagctttggaactcgagaccagttggcgatgacccctgaatatcgccaccgctgtaaacactctataacttcaggccttggcattgagtcatctctcatgggtgacaccatgaaatcttgtttcagccagttctgcaggtcctgactctgcagagggaagaggcagaaagagagaaactgtcagagtataatttcacctgagtttaatattacagaaacaaagggatgcaccaaatggtatttctggaaattttcatgtctttaaataccccttggtaagttgcttctgaagccagtgggggctcctcagatagagaggttcccctttcaaatcccagtgccgctctgttctctttccttcccctcccactccccctcttcttcctctgtagagatgcaagaaattgctgtcccataaaaatcataattgcagtagctaaagctggggtcacttcgtgaattcaccagagactcaaagatcttttattggctctgggctgtgctcagtgtctttggcctcagagaacaacttgaatgacttcctggtttcctggcataaattattcctggtgagacatgtggcttaactcacaggtttcccatcagctttctccctaaaactatgttcatctgcctctctctgccagagaacatacagccgagaatactgccgaagctgagactgactactgtgcattaggaaagacctggagtcaggactttggtgggatttggagctccgaggcagtaataactgaacaagcagccctgtcccctaggctgcagaagcttgaatgcatcctctcccagaacctgccacaggaaactgggggctttgtcaggtcagcccaactgcatgcaaaagaccaccatcctcagaagccaagttgtcttttatgaagaggcaaggaaaggggaaacccacatgtgaccctgattttggtatggcttgatagagttccctgaaaactccttgtatgtgtgctaaaaccagggaagcatgtgactgccaagcaggcaacccctgatgatttgtaaagccaggtggcagggccttggggagccccagcacaatgatattgtgtggtcttccctcctgtggaatcgaggggaaattattcttcccaataccttgatttgattttcagtttcataagcttcttcctctgaatcttattgagggactatggtaccaagcaggtaggactgttcacctggtggaacagttcttgctctgccttctaggcttcatcccagaaatccagcctctttctggagaccccaaagctggagggagatgggctttcctctgggcctctctcctactttgccatccacactgctcctggctaaccccagcaataaccaacaaatggtaggaagccccatctattgctttttctcaattatgactgcatagtttgtggaaacaaagatcttgaggaagatgagggaagccctcccctcttcatagtccccatctcttctcctttgtacctgtcaacaccagagttcagtgtttaaacagacaaaatataaagtattgagtaggtggttcatatgccgaatccacttggtaggaagaaaccaccagctttatagtgtgcctgatagattttaaacattcctgggcacccactcaagagtgctctttttatcaccttctggaaatccgcaaagttgcaggggcctctggagtgtctcttctctagagagaattggtgggacccccctcagtgcagtggccccaactagtggagggagagaggacttaagtcagatggactcaacagaaatgggtttccagaagaataatgaaaagttgtgggtaggaaaatgaatcatttggactcttcaatgaaatggagtgagcccaggagagctcagccaacagaggcactctgggaacctgttagtaaagccaggctggccaaatgccatttgattttgaacctcgtaggtccccactcaccctctgccaggagctaagtaaggcaggagagctgacttgggactcctggctcggccccaacagggagcccccttcccaccatccctcggcaagctcaccacctcatccttctgccaaggcagctttcctttcttttgtgtgttttctgtgttcttagcctccaccctcctcctgccacccttgtggactaggaccaggtcctgaccccagtcagaaaatgatgatatgtacagtggcacaccttaaccagtcactaattttcactgttgtgaaagtgatttgatttagaattaaacaaatggttttacattactatga

SEQ ID NO: 446755 - DNA, 2509 bp, Homo sapiens
cagcgggagaggggcggctccgcgtcatgtgactggagtccgcgtaggaggggtcggaggtcttacccaacagattgacgcggcgttagtattggccgtgtacccgaaaaactgattgagacgtgccaccccaactcctggtgtttggcttcctggctaatcttgactcctggaatcagtgggatcagtaacacatcaaggagtcttgtttcttcatcagagctttggaactcgagaccagttggcgatgacccctgaatatcgccaccgctgtaaacactctataacttcaggccttggcattgagtcatctctcatgggtgacaccatgaaatcttgtttcagccagttctgcaggtcctgactctgcagagggaagaggcagaaagagagaaactgtcagagtataatttcacctgagtttaatattacagaaacaaagggatgcaccaaatggtatttctggaaattttcatgtctttaaataccccttggtaagttgcttctgaagccagtgggggctcctcagatagagaggttcccctttcaaatcccagtgccgctctgttctctttccttcccctcccactccccctcttcttcctctgtagagatgcaagaaattgctgtcccataaaaatcataattgcagtagctaaagctggggtcacttcgtgaattcaccagagactcaaagatcttttattggctctgggctgtgctcagtgtctttggcctcagagaacaacttgaatgacttcctggtttcctggcataaattattcctggtgagacatgtggcttaactcacaggtttcccatcagctttctccctaaaactatgttcatctgcctctctctgccagagaacatacagccgagaatactgccgaagctgagactgactactgtgcattaggaaagacctggagtcaggactttggtgggatttggagctccgaggcagtaataactgaacaagcagccctgtcccctaggctgcagaagcttgaatgcatcctctcccagaacctgccacaggaaactgggggctttgtcaggtcagcccaactgcatgcaaaagaccaccatcctcagaagccaagttgtcttttatgaagaggcaaggaaaggggaaacccacatgtgaccctgattttggtatggcttgatagagttccctgaaaactccttgtatgtgtgctaaaaccagggaagcatgtgactgccaagcaggcaacccctgatgatttgtaaagccaggtggcagggccttggggagccccagcacaatgatattgtgtggtcttccctcctgtggaatcgaggggaaattattcttcccaataccttgatttgattttcagtttcataagcttcttcctctgaatcttattgagggactatggtaccaagcaggtaggactgttcacctggtggaacagttcttgctctgccttctaggcttcatcccagaaatccagcctctttctggagaccccaaagctggagggagatgggctttcctctgggcctctctcctactttgccatccacactgctcctggctaaccccagcaataaccaacaaatggtaggaagccccatctattgctttttctcaattatgactgcatagtttgtggaaacaaagatcttgaggaagatgagggaagccctcccctcttcatagtccccatctcttctcctttgtacctgtcaacaccagagttcagtgtttaaacagacaaaatataaagtattgagtaggtggttcatatgccgaatccacttggtaggaagaaaccaccagctttatagtgtgcctgatagattttaaacattcctgggcacccactcaagagtgctctttttatcaccttctggaaatccgcaaagttgcaggggcctctggagtgtctcttctctagagagaattggtgggacccccctcagtgcagtggccccaactagtggagggagagaggacttaagtcagatggactcaacagaaatgggtttccagaagaataatgaaaagttgtgggtaggaaaatgaatcatttggactcttcaatgaaatggagtgagcccaggagagctcagccaacagaggcactctgggaacctgttagtaaagccaggctggccaaatgccatttgattttgaacctcgtaggtccccactcaccctctgccaggagctaagtaaggcaggagagctgacttgggactcctggctcggccccaacagggagcccccttcccaccatccctcggcaagctcaccacctcatccttctgccaaggcagctttcctttcttttgtgtgttttctgtgttcttagcctccaccctcctcctgccacccttgtggactaggaccaggtcctgaccccagtcagaaaatgatgatatgtacagtggcacaccttaaccagtcactaattttcactgttgtgaaagtgatttgatttagaattaaacaaatggttttacattactatga

SEQ ID NO: 446756 - DNA, 2425 bp, Homo sapiens
cagcgggagaggggcggctccgcgtcatgtgactggagtccgcgtaggaggggtcggaggtcttacccaacagattgacgcggcgttagtattggccgtgtacccgaaaaactgattgactgggctggcgttaactgtgcggaggcagggatttcaaggatttggatttggagatggtggcttccagatgtcttttggaattggggcatttccctttgggatatttgccacagcatttaatataaatgatgggcggcctcctccagctgtccctgggacaccccagtatgtggacgagcagttcctgtcacgcctcttcctatttgtggccctggtgatcatgttctggctcctgattgcctaatgctgggctcctgcctacatccgtggcagggctctggactggtgacgtgccaccccaactcctggtgtttggcttcctggctaatcttgactcctggaatcagtgggatcagtaacacatcaaggagtcttgtttcttcatcagagctttggaactcgagaccagttggcgatgacccctgaatatcgccaccgctgtaaacactctataacttcaggccttggcattgagtcatctctcatgggtgacaccatgaaatcttgtttcagccagttctgcaggtcctgactctgcagagggaagaggcagaaagagagaaactgtcagagtataatttcacctgagtttaatattacagaaacaaagggatgcaccaaatggtatttctggaaattttcatgtctttaaataccccttgagaacatacagccgagaatactgccgaagctgagactgactactgtgcattaggaaagacctggagtcaggactttggtgggatttggagctccgaggcagtaataactgaacaagcagccctgtcccctaggctgcagaagcttgaatgcatcctctcccagaacctgccacaggaaactgggggctttgtcaggtcagcccaactgcatgcaaaagaccaccatcctcagaagccaagttgtcttttatgaagaggcaaggaaaggggaaacccacatgtgaccctgattttggtatggcttgatagagttccctgaaaactccttgtatgtgtgctaaaaccagggaagcatgtgactgccaagcaggcaacccctgatgatttgtaaagccaggtggcagggccttggggagccccagcacaatgatattgtgtggtcttccctcctgtggaatcgaggggaaattattcttcccaataccttgatttgattttcagtttcataagcttcttcctctgaatcttattgagggactatggtaccaagcaggtaggactgttcacctggtggaacagttcttgctctgccttctaggcttcatcccagaaatccagcctctttctggagaccccaaagctggagggagatgggctttcctctgggcctctctcctactttgccatccacactgctcctggctaaccccagcaataaccaacaaatggtaggaagccccatctattgctttttctcaattatgactgcatagtttgtggaaacaaagatcttgaggaagatgagggaagccctcccctcttcatagtccccatctcttctcctttgtacctgtcaacaccagagttcagtgtttaaacagacaaaatataaagtattgagtaggtggttcatatgccgaatccacttggtaggaagaaaccaccagctttatagtgtgcctgatagattttaaacattcctgggcacccactcaagagtgctctttttatcaccttctggaaatccgcaaagttgcaggggcctctggagtgtctcttctctagagagaattggtgggacccccctcagtgcagtggccccaactagtggagggagagaggacttaagtcagatggactcaacagaaatgggtttccagaagaataatgaaaagttgtgggtaggaaaatgaatcatttggactcttcaatgaaatggagtgagcccaggagagctcagccaacagaggcactctgggaacctgttagtaaagccaggctggccaaatgccatttgattttgaacctcgtaggtccccactcaccctctgccaggagctaagtaaggcaggagagctgacttgggactcctggctcggccccaacagggagcccccttcccaccatccctcggcaagctcaccacctcatccttctgccaaggcagctttcctttcttttgtgtgttttctgtgttcttagcctccaccctcctcctgccacccttgtggactaggaccaggtcctgaccccagtcagaaaatgatgatatgtacagtggcacaccttaaccagtcactaattttcactgttgtgaaagtgatttgatttagaattaaacaaatggttttacattactatga

SEQ ID NO: 446757 - DNA, 2113 bp, Homo sapiens
cagcgggagaggggcggctccgcgtcatgtgactggagtccgcgtaggaggggtcggaggtcttacccaacagattgacgcggcgttagtattggccgtgtacccgaaaaactgattgactgggctggcgttaactgtgcggaggcaggatttccctggggaaagtcttcactcagagcttcgctgacagccaaggatggcaagcaaggggccctcggcctctgcatctcctgagaactccagtgcaggggggcccagtgggagcagcaatggcgctggcgagagcggagggcaggacagcactttcgagtgcaacatctgcttggacacagccaaggatgccgtcatcagcctgtgtggccacctcttctgttggccgtgtttacatcagtggttggagaccagacctaacagacaggtgtgtcctgtttgcaaagctggcatcagccgagacaaggtcatccccctctatggaaggggcagcactgggcaacaggaccccagagagaagacccctcctcgtcctcaaggacagaggccagagccggagaatagagggggatttcaaggatttggatttggagatggtggcttccagatgtcttttggaattggggcatttccctttgggatatttgccacagcatttaatataaatgatgggcggcctcctccagctgtccctgggacaccccagtatgtggacgagcagttcctgtcacgcctcttcctatttgtggccctggtgatcatgttctggctcctgattgcctaatgctgggctcctgcctacatccgtggcagggctctggactggtgacgtgccaccccaactcctggtgtttggcttcctggctaatcttgactcctggaatcagtgggatcagtaacacatcaaggagtcttgtttcttcatcagagctttggaactcgagaccagttggcgatgacccctgaatatcgccaccgctgtaaacactctataacttcaggccttggcattgagtcatctctcatgggtgacaccatgaaatcttgtttcagccagttctgcaggtcctgactctgcagagggaagaggcagaaagagagaaactgtcagagtataatttcacctgagtttaatattacagaaacaaagggatgcaccaaatggtatttctggaaattttcatgtctttaaataccccttggtaagttgcttctgaagccagtgggggctcctcagatagagaggttcccctttcaaatcccagtgccgctctgttctctttccttccccctcccctcttcatagtccccatctcttctcctttgtacctgtcaacaccagagttcagtgtttaaacagacaaaatataaagtattgagtaggtggttcatatgccgaatccacttggtaggaagaaaccaccagctttatagtgtgcctgatagattttaaacattcctgggcacccactcaagagtgctctttttatcaccttctggaaatccgcaaagttgcaggggcctctggagtgtctcttctctagagagaattggtgggacccccctcagtgcagtggccccaactagtggagggagagaggacttaagtcagatggactcaacagaaatgggtttccagaagaataatgaaaagttgtgggtaggaaaatgaatcatttggactcttcaatgaaatggagtgagcccaggagagctcagccaacagaggcactctgggaacctgttagtaaagccaggctggccaaatgccatttgattttgaacctcgtaggtccccactcaccctctgccaggagctaagtaaggcaggagagctgacttgggactcctggctcggccccaacagggagcccccttcccaccatccctcggcaagctcaccacctcatccttctgccaaggcagctttcctttcttttgtgtgttttctgtgttcttagcctccaccctcctcctgccacccttgtggactaggaccaggtcctgaccccagtcagaaaatgatgatatgtacagtggcacaccttaaccagtcactaattttcactgttgtgaaagtgatttgatttagaattaaacaaatggttttacattactatga

SEQ ID NO: 446758 - DNA, 2926 bp, Homo sapiens
cagcgggagaggggcggctccgcgtcatgtgactggagtccgcgtaggaggggtcggaggtcttacccaacagattgacgcggcgttagtattggccgtgtacccgaaaaactgattgactgggctggcgttaactgtgcggaggcaggatttccctggggaaagtcttcactcagagcttcgctgacagccaaggatggcaagcaaggggccctcggcctctgcatctcctgagaactccagtgcaggggggcccagtgggagcagcaatggcgctggcgagagcggagggcaggacagcactttcgagtgcaacatctgcttggacacagccaaggatgccgtcatcagcctgtgtggccacctcttctgttggccgtgtttacatcagtggttggagaccagacctaacagacaggtgtgtcctgtttgcaaagctggcatcagccgagacaaggtcatccccctctatggaaggggcagcactgggcaacaggaccccagagagaagacccctcctcgtcctcaaggacagaggccagagccggagaatagagggggatttcaaggatttggatttggagatggtggcttccagatgtcttttggaattggggcatttccctttgggatatttgccacagcatttaatataaatgatgggcggcctcctccagctgtccctgggacaccccagtatgtggacgagcagttcctgtcacgcctcttcctatttgtggccctggtgatcatgttctggctcctgattgcctaatgctgggctcctgcctacatccgtggcagggctctggactggtgacgtgccaccccaactcctggtgtttggcttcctggctaatcttgactcctggaatcagtgggatcagtaacacatcaaggagtcttgtttcttcatcagagctttggaactcgagaccagttggcgatgacccctgaatatcgccaccgctgtaaacactctataacttcaggccttggcattgagtcatctctcatgggtgacaccatgaaatcttgtttcagccagttctgcaggtcctgactctgcagagggaagaggcagaaagagagaaactgtcagagtataatttcacctgagtttaatattacagaaacaaagggatgcaccaaatggtatttctggaaattttcatgtctttaaataccccttggtaagttgcttctgaagccagtgggggctcctcagatagagaggttcccctttcaaatcccagtgccgctctgttctctttccttcccctcccactccccctcttcttcctctgtagagatgcaagaaattgctgtcccataaaaatcataattgcagtagctaaagctggggtcacttcgtgaattcaccagagactcaaagatcttttattggctctgggctgtgctcagtgtctttggcctcagagaacaacttgaatgacttcctggtttcctggcataaattattcctggtgagacatgtggcttaactcacaggtttcccatcagctttctccctaaaactatgttcatctgcctctctctgccagagaacatacagccgagaatactgccgaagctgagactgactactgtgcattaggaaagacctggagtcaggactttggtgggatttggagctccgaggcagtaataactgaacaagcagccctgtcccctaggctgcagaagcttgaatgcatcctctcccagaacctgccacaggaaactgggggctttgtcaggtcagcccaactgcatgcaaaagaccaccatcctcagaagccaagttgtcttttatgaagaggcaaggaaaggggaaacccacatgtgaccctgattttggtatggcttgatagagttccctgaaaactccttgtatgtgtgctaaaaccagggaagcatgtgactgccaagcaggcaacccctgatgatttgtaaagccaggtggcagggccttggggagccccagcacaatgatattgtgtggtcttccctcctgtggaatcgaggggaaattattcttcccaataccttgatttgattttcagtttcataagcttcttcctctgaatcttattgagggactatggtaccaagcaggtaggactgttcacctggtggaacagttcttgctctgccttctaggcttcatcccagaaatccagcctctttctggagaccccaaagctggagggagatgggctttcctctgggcctctctcctactttgccatccacactgctcctggctaaccccagcaataaccaacaaatggtaggaagccccatctattgctttttctcaattatgactgcatagtttgtggaaacaaagatcttgaggaagatgagggaagccctcccctcttcatagtccccatctcttctcctttgtacctgtcaacaccagagttcagtgtttaaacagacaaaatataaagtattgagtaggtggttcatatgccgaatccacttggtaggaagaaaccaccagctttatagtgtgcctgatagattttaaacattcctgggcacccactcaagagtgctctttttatcaccttctggaaatccgcaaagttgcaggggcctctggagtgtctcttctctagagagaattggtgggacccccctcagtgcagtggccccaaagggagcccccttcccaccatccctcggcaagctcaccacctcatccttctgccaaggcagctttcctttcttttgtgtgttttctgtgttcttagcctccaccctcctcctgccacccttgtggactaggaccaggtcctgaccccagtcagaaaatgatgatatgtacagtggcacaccttaaccagtcactaattttcactgttgtgaaagtgatttgatttagaattaaacaaatggttttacattactatga

SEQ ID NO: 446759 - DNA, 1068 bp, Homo sapiens
cagcgggagaggggcggctccgcgtcatgtgactggagtccgcgtaggaggggtcggaggtcttacccaacagattgacgcggcgttagtattggccgtgtacccgaaaaactgattgactgggctggcgttaactgtgcggaggcaggatttccctggggaaagtcttcactcagagcttcgctgacagccaaggatggcaagcaaggggccctcggcctctgcatctcctgagaactccagtgcaggggggcccagtgggagcagcaatggcgctggcgagagcggagggcaggacagcactttcgagtgcaacatctgcttggacacagccaaggatgccgtcatcagcctgtgtggccacctcttctgttggccgtgtttacatcagtggttggagaccagacctaacagacaggtgtgtcctgtttgcaaagctggcatcagccgagacaaggtcatccccctctatggaaggggcagcactgggcaacaggaccccagagagaagacccctcctcgtcctcaaggacagaggccagagccggagaatagagggggatttcaaggatttggatttggagatggtggcttccagatgtcttttggaattggggcatttccctttgggatatttgccacagcatttaatataaatgatgggcggcctcctccagctgtccctgggacaccccagtatgtggacgagcagttcctgtcacgcctcttcctatttgtggccctggtgatcatgttctggctcctgattgcctaatgctgggctcctgcctacatccgtggcagggctctggactggtgccatttgattttgaacctcgtaggtccccactcaccctctgccaggagctaagtaaggcaggagagctgacttgggactcctggctcggccccaacagggagcccccttcccaccatccctcggcaagctcaccaccccagtcagaaaatgatgatatgtacagtggcacaccttaaccagtcactaattttcactgttgtgaaagtgatttgatttagaattaaacaaatggttttacattactatga

SEQ ID NO: 446760 - DNA, 534 bp, Homo sapiens
ggagcagtttggaccaggttttctgatgtcatctccccagcctccggatcatcacaaaccatgtcatctccctgggcctccagctcaggatctttcacttcaaattctttctgggtactggttccttcagttgctacatttttacttttcttcaacttgatctttttctttggtgagctagactttccctcctcctcctcctcttcttctgaaacagcttgtgcctttctcttgggtgcttcctttgagaagagactggagggattcttggcaggggagaccaactggtaatctgtcaattcctcaaagctcaccacctcatccttctgccaaggcagctttcctttcttttgtgtgttttctgtgttcttagcctccaccctcctcctgccacccttgtggactaggaccaggtcctgaccccagtcagaaaatgatgatatgtacagtggcacaccttaaccagtcactaattttcactgttgtgaaagtgatttgatttagaattaaacaaatggttttacattactatga

SEQ ID NO: 446761 - DNA, 945 bp, Homo sapiens
cagcgggagaggggcggctccgcgtcatgtgactggagtccgcgtaggaggggtcggaggtcttacccaacagattgacgcggcgttagtattggccgtgtacccgaaaaactgattgactgggctggcgttaactgtgcggaggcagaatctcgctctgtcgcccaggctggagtgcagtgggctcgctgcagcctctccctcccaggttcaagcaattctcctgtgtcagactcccagctgctccaaatcctgggctcaagcaatcttcctgcctcagcctcccaaagtgctaggaatgcaggatttccctggggaaagtcttcactcagagcttcgctgacagccaaggatggcaagcaaggggccctcggcctctgcatctcctgagaactccagtgcaggggggcccagtgggagcagcaatggcgctggcgagagcggagggcaggacagcactttcgagtgcaacatctgcttggacacagccaaggatgccgtcatcagcctgtgtggccacctcttctgttggccgtgtttacatcagtggttggagaccagacctaacagacaggtgtgtcctgtttgcaaagctggcatcagccgagacaaggtcatccccctctatggaaggggcagcactgggcaacaggaccccagagagaagacccctcctcgtcctcaaggacagaggccagagccggagaatagagggggatttcaaggatttggatttggagatggtggcttccagatgtcttttgtgtgttttctgtgttcttagcctccaccctcctcctgccacccttgtggactaggaccaggtcctgaccccagtcagaaaatgatgatatgtacagtggcacaccttaaccagtcactaattttcactgttgtgaaagtgatttgatttagaattaaacaaatggttttacattactatga

SEQ ID NO: 446762 - DNA, 453 bp, Homo sapiens
cgtcatcagcctgtgtggccacctcttctggtcagtacccctacttccaccccagagagcacattgccaagtttggaaagcctgtggccctgggtggtttggagcagaatgcttcctgctcactttgggaatacactcaggctcaagggacaagagacctgagttcccatcccagctctgctaccaatgagctggatgaccttgggcaaatcctgtctccactctaagctcgttctccccatctctaaagtaataatacttaccatttagtgagcacttactacctgctacttgctgtgctgagcctagaggcagtatagcataatggttataagcaaggactgtggaactgggcttcctccttttgaagcttgactctgccaccttcctgtttgaccttggacaaggtacttacacacattctgcctcattttacagggtcgtttgcaagca

SEQ ID NO: 446763 - DNA, 795 bp, Homo sapiens
cagcgggagaggggcggctccgcgtcatgtgactggagtccgcgtaggaggggtcggaggtcttacccaacagattgacgcggcgttagtattggccgtgtacccgaaaaactgattgactgggctggcgttaactgtgcggaggcagaactttattgtttgtcctgtagaaagtcccacattctggatttggctgatgacatcttcatggagtcgtttaatacttgcacctatcctccatattttctgtaaataggatttccctggggaaagtcttcactcagagcttcgctgacagccaaggatggcaagcaaggggccctcggcctctgcatctcctgagaactccagtgcaggggggcccagtgggagcagcaatggcgctggcgagagcggagggcaggacagcactttcgagtgcaacatctgcttggacacagccaaggatgccgtcatcagcctgtgtggccacctcttctgttggccgtgtttacatcagtggttggagaccagacctaacagacaggtgtgtcctgtttgcaaagctggcatcagccgagacaaggtcatccccctctatggaaggggcagcactgggcaacaggaccccagagagaagacccctcctcgtcctcaaggacagaggccagagccggagaatagaggggtgaggaacattctaggagaagcttctacaaatgagctgatggctttagaagtttccttcttagccttacaatttttctccttgattataaaagtaaaggaaaacttgtaaaatacagaaaggaaaag

SEQ ID NO: 446764 - DNA, 3364 bp, Homo sapiens
cagcgggagaggggcggctccgcgtcatgtgactggagtccgcgtaggaggggtcggaggtcttacccaacagattgacgcggcgttagtattggccgtgtacccgaaaaactgattgactgggctggcgttaactgtgcggaggcagaatctcgctctgtcgcccaggctggagtgcagtgggctcgctgcagcctctccctcccaggttcaagcaattctcctgtgtcagactcccagctgctccaaatcctgggctcaagcaatcttcctgcctcagcctcccaaagtgctaggaatgcaggatttccctggggaaagtcttcactcagagcttcgctgacagccaaggatggcaagcaaggggccctcggcctctgcatctcctgagaactccagtgcaggggggcccagtgggagcagcaatggcgctggcgagagcggagggcaggacagcactttcgagtgcaacatctgcttggacacagccaaggatgccgtcatcagcctgtgtggccacctcttctgttggccgtgtttacatcagtggttggagaccagacctaacagacaggtgtgtcctgtttgcaaagctggcatcagccgagacaaggtcatccccctctatggaaggggcagcactgggcaacaggaccccagagagaagacccctcctcgtcctcaaggacagaggccagagccggagaatagagggggatttcaaggatttggatttggagatggtggcttccagatgtcttttggaattggggcatttccctttgggatatttgccacagcatttaatataaatgatgggcggcctcctccagctgtccctgggacaccccagtatgtggacgagcagttcctgtcacgcctcttcctatttgtggccctggtgatcatgttctggctcctgattgcctaatgctgggctcctgcctacatccgtggcagggctctggactggtgacgtgccaccccaactcctggtgtttggcttcctggctaatcttgactcctggaatcagtgggatcagtaacacatcaaggagtcttgtttcttcatcagagctttggaactcgagaccagttggcgatgacccctgaatatcgccaccgctgtaaacactctataacttcaggccttggcattgagtcatctctcatgggtgacaccatgaaatcttgtttcagccagttctgcaggtcctgactctgcagagggaagaggcagaaagagagaaactgtcagagtataatttcacctgagtttaatattacagaaacaaagggatgcaccaaatggtatttctggaaattttcatgtctttaaataccccttggtaagttgcttctgaagccagtgggggctcctcagatagagaggttcccctttcaaatcccagtgccgctctgttctctttccttcccctcccactccccctcttcttcctctgtagagatgcaagaaattgctgtcccataaaaatcataattgcagtagctaaagctggggtcacttcgtgaattcaccagagactcaaagatcttttattggctctgggctgtgctcagtgtctttggcctcagagaacaacttgaatgacttcctggtttcctggcataaattattcctggtgagacatgtggcttaactcacaggtttcccatcagctttctccctaaaactatgttcatctgcctctctctgccagagaacatacagccgagaatactgccgaagctgagactgactactgtgcattaggaaagacctggagtcaggactttggtgggatttggagctccgaggcagtaataactgaacaagcagccctgtcccctaggctgcagaagcttgaatgcatcctctcccagaacctgccacaggaaactgggggctttgtcaggtcagcccaactgcatgcaaaagaccaccatcctcagaagccaagttgtcttttatgaagaggcaaggaaaggggaaacccacatgtgaccctgattttggtatggcttgatagagttccctgaaaactccttgtatgtgtgctaaaaccagggaagcatgtgactgccaagcaggcaacccctgatgatttgtaaagccaggtggcagggccttggggagccccagcacaatgatattgtgtggtcttccctcctgtggaatcgaggggaaattattcttcccaataccttgatttgattttcagtttcataagcttcttcctctgaatcttattgagggactatggtaccaagcaggtaggactgttcacctggtggaacagttcttgctctgccttctaggcttcatcccagaaatccagcctctttctggagaccccaaagctggagggagatgggctttcctctgggcctctctcctactttgccatccacactgctcctggctaaccccagcaataaccaacaaatggtaggaagccccatctattgctttttctcaattatgactgcatagtttgtggaaacaaagatcttgaggaagatgagggaagccctcccctcttcatagtccccatctcttctcctttgtacctgtcaacaccagagttcagtgtttaaacagacaaaatataaagtattgagtaggtggttcatatgccgaatccacttggtaggaagaaaccaccagctttatagtgtgcctgatagattttaaacattcctgggcacccactcaagagtgctctttttatcaccttctggaaatccgcaaagttgcaggggcctctggagtgtctcttctctagagagaattggtgggacccccctcagtgcagtggccccaactagtggagggagagaggacttaagtcagatggactcaacagaaatgggtttccagaagaataatgaaaagttgtgggtaggaaaatgaatcatttggactcttcaatgaaatggagtgagcccaggagagctcagccaacagaggcactctgggaacctgttagtaaagccaggctggccaaatgccatttgattttgaacctcgtaggtccccactcaccctctgccaggagctaagtaaggcaggagagctgacttgggactcctggctcggccccaacagggagcccccttcccaccatccctcggcaagctcaccacctcatccttctgccaaggcagctttcctttcttttgtgtgttttctgtgttcttagcctccaccctcctcctgccacccttgtggactaggaccaggtcctgaccccagtcagaaaatgatgatatgtacagtggcacaccttaaccagtcactaattttcactgttgtgaaagtgatttgatttagaattaaacaaatggttttacattactatga

SEQ ID NO: 446765 - DNA, 3420 bp, Homo sapiens
cagcgggagaggggcggctccgcgtcatgtgactggagtccgcgtaggaggggtcggaggtcttacccaacagattgacgcggcgttagtattggccgtgtacccgaaaaactgattgactgggctggcgttaactgtgcggaggcaggatttccctggggaaagtcttcactcagagcttcgctgacagccaaggatggcaagcaaggggccctcggcctctgcatctcctgagaactccagtgcaggggggcccagtgggagcagcaatggcgctggcgagagcggagggcaggacagcactttcgagtgcaacatctgcttggacacagccaaggatgccgtcatcagcctgtgtggccacctcttctgttggccgtgtttacatcagtggttggagaccagacctaacagacaggtgtgtcctgtttgcaaagctggcatcagccgagacaaggtcatccccctctatggaaggggcagcactgggcaacaggaccccagagagaagacccctcctcgtcctcaaggacagaggccagagccggagaatagagggggatttcaaggatttggatttggagatggtggcttccagatgtcttttggaattggggcatttccctttgggatatttgccacagcatttaatataaatgatgggcggcctcctccagctgtccctgggacaccccagtatgtggacgagcagttcctgtcacgcctcttcctatttgtggccctggtgatcatgttctggctcctgattgcctaatgctgggctcctgcctacatccgtggcagggctctggactggtgacgtgccaccccaactcctggtgtttggcttcctggctaatcttgactcctggaatcagtgggatcagtaacacatcaaggagtcttgtttcttcatcagagctttggaactcgagaccagttggcgatgacccctgaatatcgccaccgctgtaaacactctataacttcaggccttggcattgagtcatctctcatgggtgacaccatgaaatcttgtttcagccagttctgcaggtcctgactctgcagagggaagaggcagaaagagagaaactgtcagagtataatttcacctgagtttaatattacagaaacaaagggatgcaccaaatggtatttctggaaattttcatgtctttaaataccccttggtaagttgcttctgaagccagtgggggctcctcagatagagaggttcccctttcaaatcccagtgccgctctgttctctttccttcccctcccactccccctcttcttcctctgtagagatgcaagaaattgctgtcccataaaaatcataattgcagtagctaaagctggggtcacttcgtgaattcaccagagactcaaagatcttttattggctctgggctgtgctcagtgtctttggcctcagagaacaacttgaatgacttcctggtttcctggcataaattattcctggtgagacatgtggcttaactcacaggtttcccatcagctttctccctaaaactatgttcatctgcctctctctgccagagaacatacagccgagaatactgccgaagctgagactgactactgtgcattaggaaagacctggagtcaggactttggtgggatttggagctccgaggcagtaataactgaacaagcagccctgtcccctaggctgcagaagcttgaatgcatcctctcccagaacctgccacaggaaactgggggctttgtcaggtcagcccaactgcatgcaaaagaccaccatcctcagaagccaagttgtcttttatgaagaggcaaggaaaggggaaacccacatgtgaccctgattttggtatggcttgatagagttccctgaaaactccttgtatgtgtgctaaaaccagggaagcatgtgactgccaagcaggcaacccctgatgatttgtaaagccaggtggcagggccttggggagccccagcacaatgatattgtgtggtcttccctcctgtggaatcgaggggaaattattcttcccaataccttgatttgattttcagtttcataagcttcttcctctgaatcttattgagggactatggtaccaagcaggtaggactgttcacctggtggaacagttcttgctctgccttctaggcttcatcccagaaatccagcctctttctggagaccccaaagctggagggagatgggctttcctctgggcctctctcctactttgccatccacactgctcctggctaaccccagcaataaccaacaaatggtaggaagccccatctattgctttttctcaattatgactgcatagtttgtggaaacaaagatcttgaggaagatgagggaagccctcccctcttcatagtccccatctcttctcctttgtacctgtcaacaccagagttcagtgtttaaacagacaaaatataaagtattgagtaggtggttcatatgccgaatccacttggtaggaagaaaccaccagctttatagtgtgcctgatagattttaaacattcctgggcacccactcaagagtgctctttttatcaccttctggaaatccgcaaagttgcaggggcctctggagtgtctcttctctagagagaattggtgggacccccctcagtgcagtggccccaactagtggagggagagaggacttaagtcagatggactcaacagaaatgggtttccagaagaataatgaaaagttgtgggtaggaaaatgaatcatttggactcttcaatgaaatggagtgagcccaggagagctcagccaacagaggcactctgggaacctgttagtaaagccaggctggccaaatgccatttgattttgaacctcgtaggtccccactcaccctctgccaggagctaagtaaggcaggagagctgacttgggactcctggctcggccccaacagggagcccccttcccaccatccctcggcaagctcaccacctcatccttctgccaaggcagctttcctttcttttgtgtgttttctgtgttcttagcctccaccctcctcctgccacccttgtggactaggaccaggtcctgaccccagtcagaaaatgatgatatgtacagtggcacaccttaaccagtcactaattttcactgttgtgaaagtgatttgatttagaattaaacaaatggttttacattactatgaaaaaacaaaaaaaaaagacaacaactgtggggggccagattaggaccgcgaaaaaactctttcaacacaatagcgttgggaggcggggcccaagtaggataaggacacaggcgccaacgacggtcccagggcactcggcgacgaagacaagagggggagtcctcaccaataaagaagcccggagaaacaacagggctgaaaaacagaagagg

SEQ ID NO: 446766 - DNA, 1620 bp, Homo sapiens
cagcgggagaggggcggctccgcgtcatgtgactggagtccgcgtaggaggggtcggaggtcttacccaacagattgacgcggcgttagtattggccgtgtacccgaaaaactgattgactgggctggcgttaactgtgcggaggcaggatttccctggggaaagtcttcactcagagcttcgctgacagccaaggatggcaagcaaggggccctcggcctctgcatctcctgagaactccagtgcaggggggcccagtgggagcagcaatggcgctggcgagagcggagggcaggacagcactttcgagtgcaacatctgcttggacacagccaaggatgccgtcatcagcctgtgtggccacctcttctgttggccgtgtttacatcagtggttggagaccagacctaacagacaggtgtgtcctgtttgcaaagctggcatcagccgagacaaggtcatccccctctatggaaggggcagcactgggcaacaggaccccagagagaagacccctcctcgtcctcaaggacagaggccagagccggagaatagagggggatttcaaggatttggatttggagatggtggcttccagatgtcttttggaattggggcatttccctttgggatatttgccacagcatttaatataaatgatgggcggcctcctccagctgtccctgggacaccccagtatgtggacgagcagttcctgtcacgcctcttcctatttgtggccctggtgatcatgttctggctcctgattgcctaatgctgggctcctgcctacatccgtggcagggctctggactggtgacgtgccaccccaactcctggtgtttggcttcctggctaatcttgactcctggaatcagtgggatcagtaacacatcaaggagtcttgtttcttcatcagagctttggaactcgagaccagttggcgatgacccctgaatatcgccaccgctgtaaacactctataacttcaggccttggcattgagtcatctctcatgggtgacaccatgaaatcttgtttcagccagttctgcaggtcctgactctgcagagggaagaggcagaaagagagaaactgtcagagtataatttcacctgagtttaatattacagaaacaaagggatgcaccaaatggtatttctggaaattttcatgtctttaaataccccttggtaagttgcttctgaagccagtgggggctcctcagatagagaggttcccctttcaaatcccagtgccgctctgttctctttccttcccctcccactccccctcttcttccctctgccaggagctaagtaaggcaggagagctgacttgggactcctggctcggccccaacagggagcccccttcccaccatccctcggcaagctcaccacctcatccttctgccaaggcagctttcctttcttttgtgtgttttctgtgttcttagcctccaccctcctcctgccacccttgtggactaggaccaggtcctgaccccagtcagaaaatgatgatatgtacagtggcacaccttaaccagtcactaattttcactgttgtgaaagtgatttgatttagaattaaacaaatggttttacattactatga

SEQ ID NO: 446767 - DNA, 932 bp, Homo sapiens
cagcgggagaggggcggctccgcgtcatgtgactggagtccgcgtaggaggggtcggaggtcttacccaacagattgacgcggcgttagtattggccgtgtacccgaaaaactgattgactgggctggcgttaactgtgcggaggcaggatttccctggggaaagtcttcactcagagcttcgctgacagccaaggatggcaagcaaggggccctcggcctctgcatctcctgagaactccagtgcaggggggcccagtgggagcagcaatggcgctggcgagagcggagggcaggacagcactttcgagtgcaacatctgcttggacacagccaaggatgccgtcatcagcctgtgtggccacctcttctgttggccgtgtttacatcagtggttggagaccagacctaacagacaggtgtgtcctgtttgcaaagctggcatcagccgagacaaggtcatccccctctatggaaggggcagcactgggcaacaggaccccagagagaagacccctcctcgtcctcaaggacagaggccagagccggagaatagagggggatttcaaggatttggatttggagatggtggcttccagatgtcttttggaattggggcatttccctttgggatatttgccacagcatttaatataaatgatgggcggcctcctccagctgtccctgggacaccccagtatgtggacgagcagttcctgtcacgcctcttcctatttgtggccctggtgatcatgttctggctcctgattgcctaatgctgggctcctgccacccttgtggactaggaccaggtcctgaccccagtcagaaaatgatgatatgtacagtggcacaccttaaccagtcactaattttcactgttgtgaaagtgatttgatttagaattaaacaaatggttttacattactatga

SEQ ID NO: 446768 - DNA, 3764 bp, Homo sapiens
ccgtttcctcccctcccctccactcggccgtccctccttcctcctccctcctccctcctcctcccgctcctgaagagcgcgccgcgtgggggacggcccggttacttcctccagagactgacgagtgcggtgtcgctccagctcagagctcccggagccgcccggccagcgtccggcctccctgatcgtctctggccggcgccctcgccctcgcccggcgcgcaccgagcagccgcgggcgccgagcagccaccgtcccgaccaagcgccggccctgcccgcagcggcaggatgaatgatttcggaatcaagaatatggaccaggtagcccctgtggctaacagttacagagggacactcaagcgccagccagcctttgacacctttgatgggtccctgtttgctgtttttccttctctaaatgaagagcaaacactgcaagaagtgccaacaggcttggattccatttctcatgactccgccaactgtgaattgcctttgttaaccccgtgcagcaaggctgtgatgagtcaagccttaaaagctaccttcagtggcttcaaaaaggaacagcggcgcctgggcattccaaagaacccctggctgtggagtgagcaacaggtatgccagtggcttctctgggccaccaatgagttcagtctggtgaacgtgaatctgcagaggttcggcatgaatggccagatgctgtgtaaccttggcaaggaacgctttctggagctggcacctgactttgtgggtgacattctctgggaacatctggagcaaatgatcaaagaaaaccaagaaaagacagaagatcaatatgaagaaaattcacacctcacctccgttcctcattggattaacagcaatacattaggttttggcacagagcaggcgccctatggaatgcagacacagaattaccccaaaggcggcctcctggacagcatgtgtccggcctccacacccagcgtactcagctctgagcaggagtttcagatgttccccaagtctcggctcagctccgtcagcgtcacctactgctctgtcagtcaggacttcccaggcagcaacttgaatttgctcaccaacaattctgggacgcccaaagaccacgactcccctgagaacggtgcggacagcttcgagagctcagactccctcctccagtcctggaacagccagtcgtccttgctggatgtgcaacgggttccttccttcgagagcttcgaagatgactgcagccagtctctctgcctcaataagccaaccatgtctttcaaggattacatccaagagaggagtgacccggtggagcaaggcaaaccagttatacctgcagctgtgctggccggcttcacaggaagtggacctattcagctgtggcagtttctcctggagctgctatcagacaaatcctgccagtcattcatcagctggactggagacggatgggagtttaagctcgccgaccccgatgaggtggcccgccggtggggaaagaggaaaaataagcccaagatgaactacgagaagctgagccggggcttacgctactattacgacaagaacatcatccacaagacgtcggggaagcgctacgtgtaccgcttcgtgtgcgacctccagaacttgctggggttcacgcccgaggaactgcacgccatcctgggcgtccagcccgacacggaggactgaggtcgccgggaccaccctgagccggccccaggctcgtggactgagtgggaagcccatcctgaccagctgctccgaggacccaggaaaggcaggattgaaaatgtccaggaaagtggccaagaagcagtggccttattgcatcccaaaccacgcctcttgaccaggctgcctcccttgtggcagcaacggcacagctaattctactcacagtgcttttaagtgaaaatggtcgagaaagaggcaccgggaagccgtcctggcgcctggcagtccgtgggacgggatggttctggctgtttgagattctcaaaggagcgagcatgtcgtggacacacacagactatttttagattttcttttgccttttgcaaccaggaacagcaaatgcaaaaactctttgagagggtaggagggtgggaaggaaacaaccatgtcatttcagaagttagtttgtatatattataataatcttataattgttctcagaatcccttaacagttgtatttaacagaaattgtatattgtaatttaaaataattatataactgtatttgaaataagaattcagacatctgaggttttatttcatttttcaatagcacatatggaattttgcaaagatttaatctgccaagggccgactaagagaagttgtaaagtatgtattatttacatttaatagacttacagggataaggcctgtggggggtaatccctgctttttgtgtttttttgtttgtttgtttgtttgtttttggggggttttcttgccttggttgtctggcaaggactttgtacatttgggagtttttatgagaaacttaaatgttattatctgggcttatatctggcctctgctttctcctttaattgtaaagtaaaagctataaagcagtatttttcttgacaaatggcatatgttttccacttctttgcatgcgtttaagtcagtttatacacaaaatggattttattttttagtttaactgtgtttctccgacagctcacctctctctgaccacccagccatttccttcctgtgctccacgttcttctgtgtgattaaaataagaatattatttttggaaatatgcaactccttttcagagatcaggagggatttatgtagcagctatttttactgcaaaagtaattcactggaaaaaaaatgtaatttgtaagaaagctttatttttatctcagctctatgtaaagttaaagttactgtacagagctgaaggacggggggcggtaggggtcttgatgaaacctcttgaacgaagcacagtttgtcccatctttgttcactcgtgtgtctcaaccatcttaatagcatgctgctcctttttgctcagtgtccacagcaagatgacgtgattcttattttcttggacacagactattctgaggcacagagcggggacttaagatgggaaagagaaagcatcggagccattcattcggagaaaacgttttgatcaaaatggagacttttgtagtcgtttcaaaagagcacctgagtcatgtgtattcccggcctttataaatgacccggtcaagttggtttcaaagtccgacaggcttgtctgtttactagctgcgtggccttggacgggtggctgacatctgtaaagaatcctcctgtgatgaaactgaggaatcgggtggccgggcaagctgggaagagcaaagccagagctgcgctgcctcaatacccacaaaagaccattcccagtatacataagcacaggatgtttttctcaagagggatgtatttatcacttggacatctgtttataatataaacagacatgtgactgggaacatcttgctgccaaaagaatcctaggcagtggctcattgtatgtgaggttgaaccacgtgaaattgccaatattaggctggcttttatctacaaagaaggagtttcatggggttcagcctaacagttatggaaactacagtccttataaaccattggcatggtaataaacagatcttaagtataaaaattttgtaattgggcctttactctctcaataataaagtattttgtttatat

SEQ ID NO: 446769 - DNA, 3710 bp, Homo sapiens
ccgtttcctcccctcccctccactcggccgtccctccttcctcctccctcctccctcctcctcccgctcctgaagagcgcgccgcgtgggggacggcccggttacttcctccagagactgacgagtgcggtgtcgctccagctcagagctcccggagccgcccggccagcgtccggcctccctgatcgtctctggccggcgccctcgccctcgcccggcgcgcaccgagcagccgcgggcgccgagcagccaccgtcccgaccaagcgccggccctgcccgcagcggcaggatgaatgatttcggaatcaagaatatggaccaggtagcccctgtggctaacagttacagagggacactcaagcgccagccagcctttgacacctttgatgggtccctgtttgctgtttttccttctctaaatgaagagcaaacactgcaagaagtgccaacaggcttggattccatttctcatgactccgccaactgtgaattgcctttgttaaccccgtgcagcaaggctgtgatgagtcaagccttaaaagctaccttcagtggcttcaaaaaggaacagcggcgcctgggcattccaaagaacccctggctgtggagtgagcaacaggtatgccagtggcttctctgggccaccaatgagttcagtctggtgaacgtgaatctgcagaggttcggcatgaatggccagatgctgtgtaaccttggcaaggaacgctttctggagctggcacctgactttgtgggtgacattctctgggaacatctggagcaaatgatcaaagaaaaccaagaaaagacagaagatcaatatgaagaaaattcacacctcacctccgttcctcattggattaacagcaatacattaggttttggcacagagcaggcgccctatggaatgcagacacagaattaccccaaaggcggcctcctggacagcatgtgtccggcctccacacccagcgtactcagctctgagcaggagtttcagatgttccccaagtctcggctcagctccgtcagcgtcacctactgctctgtcagtcaggacttcccaggcagcaacttgaatttgctcaccaacaattctgggacgcccaaagaccacgactcccctgagaacggtgcggacagcttcgagagctcagactccctcctccagtcctggaacagccagtcgtccttgctggatgtgcaacgggttccttccttcgagagcttcgaagatgactgcagccagtctctctgcctcaataagccaaccatgtctttcaaggattacatccaagagaggagtgacccggtggagcaaggcaaaccagttatacctgcagctgtgctggccggcttcacaggaagtggacctattcagctgtggcagtttctcctggagctgctatcagacaaatcctgccagtcattcatcagctggactggagacggatgggagtttaagctcgccgaccccgatgaggtggcccgccggtggggaaagaggaaaaataagcccaagatgaactacgagaagctgagccggggcttacgctactattacgacaagaacatcatccacaagacgtcggggaagcgctacgtgtaccgcttcgtgtgcgacctccagaacttgctggggttcacgcccgaggaactgcacgccatcctgggcgtccagcccgacacggaggactgaggtcgccgggaccaccctgagccggccccaggctcgtggactgagtgggaagcccatcctgaccagctgctccgaggacccaggaaaggcaggattgaaaatgtccaggaaagtggccaagaagcagtggccttattgcatcccaaaccacgcctcttgaccaggctgcctcccttgtggcagcaacggcacagctaattctactcacagtgcttttaagtgaaaatggtcgagaaagaggcaccgggaagccgtcctggcgcctggcagtccgtgggacgggatggttctggctgtttgagattctcaaaggagcgagcatgtcgtggacacacacagactatttttagattttcttttgccttttgcaaccaggaacagcaaatgcaaaaactctttgagagggtaggagggtgggaaggaaacaaccatgtcatttcagaagttagtttgtatatattataataatcttataattgttctcagaatcccttaacagttgtatttaacagaaattgtatattgtaatttaaaataattatataactgtatttgaaataagaattcagacatctgaggttttatttcatttttcaatagcacatatggaattttgcaaagatttaatctgccaagggccgactaagagaagttgtaaagtatgtattatttacatttaatagacttacagggataaggcctgtggggggtaatccctgctttttgtgtttttttgtttgtttgtttgtttgtttttggggggttttcttgccttggttgtctggcaaggactttgtacatttgggagtttttatgagaaacttaaatgttattatctgggcttatatctggcctctgctttctcctttaattgtaaagtaaaagctataaagcagtatttttcttgacaaatggcatatgttttccacttctttgcatgcgtttaagtcagtttatacacaaaatggattttattttttagtttaactgtgtttctccgacagctcacctctctctgaccacccagccatttccttcctgtgctccacgttcttctgtgtgattaaaataagaatattatttttggaaatatgcaactccttttcagagatcaggagggatttatgtagcagctatttttactgcaaaagtaattcactggaaaaaaaatgtaatttgtaagaaagctttatttttatctcagctctatgtaaagttaaagttactgtacagagctgaaggacggggggcggtaggggtcttgatgaaacctcttgaacgaagcacagtttgtcccatctttgttcactcgtgtgtctcaaccatcttaatagcatgctgctcctttttgctcagtgtccacagcaagatgacgtgattcttattttcttggacacagactattctgaggcacagagcggggacttaagatgggaaagagaaagcatcggagccattcattcggagaaaacgttttgatcaaaatggagacttttgtagtcgtttcttggtttcaaagtccgacaggcttgtctgtttactagctgcgtggccttggacgggtggctgacatctgtaaagaatcctcctgtgatgaaactgaggaatcgggtggccgggcaagctgggaagagcaaagccagagctgcgctgcctcaatacccacaaaagaccattcccagtatacataagcacaggatgtttttctcaagagggatgtatttatcacttggacatctgtttataatataaacagacatgtgactgggaacatcttgctgccaaaagaatcctaggcagtggctcattgtatgtgaggttgaaccacgtgaaattgccaatattaggctggcttttatctacaaagaaggagtttcatggggttcagcctaacagttatggaaactacagtccttataaaccattggcatggtaataaacagatcttaagtataaaaattttgtaattgggcctttactctctcaataataaagtattttgtttatat

SEQ ID NO: 446770 - DNA, 3814 bp, Homo sapiens
  misc_feature (3767)..(3767): n is a, c, g, or t
ccgtttcctcccctcccctccactcggccgtccctccttcctcctccctcctccctcctcctcccgctcctgaagagcgcgccgcgtgggggacggcccggttacttcctccagagactgacgagtgcggtgtcgctccagctcagagctcccggagccgcccggccagcgtccggcctccctgatcgtctctggccggcgccctcgccctcgcccggcgcgcaccgagcagccgcgggcgccgagcagccaccgtcccgaccaagcgccggccctgcccgcagcggcaggatgaatgatttcggaatcaagaatatggaccaggtagcccctgtggctaacagttacagagggacactcaagcgccagccagcctttgacacctttgatgggtccctgtttgctgtttttccttctctaaatgaagagcaaacactgcaagaagtgccaacaggcttggattccatttctcatgactccgccaactgtgaattgcctttgttaaccccgtgcagcaaggctgtgatgagtcaagccttaaaagctaccttcagtggcttcaaaaaggaacagcggcgcctgggcattccaaagaacccctggctgtggagtgagcaacaggtatgccagtggcttctctgggccaccaatgagttcagtctggtgaacgtgaatctgcagaggttcggcatgaatggccagatgctgtgtaaccttggcaaggaacgctttctggagctggcacctgactttgtgggtgacattctctgggaacatctggagcaaatgatcaaagaaaaccaagaaaagacagaagatcaatatgaagaaaattcacacctcacctccgttcctcattggattaacagcaatacattaggttttggcacagagcaggcgccctatggaatgcagacacagaattaccccaaaggcggcctcctggacagcatgtgtccggcctccacacccagcgtactcagctctgagcaggagtttcagatgttccccaagtctcggctcagctccgtcagcgtcacctactgctctgtcagtcaggacttcccaggcagcaacttgaatttgctcaccaacaattctgggacgcccaaagaccacgactcccctgagaacggtgcggacagcttcgagagctcagactccctcctccagtcctggaacagccagtcgtccttgctggatgtgcaacgggttccttccttcgagagcttcgaagatgactgcagccagtctctctgcctcaataagccaaccatgtctttcaaggattacatccaagagaggagtgacccggtggagcaaggcaaaccagttatacctgcagctgtgctggccggcttcacaggaagtggacctattcagctgtggcagtttctcctggagctgctatcagacaaatcctgccagtcattcatcagctggactggagacggatgggagtttaagctcgccgaccccgatgaggtggcccgccggtggggaaagaggaaaaataagcccaagatgaactacgagaagctgagccggggcttacgctactattacgacaagaacatcatccacaagacgtcggggaagcgctacgtgtaccgcttcgtgtgcgacctccagaacttgctggggttcacgcccgaggaactgcacgccatcctgggcgtccagcccgacacggaggactgaggtcgccgggaccaccctgagccggccccaggctcgtggactgagtgggaagcccatcctgaccagctgctccgaggacccaggaaaggcaggattgaaaatgtccaggaaagtggccaagaagcagtggccttattgcatcccaaaccacgcctcttgaccaggctgcctcccttgtggcagcaacggcacagctaattctactcacagtgcttttaagtgaaaatggtcgagaaagaggcaccgggaagccgtcctggcgcctggcagtccgtgggacgggatggttctggctgtttgagattctcaaaggagcgagcatgtcgtggacacacacagactatttttagattttcttttgccttttgcaaccaggaacagcaaatgcaaaaactctttgagagggtaggagggtgggaaggaaacaaccatgtcatttcagaagttagtttgtatatattataataatcttataattgttctcagaatcccttaacagttgtatttaacagaaattgtatattgtaatttaaaataattatataactgtatttgaaataagaattcagacatctgaggttttatttcatttttcaatagcacatatggaattttgcaaagatttaatctgccaagggccgactaagagaagttgtaaagtatgtattatttacatttaatagacttacagggataaggcctgtggggggtaatccctgctttttgtgtttttttgtttgtttgtttgtttgtttttggggggttttcttgccttggttgtctggcaaggactttgtacatttgggagtttttatgagaaacttaaatgttattatctgggcttatatctggcctctgctttctcctttaattgtaaagtaaaagctataaagcagtatttttcttgacaaatggcatatgttttccacttctttgcatgcgtttaagtcagtttatacacaaaatggattttattttttagtttaactgtgtttctccgacagctcacctctctctgaccacccagccatttccttcctgtgctccacgttcttctgtgtgattaaaataagaatattatttttggaaatatgcaactccttttcagagatcaggagggatttatgtagcagctatttttactgcaaaagtaattcactggaaaaaaaatgtaatttgtaagaaagctttatttttatctcagctctatgtaaagttaaagttactgtacagagctgaaggacggggggcggtaggggtcttgatgaaacctcttgaacgaagcacagtttgtcccatctttgttcactcgtgtgtctcaaccatcttaatagcatgctgctcctttttgctcagtgtccacagcaagatgacgtgattcttattttcttggacacagactattctgaggcacagagcggggacttaagatgggaaagagaaagcatcggagccattcattcggagaaaacgttttgatcaaaatggagacttttgtagtcgtttcaaaagagcacctgagtcatgtgtattcccggcctttataaatgacccggtcaagttggtttcaaagtccgacaggcttgtctgtttactagctgcgtggccttggacgggtggctgacatctgtaaagaatcctcctgtgatgaaactgaggaatcgggtggccgggcaagctgggaagagcaaagccagagctgcgctgcctcaatacccacaaaagaccattcccagtatacataagcacaggatgtttttctcaagagggatgtatttatcacttggacatctgtttataatataaacagacatgtgactgggaacatcttgctgccaaaagaatcctaggcagtggctcattgtatgtgaggttgaaccacgtgaaattgccaatattaggctggcttttatctacaaagaaggagtttcatggggttcagcctaacagttatggaaactacagtccttataaaccattggcatggtaataaacagatcttaagtataaaaattttgtaattgggcctttactctctcaataataaagtattttgtttatattantacaccaaacaacaagccatcaacaccacaatacaacaaaaaaaaga

SEQ ID NO: 446771 - DNA, 3834 bp, Homo sapiens
ccgtttcctcccctcccctccactcggccgtccctccttcctcctccctcctccctcctcctcccgctcctgaagagcgcgccgcgtgggggacggcccggttacttcctccagagactgacgagtgcggtgtcgctccagctcagagctcccggagccgcccggccagcgtccggcctccctgatcgtctctggccggcgccctcgccctcgcccggcgcgcaccgagcagccgcgggcgccgagcagccaccgtcccgaccaagcgccggccctgcccgcagcggcaggatgaatgatttcggaatcaagaatatggaccaggtagcccctgtggctaacagttacagagggacactcaagcgccagccagcctttgacacctttgatgggtccctgtttgctgtttttccttctctaaatgaagagcaaacactgcaagaagtgccaacaggcttggattccatttctcatgactccgccaactgtgaattgcctttgttaaccccgtgcagcaaggctgtgatgagtcaagccttaaaagctaccttcagtggcttcaaaaaggaacagcggcgcctgggcattccaaagaacccctggctgtggagtgagcaacaggtatgccagtggcttctctgggccaccaatgagttcagtctggtgaacgtgaatctgcagaggttcggcatgaatggccagatgctgtgtaaccttggcaaggaacgctttctggagctggcacctgactttgtgggtgacattctctgggaacatctggagcaaatgatcaaagaaaaccaagaaaagacagaagatcaatatgaagaaaattcacacctcacctccgttcctcattggattaacagcaatacattaggttttggcacagagcaggcgccctatggaatgcagacacagaattaccccaaaggcggcctcctggacagcatgtgtccggcctccacacccagcgtactcagctctgagcaggagtttcagatgttccccaagtctcggctcagctccgtcagcgtcacctactgctctgtcagtcaggacttcccaggcagcaacttgaatttgctcaccaacaattctgggacgcccaaagaccacgactcccctgagaacggtgcggacagcttcgagagctcagactccctcctccagtcctggaacagccagtcgtccttgctggatgtgcaacgggttccttccttcgagagcttcgaagatgactgcagccagtctctctgcctcaataagccaaccatgtctttcaaggattacatccaagagaggagtgacccggtggagcaaggcaaaccagttatacctgcagctgtgctggccggcttcacaggaagtggacctattcagctgtggcagtttctcctggagctgctatcagacaaatcctgccagtcattcatcagctggactggagacggatgggagtttaagctcgccgaccccgatgaggtggcccgccggtggggaaagaggaaaaataagcccaagatgaactacgagaagctgagccggggcttacgctactattacgacaagaacatcatccacaagacgtcggggaagcgctacgtgtaccgcttcgtgtgcgacctccagaacttgctggggttcacgcccgaggaactgcacgccatcctgggcgtccagcccgacacggaggactgaggtcgccgggaccaccctgagccggccccaggctcgtggactgagtgggaagcccatcctgaccagctgctccgaggacccaggaaaggcaggattgaaaatgtccaggaaagtggccaagaagcagtggccttattgcatcccaaaccacgcctcttgaccaggctgcctcccttgtggcagcaacggcacagctaattctactcacagtgcttttaagtgaaaatggtcgagaaagaggcaccgggaagccgtcctggcgcctggcagtccgtgggacgggatggttctggctgtttgagattctcaaaggagcgagcatgtcgtggacacacacagactatttttagattttcttttgccttttgcaaccaggaacagcaaatgcaaaaactctttgagagggtaggagggtgggaaggaaacaaccatgtcatttcagaagttagtttgtatatattataataatcttataattgttctcagaatcccttaacagttgtatttaacagaaattgtatattgtaatttaaaataattatataactgtatttgaaataagaattcagacatctgaggttttatttcatttttcaatagcacatatggaattttgcaaagatttaatctgccaagggccgactaagagaagttgtaaagtatgtattatttacatttaatagacttacagggataaggcctgtggggggtaatccctgctttttgtgtttttttgtttgtttgtttgtttgtttttggggggttttcttgccttggttgtctggcaaggactttgtacatttgggagtttttatgagaaacttaaatgttattatctgggcttatatctggcctctgctttctcctttaattgtaaagtaaaagctataaagcagtatttttcttgacaaatggcatatgttttccacttctttgcatgcgtttaagtcagtttatacacaaaatggattttattttttagtttaactgtgtttctccgacagctcacctctctctgaccacccagccatttccttcctgtgctccacgttcttctgtgtgattaaaataagaatattatttttggaaatatgcaactccttttcagagatcaggagggatttatgtagcagctatttttactgcaaaagtaattcactggaaaaaaaatgtaatttgtaagaaagctttatttttatctcagctctatgtaaagttaaagttactgtacagagctgaaggacggggggcggtaggggtcttgatgaaacctcttgaacgaagcacagtttgtcccatctttgttcactcgtgtgtctcaaccatcttaatagcatgctgctcctttttgctcagtgtccacagcaagatgacgtgattcttattttcttggacacagactattctgaggcacagagcggggacttaagatgggaaagagaaagcatcggagccattcattcggagaaaacgttttgatcaaaatggagacttttgtagtcgtttcaaaagagcacctgagtcatgtgtattcccggcctttataaatgacccggtcaagttggtttcaaagtccgacaggcttgtctgtttactagctgcgtggccttggacgggtggctgacatctgtaaagaatcctcctgtgatgaaactgaggaatcgggtggccgggcaagctgggaagagcaaagccagagctgcgctgcctcaatacccacaaaagaccattcccagtatacataagcacaggatgtttttctcaagagggatgtatttatcacttggacatctgtttataatataaacagacatgtgactgggaacatcttgctgccaaaagaatcctaggcagtggctcattgtatgtgaggttgaaccacgtgaaattgccaatattaggctggcttttatctacaaagaaggagtttcatggggttcagcctaacagttatggaaactacagtccttataaaccattggcatggtaataaacagatcttaagtataaaaattttgtaattgggcctttactctctcaataataaagtattttgtttatataggtagtatattgaaagcaacacaaaaccgagtacacacaaggggggaggcacccacaagaaggattccc

SEQ ID NO: 446772 - DNA, 3710 bp, Homo sapiens
ccgtttcctcccctcccctccactcggccgtccctccttcctcctccctcctccctcctcctcccgctcctgaagagcgcgccgcgtgggggacggcccggttacttcctccagagactgacgagtgcggtgtcgctccagctcagagctcccggagccgcccggccagcgtccggcctccctgatcgtctctggccggcgccctcgccctcgcccggcgcgcaccgagcagccgcgggcgccgagcagccaccgtcccgaccaagcgccggccctgcccgcagcggcaggatgaatgatttcggaatcaagaatatggaccaggtagcccctgtggctaacagttacagagggacactcaagcgccagccagcctttgacacctttgatgggtccctgtttgctgtttttccttctctaaatgaagagcaaacactgcaagaagtgccaacaggcttggattccatttctcatgactccgccaactgtgaattgcctttgttaaccccgtgcagcaaggctgtgatgagtcaagccttaaaagctaccttcagtggcttcaaaaaggaacagcggcgcctgggcattccaaagaacccctggctgtggagtgagcaacaggtatgccagtggcttctctgggccaccaatgagttcagtctggtgaacgtgaatctgcagaggttcggcatgaatggccagatgctgtgtaaccttggcaaggaacgctttctggagctggcacctgactttgtgggtgacattctctgggaacatctggagcaaatgatcaaagaaaaccaagaaaagacagaagatcaatatgaagaaaattcacacctcacctccgttcctcattggattaacagcaatacattaggttttggcacagagcaggcgccctatggaatgcagacacagaattaccccaaaggcggcctcctggacagcatgtgtccggcctccacacccagcgtactcagctctgagcaggagtttcagatgttccccaagtctcggctcagctccgtcagcgtcacctactgctctgtcagtcaggacttcccaggcagcaacttgaatttgctcaccaacaattctgggacgcccaaagaccacgactcccctgagaacggtgcggacagcttcgagagctcagactccctcctccagtcctggaacagccagtcgtccttgctggatgtgcaacgggttccttccttcgagagcttcgaagatgactgcagccagtctctctgcctcaataagccaaccatgtctttcaaggattacatccaagagaggagtgacccggtggagcaaggcaaaccagttatacctgcagctgtgctggccggcttcacaggaagtggacctattcagctgtggcagtttctcctggagctgctatcagacaaatcctgccagtcattcatcagctggactggagacggatgggagtttaagctcgccgaccccgatgaggtggcccgccggtggggaaagaggaaaaataagcccaagatgaactacgagaagctgagccggggcttacgctactattacgacaagaacatcatccacaagacgtcggggaagcgctacgtgtaccgcttcgtgtgcgacctccagaacttgctggggttcacgcccgaggaactgcacgccatcctgggcgtccagcccgacacggaggactgaggtcgccgggaccaccctgagccggccccaggctcgtggactgagtgggaagcccatcctgaccagctgctccgaggacccaggaaaggcaggattgaaaatgtccaggaaagtggccaagaagcagtggccttattgcatcccaaaccacgcctcttgaccaggctgcctcccttgtggcagcaacggcacagctaattctactcacagtgcttttaagtgaaaatggtcgagaaagaggcaccgggaagccgtcctggcgcctggcagtccgtgggacgggatggttctggctgtttgagattctcaaaggagcgagcatgtcgtggacacacacagactatttttagattttcttttgccttttgcaaccaggaacagcaaatgcaaaaactctttgagagggtaggagggtgggaaggaaacaaccatgtcatttcagaagttagtttgtatatattataataatcttataattgttctcagaatcccttaacagttgtatttaacagaaattgtatattgtaatttaaaataattatataactgtatttgaaataagaattcagacatctgaggttttatttcatttttcaatagcacatatggaattttgcaaagatttaatctgccaagggccgactaagagaagttgtaaagtatgtattatttacatttaatagacttacagggataaggcctgtggggggtaatccctgctttttgtgtttttttgtttgtttgtttgtttgtttttggggggttttcttgccttggttgtctggcaaggactttgtacatttgggagtttttatgagaaacttaaatgttattatctgggcttatatctggcctctgctttctcctttaattgtaaagtaaaagctataaagcagtatttttcttgacaaatggcatatgttttccacttctttgcatgcgtttaagtcagtttatacacaaaatggattttattttttagtttaactgtgtttctccgacagctcacctctctctgaccacccagccatttccttcctgtgctccacgttcttctgtgtgattaaaataagaatattatttttggaaatatgcaactccttttcagagatcaggagggatttatgtagcagctatttttactgcaaaagtaattcactggaaaaaaaatgtaatttgtaagaaagctttatttttatctcagctctatgtaaagttaaagttactgtacagagctgaaggacggggggcggtaggggtcttgatgaaacctcttgaacgaagcacagtttgtcccatctttgttcactcgtgtgtctcaaccatcttaatagcatgctgctcctttttgctcagtgtccacagcaagatgacgtgattcttattttcttggacacagactattctgaggcacagagcggggacttaagatgggaaagagaaagcatcggagccattcattcggagaaaacgttttgatcaaaatggagacttttgtagtcgtttcaaaagagcacctgagtcatgtgtattcccggcctttataaatgacccggtcaagttggtttcaaagtccgacaggcttgtctgtttactagctgcgtggccttggacgggtggctgacatctgtaaagaatcctcctgtgatgaaactgaggaatcgggtggccgggcaagctgggaagagcaaagccagagctgcgttctcaagagggatgtatttatcacttggacatctgtttataatataaacagacatgtgactgggaacatcttgctgccaaaagaatcctaggcagtggctcattgtatgtgaggttgaaccacgtgaaattgccaatattaggctggcttttatctacaaagaaggagtttcatggggttcagcctaacagttatggaaactacagtccttataaaccattggcatggtaataaacagatcttaagtataaaaattttgtaattgggcctttactctctcaataataaagtattttgtttatat

SEQ ID NO: 446773 - DNA, 3710 bp, Homo sapiens
ccgtttcctcccctcccctccactcggccgtccctccttcctcctccctcctccctcctcctcccgctcctgaagagcgcgccgcgtgggggacggcccggttacttcctccagagactgacgagtgcggtgtcgctccagctcagagctcccggagccgcccggccagcgtccggcctccctgatcgtctctggccggcgccctcgccctcgcccggcgcgcaccgagcagccgcgggcgccgagcagccaccgtcccgaccaagcgccggccctgcccgcagcggcaggatgaatgatttcggaatcaagaatatggaccaggtagcccctgtggctaacagttacagagggacactcaagcgccagccagcctttgacacctttgatgggtccctgtttgctgtttttccttctctaaatgaagagcaaacactgcaagaagtgccaacaggcttggattccatttctcatgactccgccaactgtgaattgcctttgttaaccccgtgcagcaaggctgtgatgagtcaagccttaaaagctaccttcagtggcttcaaacaggtatgccagtggcttctctgggccaccaatgagttcagtctggtgaacgtgaatctgcagaggttcggcatgaatggccagatgctgtgtaaccttggcaaggaacgctttctggagctggcacctgactttgtgggtgacattctctgggaacatctggagcaaatgatcaaagaaaaccaagaaaagacagaagatcaatatgaagaaaattcacacctcacctccgttcctcattggattaacagcaatacattaggttttggcacagagcaggcgccctatggaatgcagacacagaattaccccaaaggcggcctcctggacagcatgtgtccggcctccacacccagcgtactcagctctgagcaggagtttcagatgttccccaagtctcggctcagctccgtcagcgtcacctactgctctgtcagtcaggacttcccaggcagcaacttgaatttgctcaccaacaattctgggacgcccaaagaccacgactcccctgagaacggtgcggacagcttcgagagctcagactccctcctccagtcctggaacagccagtcgtccttgctggatgtgcaacgggttccttccttcgagagcttcgaagatgactgcagccagtctctctgcctcaataagccaaccatgtctttcaaggattacatccaagagaggagtgacccggtggagcaaggcaaaccagttatacctgcagctgtgctggccggcttcacaggaagtggacctattcagctgtggcagtttctcctggagctgctatcagacaaatcctgccagtcattcatcagctggactggagacggatgggagtttaagctcgccgaccccgatgaggtggcccgccggtggggaaagaggaaaaataagcccaagatgaactacgagaagctgagccggggcttacgctactattacgacaagaacatcatccacaagacgtcggggaagcgctacgtgtaccgcttcgtgtgcgacctccagaacttgctggggttcacgcccgaggaactgcacgccatcctgggcgtccagcccgacacggaggactgaggtcgccgggaccaccctgagccggccccaggctcgtggactgagtgggaagcccatcctgaccagctgctccgaggacccaggaaaggcaggattgaaaatgtccaggaaagtggccaagaagcagtggccttattgcatcccaaaccacgcctcttgaccaggctgcctcccttgtggcagcaacggcacagctaattctactcacagtgcttttaagtgaaaatggtcgagaaagaggcaccgggaagccgtcctggcgcctggcagtccgtgggacgggatggttctggctgtttgagattctcaaaggagcgagcatgtcgtggacacacacagactatttttagattttcttttgccttttgcaaccaggaacagcaaatgcaaaaactctttgagagggtaggagggtgggaaggaaacaaccatgtcatttcagaagttagtttgtatatattataataatcttataattgttctcagaatcccttaacagttgtatttaacagaaattgtatattgtaatttaaaataattatataactgtatttgaaataagaattcagacatctgaggttttatttcatttttcaatagcacatatggaattttgcaaagatttaatctgccaagggccgactaagagaagttgtaaagtatgtattatttacatttaatagacttacagggataaggcctgtggggggtaatccctgctttttgtgtttttttgtttgtttgtttgtttgtttttggggggttttcttgccttggttgtctggcaaggactttgtacatttgggagtttttatgagaaacttaaatgttattatctgggcttatatctggcctctgctttctcctttaattgtaaagtaaaagctataaagcagtatttttcttgacaaatggcatatgttttccacttctttgcatgcgtttaagtcagtttatacacaaaatggattttattttttagtttaactgtgtttctccgacagctcacctctctctgaccacccagccatttccttcctgtgctccacgttcttctgtgtgattaaaataagaatattatttttggaaatatgcaactccttttcagagatcaggagggatttatgtagcagctatttttactgcaaaagtaattcactggaaaaaaaatgtaatttgtaagaaagctttatttttatctcagctctatgtaaagttaaagttactgtacagagctgaaggacggggggcggtaggggtcttgatgaaacctcttgaacgaagcacagtttgtcccatctttgttcactcgtgtgtctcaaccatcttaatagcatgctgctcctttttgctcagtgtccacagcaagatgacgtgattcttattttcttggacacagactattctgaggcacagagcggggacttaagatgggaaagagaaagcatcggagccattcattcggagaaaacgttttgatcaaaatggagacttttgtagtcgtttcaaaagagcacctgagtcatgtgtattcccggcctttataaatgacccggtcaagttggtttcaaagtccgacaggcttgtctgtttactagctgcgtggccttggacgggtggctgacatctgtaaagaatcctcctgtgatgaaactgaggaatcgggtggccgggcaagctgggaagagcaaagccagagctgcgctgcctcaatacccacaaaagaccattcccagtatacataagcacaggatgtttttctcaagagggatgtatttatcacttggacatctgtttataatataaacagacatgtgactgggaacatcttgctgccaaaagaatcctaggcagtggctcattgtatgtgaggttgaaccacgtgaaattgccaatattaggctggcttttatctacaaagaaggagtttcatggggttcagcctaacagttatggaaactacagtccttataaaccattggcatggtaataaacagatcttaagtataaaaattttgtaattgggcctttactctctcaataataaagtattttgtttatat

SEQ ID NO: 446774 - DNA, 3304 bp, Homo sapiens
ctggtacagatggcatttcataaatacttaactgtttcttgaatgcatgaatgaattcaatacaccatctggaccttttgcgatagaaaatttagtgttgccaatgacatcattcattttggaaaatttattttagtaattggaaaaatgggttgctttctctcgttttttgaaaaagacaggcagggacgtggagcaccatgagattaaatgtgaagcactccgtgcatctcatcattctaaaattatcatctcacaggaattcagaaagtcaatttgttctgtgtagttttcacctacatctgccatcttacgtctcctgtgtctgcttttcagaaaaccaagaaaagacagaagatcaatatgaagaaaattcacacctcacctccgttcctcattggattaacagcaatacattaggttttggcacagagcaggcgccctatggaatgcagacacagaattaccccaaaggcggcctcctggacagcatgtgtccggcctccacacccagcgtactcagctctgagcaggagtttcagatgttccccaagtctcggctcagctccgtcagcgtcacctactgctctgtcagtcaggacttcccaggcagcaacttgaatttgctcaccaacaattctgggacgcccaaagaccacgactcccctgagaacggtgcggacagcttcgagagctcagactccctcctccagtcctggaacagccagtcgtccttgctggatgtgcaacgggttccttccttcgagagcttcgaagatgactgcagccagtctctctgcctcaataagccaaccatgtctttcaaggattacatccaagagaggagtgacccggtggagcaaggcaaaccagttatacctgcagctgtgctggccggcttcacaggaagtggacctattcagctgtggcagtttctcctggagctgctatcagacaaatcctgccagtcattcatcagctggactggagacggatgggagtttaagctcgccgaccccgatgaggtggcccgccggtggggaaagaggaaaaataagcccaagatgaactacgagaagctgagccggggcttacgctactattacgacaagaacatcatccacaagacgtcggggaagcgctacgtgtaccgcttcgtgtgcgacctccagaacttgctggggttcacgcccgaggaactgcacgccatcctgggcgtccagcccgacacggaggactgaggtcgccgggaccaccctgagccggccccaggctcgtggactgagtgggaagcccatcctgaccagctgctccgaggacccaggaaaggcaggattgaaaatgtccaggaaagtggccaagaagcagtggccttattgcatcccaaaccacgcctcttgaccaggctgcctcccttgtggcagcaacggcacagctaattctactcacagtgcttttaagtgaaaatggtcgagaaagaggcaccgggaagccgtcctggcgcctggcagtccgtgggacgggatggttctggctgtttgagattctcaaaggagcgagcatgtcgtggacacacacagactatttttagattttcttttgccttttgcaaccaggaacagcaaatgcaaaaactctttgagagggtaggagggtgggaaggaaacaaccatgtcatttcagaagttagtttgtatatattataataatcttataattgttctcagaatcccttaacagttgtatttaacagaaattgtatattgtaatttaaaataattatataactgtatttgaaataagaattcagacatctgaggttttatttcatttttcaatagcacatatggaattttgcaaagatttaatctgccaagggccgactaagagaagttgtaaagtatgtattatttacatttaatagacttacagggataaggcctgtggggggtaatccctgctttttgtgtttttttgtttgtttgtttgtttgtttttggggggttttcttgccttggttgtctggcaaggactttgtacatttgggagtttttatgagaaacttaaatgttattatctgggcttatatctggcctctgctttctcctttaattgtaaagtaaaagctataaagcagtatttttcttgacaaatggcatatgttttccacttctttgcatgcgtttaagtcagtttatacacaaaatggattttattttttagtttaactgtgtttctccgacagctcacctctctctgaccacccagccatttccttcctgtgctccacgttcttctgtgtgattaaaataagaatattatttttggaaatatgcaactccttttcagagatcaggagggatttatgtagcagctatttttactgcaaaagtaattcactggaaaaaaaatgtaatttgtaagaaagctttatttttatctcagctctatgtaaagttaaagttactgtacagagctgaaggacggggggcggtaggggtcttgatgaaacctcttgaacgaagcacagtttgtcccatctttgttcactcgtgtgtctcaaccatcttaatagcatgctgctcctttttgctcagtgtccacagcaagatgacgtgattcttattttcttggacacagactattctgaggcacagagcggggacttaagatgggaaagagaaagcatcggagccattcattcggagaaaacgttttgatcaaaatggagacttttgtagtcgtttcaaaagagcacctgagtcatgtgtattcccggcctttataaatgacccggtcaagttggtttcaaagtccgacaggcttgtctgtttactagctgcgtggccttggacgggtggctgacatctgtaaagaatcctcctgtgatgaaactgaggaatcgggtggccgggcaagctgggaagagcaaagccagagctgcgctgcctcaatacccacaaaagaccattcccagtatacataagcacaggatgtttttctcaagagggatgtatttatcacttggacatctgtttataatataaacagacatgtgactgggaacatcttgctgccaaaagaatcctaggcagtggctcattgtatgtgaggttgaaccacgtgaaattgccaatattaggctggcttttatctacaaagaaggagtttcatggggttcagcctaacagttatggaaactacagtccttataaaccattggcatggtaataaacagatcttaagtataaaaattttgtaattgggcctttactctctcaataataaagtattttgtttatat

SEQ ID NO: 446775 - DNA, 3165 bp, Homo sapiens
ctgtaatgtctgaaattttcgttcatggtaaacataatctgccggacactcaaatgtgtttatttgttttcctttgatcttggtaatacatttcggaaatcagtaagttactaacagcaataggtattaaccatacgcagtaaggtccacagacgaaattaggatgtgcttttcttgttctaggctgtcctagtttgatcgcactgcgttcgtccagtatcaatatgaagaaaattcacacctcacctccgttcctcattggattaacagcaatacattaggttttggcacagagcaggcgccctatggaatgcagacacagaattaccccaaaggcggcctcctggacagcatgtgtccggcctccacacccagcgtactcagctctgagcaggagtttcagatgttccccaagtctcggctcagctccgtcagcgtcacctactgctctgtcagtcaggacttcccaggcagcaacttgaatttgctcaccaacaattctgggacgcccaaagaccacgactcccctgagaacggtgcggacagcttcgagagctcagactccctcctccagtcctggaacagccagtcgtccttgctggatgtgcaacgggttccttccttcgagagcttcgaagatgactgcagccagtctctctgcctcaataagccaaccatgtctttcaaggattacatccaagagaggagtgacccggtggagcaaggcaaaccagttatacctgcagctgtgctggccggcttcacaggaagtggacctattcagctgtggcagtttctcctggagctgctatcagacaaatcctgccagtcattcatcagctggactggagacggatgggagtttaagctcgccgaccccgatgaggtggcccgccggtggggaaagaggaaaaataagcccaagatgaactacgagaagctgagccggggcttacgctactattacgacaagaacatcatccacaagacgtcggggaagcgctacgtgtaccgcttcgtgtgcgacctccagaacttgctggggttcacgcccgaggaactgcacgccatcctgggcgtccagcccgacacggaggactgaggtcgccgggaccaccctgagccggccccaggctcgtggactgagtgggaagcccatcctgaccagctgctccgaggacccaggaaaggcaggattgaaaatgtccaggaaagtggccaagaagcagtggccttattgcatcccaaaccacgcctcttgaccaggctgcctcccttgtggcagcaacggcacagctaattctactcacagtgcttttaagtgaaaatggtcgagaaagaggcaccgggaagccgtcctggcgcctggcagtccgtgggacgggatggttctggctgtttgagattctcaaaggagcgagcatgtcgtggacacacacagactatttttagattttcttttgccttttgcaaccaggaacagcaaatgcaaaaactctttgagagggtaggagggtgggaaggaaacaaccatgtcatttcagaagttagtttgtatatattataataatcttataattgttctcagaatcccttaacagttgtatttaacagaaattgtatattgtaatttaaaataattatataactgtatttgaaataagaattcagacatctgaggttttatttcatttttcaatagcacatatggaattttgcaaagatttaatctgccaagggccgactaagagaagttgtaaagtatgtattatttacatttaatagacttacagggataaggcctgtggggggtaatccctgctttttgtgtttttttgtttgtttgtttgtttgtttttggggggttttcttgccttggttgtctggcaaggactttgtacatttgggagtttttatgagaaacttaaatgttattatctgggcttatatctggcctctgctttctcctttaattgtaaagtaaaagctataaagcagtatttttcttgacaaatggcatatgttttccacttctttgcatgcgtttaagtcagtttatacacaaaatggattttattttttagtttaactgtgtttctccgacagctcacctctctctgaccacccagccatttccttcctgtgctccacgttcttctgtgtgattaaaataagaatattatttttggaaatatgcaactccttttcagagatcaggagggatttatgtagcagctatttttactgcaaaagtaattcactggaaaaaaaatgtaatttgtaagaaagctttatttttatctcagctctatgtaaagttaaagttactgtacagagctgaaggacggggggcggtaggggtcttgatgaaacctcttgaacgaagcacagtttgtcccatctttgttcactcgtgtgtctcaaccatcttaatagcatgctgctcctttttgctcagtgtccacagcaagatgacgtgattcttattttcttggacacagactattctgaggcacagagcggggacttaagatgggaaagagaaagcatcggagccattcattcggagaaaacgttttgatcaaaatggagacttttgtagtcgtttcaaaagagcacctgagtcatgtgtattcccggcctttataaatgacccggtcaagttggtttcaaagtccgacaggcttgtctgtttactagctgcgtggccttggacgggtggctgacatctgtaaagaatcctcctgtgatgaaactgaggaatcgggtggccgggcaagctgggaagagcaaagccagagctgcgctgcctcaatacccacaaaagaccattcccagtatacataagcacaggatgtttttctcaagagggatgtatttatcacttggacatctgtttataatataaacagacatgtgactgggaacatcttgctgccaaaagaatcctaggcagtggctcattgtatgtgaggttgaaccacgtgaaattgccaatattaggctggcttttatctacaaagaaggagtttcatggggttcagcctaacagttatggaaactacagtccttataaaccattggcatggtaataaacagatcttaagtataaaaattttgtaattgggcctttactctctcaataataaagtattttgtttatat

SEQ ID NO: 446776 - DNA, 2952 bp, Homo sapiens
ctcgtaggggttagttactggggtaacactgactttaagagctctgccgtccgattgttctgttccaggttttggcacagagcaggcgccctatggaatgcagacacagaattaccccaaaggcggcctcctggacagcatgtgtccggcctccacacccagcgtactcagctctgagcaggagtttcagatgttccccaagtctcggctcagctccgtcagcgtcacctactgctctgtcagtcaggacttcccaggcagcaacttgaatttgctcaccaacaattctgggacgcccaaagaccacgactcccctgagaacggtgcggacagcttcgagagctcagactccctcctccagtcctggaacagccagtcgtccttgctggatgtgcaacgggttccttccttcgagagcttcgaagatgactgcagccagtctctctgcctcaataagccaaccatgtctttcaaggattacatccaagagaggagtgacccggtggagcaaggcaaaccagttatacctgcagctgtgctggccggcttcacaggaagtggacctattcagctgtggcagtttctcctggagctgctatcagacaaatcctgccagtcattcatcagctggactggagacggatgggagtttaagctcgccgaccccgatgaggtggcccgccggtggggaaagaggaaaaataagcccaagatgaactacgagaagctgagccggggcttacgctactattacgacaagaacatcatccacaagacgtcggggaagcgctacgtgtaccgcttcgtgtgcgacctccagaacttgctggggttcacgcccgaggaactgcacgccatcctgggcgtccagcccgacacggaggactgaggtcgccgggaccaccctgagccggccccaggctcgtggactgagtgggaagcccatcctgaccagctgctccgaggacccaggaaaggcaggattgaaaatgtccaggaaagtggccaagaagcagtggccttattgcatcccaaaccacgcctcttgaccaggctgcctcccttgtggcagcaacggcacagctaattctactcacagtgcttttaagtgaaaatggtcgagaaagaggcaccgggaagccgtcctggcgcctggcagtccgtgggacgggatggttctggctgtttgagattctcaaaggagcgagcatgtcgtggacacacacagactatttttagattttcttttgccttttgcaaccaggaacagcaaatgcaaaaactctttgagagggtaggagggtgggaaggaaacaaccatgtcatttcagaagttagtttgtatatattataataatcttataattgttctcagaatcccttaacagttgtatttaacagaaattgtatattgtaatttaaaataattatataactgtatttgaaataagaattcagacatctgaggttttatttcatttttcaatagcacatatggaattttgcaaagatttaatctgccaagggccgactaagagaagttgtaaagtatgtattatttacatttaatagacttacagggataaggcctgtggggggtaatccctgctttttgtgtttttttgtttgtttgtttgtttgtttttggggggttttcttgccttggttgtctggcaaggactttgtacatttgggagtttttatgagaaacttaaatgttattatctgggcttatatctggcctctgctttctcctttaattgtaaagtaaaagctataaagcagtatttttcttgacaaatggcatatgttttccacttctttgcatgcgtttaagtcagtttatacacaaaatggattttattttttagtttaactgtgtttctccgacagctcacctctctctgaccacccagccatttccttcctgtgctccacgttcttctgtgtgattaaaataagaatattatttttggaaatatgcaactccttttcagagatcaggagggatttatgtagcagctatttttactgcaaaagtaattcactggaaaaaaaatgtaatttgtaagaaagctttatttttatctcagctctatgtaaagttaaagttactgtacagagctgaaggacggggggcggtaggggtcttgatgaaacctcttgaacgaagcacagtttgtcccatctttgttcactcgtgtgtctcaaccatcttaatagcatgctgctcctttttgctcagtgtccacagcaagatgacgtgattcttattttcttggacacagactattctgaggcacagagcggggacttaagatgggaaagagaaagcatcggagccattcattcggagaaaacgttttgatcaaaatggagacttttgtagtcgtttcaaaagagcacctgagtcatgtgtattcccggcctttataaatgacccggtcaagttggtttcaaagtccgacaggcttgtctgtttactagctgcgtggccttggacgggtggctgacatctgtaaagaatcctcctgtgatgaaactgaggaatcgggtggccgggcaagctgggaagagcaaagccagagctgcgctgcctcaatacccacaaaagaccattcccagtatacataagcacaggatgtttttctcaagagggatgtatttatcacttggacatctgtttataatataaacagacatgtgactgggaacatcttgctgccaaaagaatcctaggcagtggctcattgtatgtgaggttgaaccacgtgaaattgccaatattaggctggcttttatctacaaagaaggagtttcatggggttcagcctaacagttatggaaactacagtccttataaaccattggcatggtaataaacagatcttaagtataaaaattttgtaattgggcctttactctctcaataataaagtattttgtttatat

SEQ ID NO: 446777 - DNA, 3710 bp, Homo sapiens
ccgtttcctcccctcccctccactcggccgtccctccttcctcctccctcctccctcctcctcccgctcctgaagagcgcgccgcgtgggggacggcccggttacttcctccagagactgacgagtgcggtgtcgctccagctcagagctcccggagccgcccggccagcgtccggcctccctgatcgtctctggccggcgccctcgccctcgcccggcgcgcaccgagcagccgcgggcgccgagcagccaccgtcccgaccaagcgccggccctgcccgcagcggcaggatgaatgatttcggaatcaagaatatggaccaggtagcccctgtggctaacagttacagagggacactcaagcgccagccagcctttgacacctttgatgggtccctgtttgctgtttttccttctctaaatgaagagcaaacactgcaagaagtgccaacaggcttggattccatttctcatgactccgccaactgtgaattgcctttgttaaccccgtgcagcaaggctgtgatgagtcaagccttaaaagctaccttcagtggcttcaaaaaggaacagcggcgcctgggcattccaaagaacccctggctgtggagtgagcaacaggtatgccagtggcttctctgggccaccaatgagttcagtctggtgaacgtgaatctgcagaggttcggcatgaatggccagatgctgtgtaaccttggcaaggaacgctttctggagctggcacctgactttgtgggtgacattctctgggaacatctggagcaaatgatcaaagaaaaccaagaaaagacagaagatcaatatgaagaaaattcacacctcacctccgttcctcattggattaacagcaatacattaggttttggcacagagcaggcgccctatggaatgcagacacagaattaccccaaaggcggcctcctggacagcatgtgtccggcctccacacccagcgtactcagctctgagcaggagtttcagatgttccccaagtctcggctcagctccgtcagcgtcacctactgctctgtcagtcaggacttcccaggcagcaacttgaatttgctcaccaacaattctgggacgcccaaagaccacgactcccctgagaacggtgcggacagcttcgagagctcagactccctcctccagtcctggaacagccagtcgtccttgctggatgtgcaacgggttccttccttcgagagcttcgaagatgactgcagccagtctctctgcctcaataagccaaccatgtctttcaaggattacatccaagagaggagtgacccggtggagcaaggcaaaccagttatacctgcagctgtgctggccggcttcacaggaagtggacctattcagctgtggcagtttctcctggagctgctatcagacaaatcctgccagtcattcatcagctggactggagacggatgggagtttaagctcgccgaccccgatgaggtggcccgccggtggggaaagaggaaaaataagcccaagatgaactacgagaagctgagccggggcttacgctactattacgacaagaacatcatccacaagacgtcggggaagcgctacgtgtaccgcttcgtgtgcgacctccagaacttgctggggttcacgcccgaggaactgcacgccatcctgggcgtccagcccgacacggaggactgaggtcgccgggaccaccctgagccggccccaggctcgtggactgagtgggaagcccatcctgaccagctgctccgaggacccaggaaaggcaggattgaaaatgtccaggaaagtggccaagaagcagtggccttattgcatcccaaaccacgcctcttgaccaggctgcctcccttgtggcagcaacggcacagctaattctactcacagtgcttttaagtgggacgggatggttctggctgtttgagattctcaaaggagcgagcatgtcgtggacacacacagactatttttagattttcttttgccttttgcaaccaggaacagcaaatgcaaaaactctttgagagggtaggagggtgggaaggaaacaaccatgtcatttcagaagttagtttgtatatattataataatcttataattgttctcagaatcccttaacagttgtatttaacagaaattgtatattgtaatttaaaataattatataactgtatttgaaataagaattcagacatctgaggttttatttcatttttcaatagcacatatggaattttgcaaagatttaatctgccaagggccgactaagagaagttgtaaagtatgtattatttacatttaatagacttacagggataaggcctgtggggggtaatccctgctttttgtgtttttttgtttgtttgtttgtttgtttttggggggttttcttgccttggttgtctggcaaggactttgtacatttgggagtttttatgagaaacttaaatgttattatctgggcttatatctggcctctgctttctcctttaattgtaaagtaaaagctataaagcagtatttttcttgacaaatggcatatgttttccacttctttgcatgcgtttaagtcagtttatacacaaaatggattttattttttagtttaactgtgtttctccgacagctcacctctctctgaccacccagccatttccttcctgtgctccacgttcttctgtgtgattaaaataagaatattatttttggaaatatgcaactccttttcagagatcaggagggatttatgtagcagctatttttactgcaaaagtaattcactggaaaaaaaatgtaatttgtaagaaagctttatttttatctcagctctatgtaaagttaaagttactgtacagagctgaaggacggggggcggtaggggtcttgatgaaacctcttgaacgaagcacagtttgtcccatctttgttcactcgtgtgtctcaaccatcttaatagcatgctgctcctttttgctcagtgtccacagcaagatgacgtgattcttattttcttggacacagactattctgaggcacagagcggggacttaagatgggaaagagaaagcatcggagccattcattcggagaaaacgttttgatcaaaatggagacttttgtagtcgtttcaaaagagcacctgagtcatgtgtattcccggcctttataaatgacccggtcaagttggtttcaaagtccgacaggcttgtctgtttactagctgcgtggccttggacgggtggctgacatctgtaaagaatcctcctgtgatgaaactgaggaatcgggtggccgggcaagctgggaagagcaaagccagagctgcgctgcctcaatacccacaaaagaccattcccagtatacataagcacaggatgtttttctcaagagggatgtatttatcacttggacatctgtttataatataaacagacatgtgactgggaacatcttgctgccaaaagaatcctaggcagtggctcattgtatgtgaggttgaaccacgtgaaattgccaatattaggctggcttttatctacaaagaaggagtttcatggggttcagcctaacagttatggaaactacagtccttataaaccattggcatggtaataaacagatcttaagtataaaaattttgtaattgggcctttactctctcaataataaagtattttgtttatat

SEQ ID NO: 446778 - DNA, 1678 bp, Homo sapiens
  misc_feature (1)..(1): n is a, c, g, or t
naattcgcggccgcgtcgacacggctgcgagagacgacagaagccatgtcatttcagaagttagtttgtatatattataataatcttataattgttctcagaatcccttaacagttgtatttaacagaaattgtatattgtaatttaaaataattatataactgtatttgaaataagaattcagacatctgaggttttatttcatttttcaatagcacatatggaattttgcaaagatttaatctgccaagggccgactaagagaagttgtaaagtatgtattatttacatttaatagacttacagggataaggcctgtggggggtaatccctgctttttgtgtttttttgtttgtttgtttgtttgtttttggggggttttcttgccttggttgtctggcaaggactttgtacatttgggagtttttatgagaaacttaaatgttattatctgggcttatatctggcctctgctttctcctttaattgtaaagtaaaagctataaagcagtatttttcttgacaaatggcatatgttttccacttctttgcatgcgtttaagtcagtttatacacaaaatggattttattttttagtttaactgtgtttctccgacagctcacctctctctgaccacccagccatttccttcctgtgctccacgttcttctgtgtgattaaaataagaatattatttttggaaatatgcaactccttttcagagatcaggagggatttatgtagcagctatttttactgcaaaagtaattcactggaaaaaaaatgtaatttgtaagaaagctttatttttatctcagctctatgtaaagttaaagttactgtacagagctgaaggacggggggcggtaggggtcttgatgaaacctcttgaacgaagcacagtttgtcccatctttgttcactcgtgtgtctcaaccatcttaatagcatgctgctcctttttgctcagtgtccacagcaagatgacgtgattcttattttcttggacacagactattctgaggcacagagcggggacttaagatgggaaagagaaagcatcggagccattcattcggagaaaacgttttgatcaaaatggagacttttgtagtcgtttcaaaagagcacctgagtcatgtgtattcccggcctttataaatgacccggtcaagttggtttcaaagtccgacaggcttgtctgtttactagctgcgtggccttggacgggtggctgacatctgtaaagaatcctcctgtgatgaaactgaggaatcgggtggccgggcaagctgggaagagcaaagccagagctgcgctgcctcaatacccacaaaagaccattcccagtatacataagcacaggatgtttttctcaagagggatgtatttatcacttggacatctgtttataatataaacagacatgtgactgggaacatcttgctgccaaaagaatcctaggcagtggctcattgtatgtgaggttgaaccacgtgaaattgccaatattaggctggcttttatctacaaagaaggagtttcatggggttcagcctaacagttatggaaactacagtccttataaaccattggcatggtaataaacagatcttaagtataaaaattttgtaattgggcctttactctctcaataataaagtattttgtttatat

SEQ ID NO: 446779 - DNA, 1401 bp, Homo sapiens
ccgtttcctcccctcccctccactcggccgtccctccttcctcctccctcctccctcctcctcccgctcctgaagagcgcgccgcgtgggggacggcccggttacttcctccagagactgacgagtgcggtgtcgctccagctcagagctcccggagccgcccggccagcgtccggcctccctgatcgtctctggccggcgccctcgccctcgcccggcgcgcaccgagcagccgcgggcgccgagcagccaccgtcccgaccaagcgccggccctgcccgcagcggcaggatgaatgatttcggaatcaagaatatggaccaggtagcccctgtggctaacagttacagagggacactcaagcgccagccagcctttgacacctttgatgggtccctgtttgctgtttttccttctctaaatgaagagcaaacactgcaagaagtgccaacaggcttggattccatttctcatgactccgccaactgtgaattgcctttgttaaccccgtgcagcaaggctgtgatgagtcaagccttaaaagctaccttcagtggcttcaaaaaggaacagcggcgcctgggcattccaaagaacccctggctgtggagtgagcaacaggtatgccagtggcttctctgggccaccaatgagttcagtctggtgaacgtgaatctgcagaggttcggcatgaatggccagatgctgtgtaaccttggcaaggaacgctttctggagctggcacctgactttgtgggtgacattctctgggaacatctggagcaaatgatcaaagaaaaccaagaaaagacagaagatcaatatgaagaaaattcacacctcacctccgttcctcattggattaacagcaatacattaggtcagtccgattgattctgcccttaagaactttgtcttcagtcttcccagtagacttggaatctctctactgtaggctcctaaggggccacctagacctgtgtgtctcttatggtggccacacgtgggtgttgagctataagccattgaaatgtgactggtccacatcgagatgtgtaggaagagtatagtcatgcacaccagatttggaagtcttagtatgaaacagagaatataaaatgtctccctgataatttttaatgtattgattacatattgaaatgataattgctatatgaggccaagtaaaataagaaaattaacttcacctgtttctttttgcttttttaatatggccactagaactttcgcagttgcttaagtggctcacacgatcttccataggtcagcactgttagtgctagtccaggcaattcttagagcaaggagcagaacgaagtgagctgattaccgcagtcaccagtaatgttggtttagtgtagcaaacaagaggcggcaggc

SEQ ID NO: 446780 - DNA, 1414 bp, Homo sapiens
ccgtttcctcccctcccctccactcggccgtccctccttcctcctccctcctccctcctcctcccgctcctgaagagcgcgccgcgtgggggacggcccggttacttcctccagagactgacgagtgcggtgtcgctccagctcagagctcccggagccgcccggccagcgtccggcctccctgatcgtctctggccggcgccctcgccctcgcccggcgcgcaccgagcagccgcgggcgccgagcagccaccgtcccgaccaagcgccggccctgcccgcagcggcaggatgaatgatttcggaatcaagaatatggaccaggtagcccctgtggctaacagttacagagggacactcaagcgccagccagcctttgacacctttgatgggtccctgtttgctgtttttccttctctaaatgaagagcaaacactgcaagaagtgccaacaggcttggattccatttctcatgactccgccaactgtgaattgcctttgttaaccccgtgcagcaaggctgtgatgagtcaagccttaaaagctaccttcagtggcttcaaaaaggaacagcggcgcctgggcattccaaagaacccctggctgtggagtgagcaacaggtatgccagtggcttctctgggccaccaatgagttcagtctggtgaacgtgaatctgcagaggttcggcatgaatggccagatgctgtgtaaccttggcaaggaacgctttctggagctggcacctgactttgtgggtgacattctctgggaacatctggagcaaatgatcaaaggtaccagctgaacgtcttacttctccttgtccaggatgagctgtggccgggaagactgattgggaaagtcacgtgggtgttcttcaaccttagggttgccacttgaaatgacatagagtaccttgcctcaaaatgccactcaagtgagtcagatatatggcagtgattatagatttttatcccactttatgtgagtgtgtgtgtgtgtgtgtgtgtgtgtgtatagcatcaagtatagccacaaggtagtagccttagtcactaaattgtttgctattgctggctgtattcatcacgggagtccatgttgactcagatatgtaggacagcaagaattcccacgtcttctgagctcaccttacagagctaagagatatggcagccttaatgaaaggggggagcctttactcacataaaccctgtgaattctactgtaaattttcctacatccaaatggaatgtattttggatgttgaggattgttgagggggcggggtctgtttttaaacaagtgagaaattgatatatatttacacgctatcatattgtacagaaactggccattgatcagtagaaatctcaccaaatacagagaaagtcttgattcaaaacttaaaa

SEQ ID NO: 446781 - DNA, 424 bp, Homo sapiens
gagaccagcctggccaacatggtgaaaccctgtctgtactaaaaatgcaaaaattatccaggcgtggtggtgggcgcctgtagtcccagctactcgggaggctgaggcaggagaatcgcttgaacccaggagggggaggttgcagtgagccaagattgcaccactgcactctggcctgtgtgacagagtaagacctgtctcaaaataataataataataatccacagtaaaatacaatcatttcagtcactttgaccattttacgagtctgttttaaggactgactggttgattccatgtttgcttcaaaattgccagtttaatcagggactattggtaggattgcccacagaccacttttacaacaggtaattcaatcagtttaaatattgtatttccattttttttccatctgtttttgcag

SEQ ID NO: 446782 - DNA, 642 bp, Homo sapiens
ccgtttcctcccctcccctccactcggccgtccctccttcctcctccctcctccctcctcctcccgctcctgaagagcgcgccgcgtgggggacggcccggttacttcctccagagactgacgagtgcggtgtcgctccagctcagagctcccggagccgcccggccagcgtccggcctccctgatcgtctctggccggcgccctcgccctcgcccggcgcgcaccgagcagccgcgggcgccgagcagccaccgtcccgaccaagcgccggccctgcccgcagcggcaggatgaatgatttcggaatcaagaatatggaccaggtagcccctgtggctaacagttacagagggacactcaagcgccagccagcctttgacacctttgatgggtccctgtttgctgtttttccttctctaaatgaagagcaaacactgcaagaagtgccaacaggcttggattccatttctcatgactccgccaactgtgaattgcctttgttaaccccgtgcagcaaggactttgtacatttgggagtttttatgagaaacttaaatgttattatctgggcttatatctggcctctgctttctcctttaattgtaaagtaaaagctataaagcagtatttttcttgacaaa

SEQ ID NO: 446783 - DNA, 3715 bp, Homo sapiens
ccgtttcctcccctcccctccactcggccgtccctccttcctcctccctcctccctcctcctcccgctcctgaagagcgcgccgcgtgggggacggcccggttacttcctccagagactgacgagtgcggtgtcgctccagctcagagctcccggagccgcccggccagcgtccggcctccctgatcgtctctggccggcgccctcgccctcgcccggcgcgcaccgagcagccgcgggcgccgagcagccaccgtcccgaccaagcgccggccctgcccgcagcggcaggatgaatgatttcggaatcaagaatatggaccaggtagcccctgtggctaacagttacagagggacactcaagcgccagccagcctttgacacctttgatgggtccctgtttgctgtttttccttctctaaatgaagagcaaacactgcaagaagtgccaacaggcttggattccatttctcatgactccgccaactgtgaattgcctttgttaaccccgtgcagcaaggctgtgatgagtcaagccttaaaagctaccttcagtggcttcaaaaaggaacagcggcgcctgggcattccaaagaacccctggctgtggagtgagcaacaggtatgccagtggcttctctgggccaccaatgagttcagtctggtgaacgtgaatctgcagaggttcggcatgaatggccagatgctgtgtaaccttggcaaggaacgctttctggagctggcacctgactttgtgggtgacattctctgggaacatctggagcaaatgatcaaagaaaaccaagaaaagacagaagatcaatatgaagaaaattcacacctcacctccgttcctcattggattaacagcaatacattaggttttggcacagagcaggcgccctatggaatgcagacacagaattaccccaaaggcggcctcctggacagcatgtgtccggcctccacacccagcgtactcagctctgagcaggagtttcagatgttccccaagtctcggctcagctccgtcagcgtcacctactgctctgtcagtcaggacttcccaggcagcaacttgaatttgctcaccaacaattctgggacgcccaaagaccacgactcccctgagaacggtgcggacagcttcgagagctcagactccctcctccagtcctggaacagccagtcgtccttgctggatgtgcaacgggttccttccttcgagagcttcgaagatgactgcagccagtctctctgcctcaataagccaaccatgtctttcaaggattacatccaagagaggagtgacccggtggagcaaggcaaaccagttatacctgcagctgtgctggccggcttcacaggaagtggacctattcagctgtggcagtttctcctggagctgctatcagacaaatcctgccagtcattcatcagctggactggagacggatgggagtttaagctcgccgaccccgatgaggtggcccgccggtggggaaagaggaaaaataagcccaagatgaactacgagaagctgagccggggcttacgctactattacgacaagaacatcatccacaagacgtcggggaagcgctacgtgtaccgcttcgtgtgcgacctccagaacttgctggggttcacgcccgaggaactgcacgccatcctgggcgtccagcccgacacggaggactgaggtcgccgggaccaccctgagccggccccaggctcgtggactgagtgggaagcccatcctgaccagctgctccgaggacccaggaaaggcaggattgaaaatgtccaggaaagtggccaagaagcagtggccttattgcatcccaaaccacgcctcttgaccaggctgcctcccttgtggcagcaacggcacagctaattctactcacagtgcttttaagtgaaaatggtcgagaaagaggcaccgggaagccgtcctggcgcctggcagtccgtgggacgggatggttctggctgtttgagattctcaaaggagcgagcatgtcgtggacacacacagactatttttagattttcttttgccttttgcaaccaggaacagcaaatgcaaaaactctttgagagggtaggagggtgggaaggaaacaaccatgtcatttcagaagttagtttgtatatattataataatcttataattgttctcagaatcccttaacagttgtatttaacagaaattgtatattgtaatttaaaataattatataactgtatttgaaataagaattcagacatctgaggttttatttcatttttcaatagcacatatggaattttgcaaagatttaatctgccaagggccgactaagagaagttgtaaagtatgtattatttacatttaatagacttacagggataaggcctgtggggggtaatccctgctttttgtgtttttttgtttgtttgtttgtttgtttttggggggttttcttgccttggttgtctggcaaggactttgtacatttgggagtttttatgagaaacttaaatgttattatctgggcttatatctggcctctgctttctcctttaattgtaaagtaaaagctataaagcagtatttttcttgacaaatggcatatgttttccacttctttgcatgcgtttaagtcagtttatacacaaaatggattttattttttagtttaactgtgtttctccgacagctcacctctctctgaccacccagccatttccttcctgtgctccacgttcttctgtgtgattaaaataagaatattatttttggaaatatgcaactccttttcagagatcaggagggatttatgtagcagctatttttactgcaaaagtaattcactggtaaagttaaagttactgtacagagctgaaggacggggggcggtaggggtcttgatgaaacctcttgaacgaagcacagtttgtcccatctttgttcactcgtgtgtctcaaccatcttaatagcatgctgctcctttttgctcagtgtccacagcaagatgacgtgattcttattttcttggacacagactattctgaggcacagagcggggacttaagatgggaaagagaaagcatcggagccattcattcggagaaaacgttttgatcaaaatggagacttttgtagtcgtttcaaaagagcacctgagtcatgtgtattcccggcctttataaatgacccggtcaagttggtttcaaagtccgacaggcttgtctgtttactagctgcgtggccttggacgggtggctgacatctgtaaagaatcctcctgtgatgaaactgaggaatcgggtggccgggcaagctgggaagagcaaagccagagctgcgctgcctcaatacccacaaaagaccattcccagtatacataagcacaggatgtttttctcaagagggatgtatttatcacttggacatctgtttataatataaacagacatgtgactgggaacatcttgctgccaaaagaatcctaggcagtggctcattgtatgtgaggttgaaccacgtgaaattgccaatattaggctggcttttatctacaaagaaggagtttcatggggttcagcctaacagttatggaaactacagtccttataaaccattggcatggtaataaacagatcttaagtataaaaattttgtaattgggcctttactctctcaataataaagtattttgtttatat

SEQ ID NO: 446784 - DNA, 2613 bp, Homo sapiens
ccgtttcctcccctcccctccactcggccgtccctccttcctcctccctcctccctcctcctcccgctcctgaagagcgcgccgcgtgggggacggcccggttacttcctccagagactgacgagtgcggtgtcgctccagctcagagctcccggagccgcccggccagcgtccggcctccctgatcgtctctggccggcgccctcgccctcgcccggcgcgcaccgagcagccgcgggcgccgagcagccaccgtcccgaccaagcgccggccctgcccgcagcggcaggatgaatgatttcggaatcaagaatatggaccaggtagcccctgtggctaacagttacagagggacactcaagcgccagccagcctttgacacctttgatgggtccctgtttgctgtttttccttctctaaatgaagagcaaacactgcaagaagtgccaacaggcttggattccatttctcatgactccgccaactgtgaattgcctttgttaaccccgtgcagcaaggctgtgatgagtcaagccttaaaagctaccttcagtggcttcaaaaaggaacagcggcgcctgggcattccaaagaacccctggctgtggagtgagcaacaggtatgccagtggcttctctgggccaccaatgagttcagtctggtgaacgtgaatctgcagaggttcggcatgaatggccagatgctgtgtaaccttggcaaggaacgctttctggagctggcacctgactttgtgggtgacattctctgggaacatctggagcaaatgatcaaagaaaaccaagaaaagacagaagatcaatatgaagaaaattcacacctcacctccgttcctcattggattaacagcaatacattaggttttggcacagagcaggcgccctatggaatgcagacacagaattaccccaaaggcggcctcctggacagcatgtgtccggcctccacacccagcgtactcagctctgagcaggagtttcagatgttccccaagtctcggctcagctccgtcagcgtcacctactgctctgtcagtcaggacttcccaggcagcaacttgaatttgctcaccaacaattctgggacgcccaaagaccacgactcccctgagaacggtgcggacagcttcgagagctcagactccctcctccagtcctggaacagccagtcgtccttgctggatgtgcaacgggttccttccttcgagagcttcgaagatgactgcagccagtctctctgcctcaataagccaaccatgtctttcaaggattacatccaagagaggagtgacccggtggagcaaggcaaaccagttatacctgcagctgtgctggccggcttcacaggaagtggacctattcagctgtggcagtttctcctggagctgctatcagacaaatcctgccagtcattcatcagctggactggagacggatgggagtttaagctcgccgaccccgatgaggtggcccgccggtggggaaagaggaaaaataagcccaagatgaactacgagaagctgagccggggcttacgctactattacgacaagaacatcatccacaagacgtcggggaagcgctacgtgtaccgcttcgtgtgcgacctccagaacttgctggggttcacgcccgaggaactgcacgccatcctgggcgtccagcccgacacggaggactgaggtcgccgggaccaccctgagccggccccaggctcgtggactgagtgggaagcccatcctgaccagctgctccgaggacccaggaaaggcaggattgaaaatgtccaggaaagtggccaagaagcagtggccttattgcatcccaaaccacgcctcttgaccaggctgcctcccttgtggcagcaacggcacagctaattctactcacagtgcttttaagtgaaaatggtcgagaaagaggcaccgggaagccgtcctggcgcctggcagtccgtgggacgggatggttctggctgtttgagattctcaaaggagcgagcatgtcgtggacacacacagactatttttagattttcttttgccttttgcaaccaggaacagcaaatgcaaaaactctttgagagggtaggagggtgggaaggaaacaaccatgtcatttcagaagttagtttgtatatattataataatcttataattgttctcagaatcccttaacagttgtatttaacagaaattgtatattgtaatttaaaataattatataactgtatttgaaataagaattcagacatctgaggttttatttcatttttcaatagcacatatggaattttgcaaagatttaatctgccaagggccgactaagagaagttgtaaagtatgtattatttacatttaatagacttacagggataaggcctgtggggggtaatccctgctttttgtgtttttttgtttgtttgtttgtttgtttttggggggttttcttgccttggttgtctggcaaggactttgtacatttgggagtttttatgagaaacttaaatgttattatctgggcttatatctggcctctgctttctcctttaattgtaaagtaaaagctataaagcagtatttttcttgacaaa

SEQ ID NO: 446785 - DNA, 3791 bp, Homo sapiens
  misc_feature (3771)..(3771): n is a, c, g, or t
ccgtttcctcccctcccctccactcggccgtccctccttcctcctccctcctccctcctcctcccgctcctgaagagcgcgccgcgtgggggacggcccggttacttcctccagagactgacgagtgcggtgtcgctccagctcagagctcccggagccgcccggccagcgtccggcctccctgatcgtctctggccggcgccctcgccctcgcccggcgcgcaccgagcagccgcgggcgccgagcagccaccgtcccgaccaagcgccggccctgcccgcagcggcaggatgaatgatttcggaatcaagaatatggaccaggtagcccctgtggctaacagttacagagggacactcaagcgccagccagcctttgacacctttgatgggtccctgtttgctgtttttccttctctaaatgaagagcaaacactgcaagaagtgccaacaggcttggattccatttctcatgactccgccaactgtgaattgcctttgttaaccccgtgcagcaaggctgtgatgagtcaagccttaaaagctaccttcagtggcttcaaaaaggaacagcggcgcctgggcattccaaagaacccctggctgtggagtgagcaacaggtatgccagtggcttctctgggccaccaatgagttcagtctggtgaacgtgaatctgcagaggttcggcatgaatggccagatgctgtgtaaccttggcaaggaacgctttctggagctggcacctgactttgtgggtgacattctctgggaacatctggagcaaatgatcaaagaaaaccaagaaaagacagaagatcaatatgaagaaaattcacacctcacctccgttcctcattggattaacagcaatacattaggttttggcacagagcaggcgccctatggaatgcagacacagaattaccccaaaggcggcctcctggacagcatgtgtccggcctccacacccagcgtactcagctctgagcaggagtttcagatgttccccaagtctcggctcagctccgtcagcgtcacctactgctctgtcagtcaggacttcccaggcagcaacttgaatttgctcaccaacaattctgggacgcccaaagaccacgactcccctgagaacggtgcggacagcttcgagagctcagactccctcctccagtcctggaacagccagtcgtccttgctggatgtgcaacgggttccttccttcgagagcttcgaagatgactgcagccagtctctctgcctcaataagccaaccatgtctttcaaggattacatccaagagaggagtgacccggtggagcaaggcaaaccagttatacctgcagctgtgctggccggcttcacaggaagtggacctattcagctgtggcagtttctcctggagctgctatcagacaaatcctgccagtcattcatcagctggactggagacggatgggagtttaagctcgccgaccccgatgaggtggcccgccggtggggaaagaggaaaaataagcccaagatgaactacgagaagctgagccggggcttacgctactattacgacaagaacatcatccacaagacgtcggggaagcgctacgtgtaccgcttcgtgtgcgacctccagaacttgctggggttcacgcccgaggaactgcacgccatcctgggcgtccagcccgacacggaggactgaggtcgccgggaccaccctgagccggccccaggctcgtggactgagtgggaagcccatcctgaccagctgctccgaggacccaggaaaggcaggattgaaaatgtccaggaaagtggccaagaagcagtggccttattgcatcccaaaccacgcctcttgaccaggctgcctcccttgtggcagcaacggcacagctaattctactcacagtgcttttaagtgaaaatggtcgagaaagaggcaccgggaagccgtcctggcgcctggcagtccgtgggacgggatggttctggctgtttgagattctcaaaggagcgagcatgtcgtggacacacacagactatttttagattttcttttgccttttgcaaccaggaacagcaaatgcaaaaactctttgagagggtaggagggtgggaaggaaacaaccatgtcatttcagaagttagtttgtatatattataataatcttataattgttctcagaatcccttaacagttgtatttaacagaaattgtatattgtaatttaaaataattatataactgtatttgaaataagaattcagacatctgaggttttatttcatttttcaatagcacatatggaattttgcaaagatttaatctgccaagggccgactaagagaagttgtaaagtatgtattatttacatttaatagacttacagggataaggcctgtggggggtaatccctgctttttgtgtttttttgtttgtttgtttgtttgtttttggggggttttcttgccttggttgtctggcaaggactttgtacatttgggagtttttatgagaaacttaaatgttattatctgggcttatatctggcctctgctttctcctttaattgtaaagtaaaagctataaagcagtatttttcttgacaaatggcatatgttttccacttctttgcatgcgtttaagtcagtttatacacaaaatggattttattttttagtttaactgtgtttctccgacagctcacctctctctgaccacccagccatttccttcctgtgctccacgttcttctgtgtgattaaaataagaatattatttttggaaatatgcaactccttttcagagatcaggagggatttatgtagcagctatttttactgcaaaagtaattcactggaaaaaaaatgtaatttgtaagaaagctttatttttatctcagctctatgtaaagttaaagttactgtacagagctgaaggacggggggcggtaggggtcttgatgaaacctcttgaacgaagcacagtttgtcccatctttgttcactcgtgtgtctcaaccatcttaatagcatgctgctcctttttgctcagtgtccacagcaagatgacgtgattcttattttcttggacacagactattctgaggcacagagcggggacttaagatgggaaagagaaagcatcggagccattcattcggagaaaacgttttgatcaaaatggagacttttgtagtcgtttcaaaagagcacctgagtcatgtgtattcccggcctttataaatgacccggtcaagttggtttcaaagtccgacaggcttgtctgtttactagctgcgtggccttggacgggtggctgacatctgtaaagaatcctcctgtgatgaaactgaggaatcgggtggccgggcaagctgggaagagcaaagccagagctgcgctgcctcaatacccacaaaagaccattcccagtatacataagcacaggatgtttttctcaagagggatgtatttatcacttggacatctgtttataatataaacagacatgtgactgggaacatcttgctgccaaaagaatcctaggcagtggctcattgtatgtgaggttgaaccacgtgaaattgccaatattaggctggcttttatctacaaagaaggagtttcatggggttcagcctaacagttatggaaactacagtccttataaaccattggcatggtaataaacagatcttaagtataaaaattttgtaattgggcctttactctctcaataataaagtattttgtttatattaagaancacacgaagaaaaacaggcg

SEQ ID NO: 446786 - DNA, 4122 bp, Homo sapiens
ccgtttcctcccctcccctccactcggccgtccctccttcctcctccctcctccctcctcctcccgctcctgaagagcgcgccgcgtgggggacggcccggttacttcctccagagactgacgagtgcggtgtcgctccagctcagagctcccggagccgcccggccagcgtccggcctccctgatcgtctctggccggcgccctcgccctcgcccggcgcgcaccgagcagccgcgggcgccgagcagccaccgtcccgaccaagcgccggccctgcccgcagcggcagggaaacgcaggcctggtagggggtcctgcccagtggatgtcccggcgaacatgatttcgcgaacgggagtgggggcacaggagagcgtgtccgaggtggcctggcgccccggctttgagggtgacttcctggagcggcgccgggcccggaggatctggggcgcccaagacacctgaaggctgcggcaccgcgggaacctgcggggcgcggggtgccatggtcacctgctcgccgcgtccagggcccgggctggggacccctcggtcgtgcgaggagagcgtggggaacctgtcggaaatgagatctggttgcgctgggctgcctttattttctcgttcctacagcatttgaatgaagagatgaatgatttcggaatcaagaatatggaccaggtagcccctgtggctaacagttacagagggacactcaagcgccagccagcctttgacacctttgatgggtccctgtttgctgtttttccttctctaaatgaagagcaaacactgcaagaagtgccaacaggcttggattccatttctcatgactccgccaactgtgaattgcctttgttaaccccgtgcagcaaggctgtgatgagtcaagccttaaaagctaccttcagtggcttcaaaaaggaacagcggcgcctgggcattccaaagaacccctggctgtggagtgagcaacaggtatgccagtggcttctctgggccaccaatgagttcagtctggtgaacgtgaatctgcagaggttcggcatgaatggccagatgctgtgtaaccttggcaaggaacgctttctggagctggcacctgactttgtgggtgacattctctgggaacatctggagcaaatgatcaaagaaaaccaagaaaagacagaagatcaatatgaagaaaattcacacctcacctccgttcctcattggattaacagcaatacattaggttttggcacagagcaggcgccctatggaatgcagacacagaattaccccaaaggcggcctcctggacagcatgtgtccggcctccacacccagcgtactcagctctgagcaggagtttcagatgttccccaagtctcggctcagctccgtcagcgtcacctactgctctgtcagtcaggacttcccaggcagcaacttgaatttgctcaccaacaattctgggacgcccaaagaccacgactcccctgagaacggtgcggacagcttcgagagctcagactccctcctccagtcctggaacagccagtcgtccttgctggatgtgcaacgggttccttccttcgagagcttcgaagatgactgcagccagtctctctgcctcaataagccaaccatgtctttcaaggattacatccaagagaggagtgacccggtggagcaaggcaaaccagttatacctgcagctgtgctggccggcttcacaggaagtggacctattcagctgtggcagtttctcctggagctgctatcagacaaatcctgccagtcattcatcagctggactggagacggatgggagtttaagctcgccgaccccgatgaggtggcccgccggtggggaaagaggaaaaataagcccaagatgaactacgagaagctgagccggggcttacgctactattacgacaagaacatcatccacaagacgtcggggaagcgctacgtgtaccgcttcgtgtgcgacctccagaacttgctggggttcacgcccgaggaactgcacgccatcctgggcgtccagcccgacacggaggactgaggtcgccgggaccaccctgagccggccccaggctcgtggactgagtgggaagcccatcctgaccagctgctccgaggacccaggaaaggcaggattgaaaatgtccaggaaagtggccaagaagcagtggccttattgcatcccaaaccacgcctcttgaccaggctgcctcccttgtggcagcaacggcacagctaattctactcacagtgcttttaagtgaaaatggtcgagaaagaggcaccgggaagccgtcctggcgcctggcagtccgtgggacgggatggttctggctgtttgagattctcaaaggagcgagcatgtcgtggacacacacagactatttttagattttcttttgccttttgcaaccaggaacagcaaatgcaaaaactctttgagagggtaggagggtgggaaggaaacaaccatgtcatttcagaagttagtttgtatatattataataatcttataattgttctcagaatcccttaacagttgtatttaacagaaattgtatattgtaatttaaaataattatataactgtatttgaaataagaattcagacatctgaggttttatttcatttttcaatagcacatatggaattttgcaaagatttaatctgccaagggccgactaagagaagttgtaaagtatgtattatttacatttaatagacttacagggataaggcctgtggggggtaatccctgctttttgtgtttttttgtttgtttgtttgtttgtttttggggggttttcttgccttggttgtctggcaaggactttgtacatttgggagtttttatgagaaacttaaatgttattatctgggcttatatctggcctctgctttctcctttaattgtaaagtaaaagctataaagcagtatttttcttgacaaatggcatatgttttccacttctttgcatgcgtttaagtcagtttatacacaaaatggattttattttttagtttaactgtgtttctccgacagctcacctctctctgaccacccagccatttccttcctgtgctccacgttcttctgtgtgattaaaataagaatattatttttggaaatatgcaactccttttcagagatcaggagggatttatgtagcagctatttttactgcaaaagtaattcactggaaaaaaaatgtaatttgtaagaaagctttatttttatctcagctctatgtaaagttaaagttactgtacagagctgaaggacggggggcggtaggggtcttgatgaaacctcttgaacgaagcacagtttgtcccatctttgttcactcgtgtgtctcaaccatcttaatagcatgctgctcctttttgctcagtgtccacagcaagatgacgtgattcttattttcttggacacagactattctgaggcacagagcggggacttaagatgggaaagagaaagcatcggagccattcattcggagaaaacgttttgatcaaaatggagacttttgtagtcgtttcaaaagagcacctgagtcatgtgtattcccggcctttataaatgacccggtcaagttggtttcaaagtccgacaggcttgtctgtttactagctgcgtggccttggacgggtggctgacatctgtaaagaatcctcctgtgatgaaactgaggaatcgggtggccgggcaagctgggaagagcaaagccagagctgcgctgcctcaatacccacaaaagaccattcccagtatacataagcacaggatgtttttctcaagagggatgtatttatcacttggacatctgtttataatataaacagacatgtgactgggaacatcttgctgccaaaagaatcctaggcagtggctcattgtatgtgaggttgaaccacgtgaaattgccaatattaggctggcttttatctacaaagaaggagtttcatggggttcagcctaacagttatggaaactacagtccttataaaccattggcatggtaataaacagatcttaagtataaaaattttgtaattgggcctttactctctcaataataaagtattttgtttatat

SEQ ID NO: 446787 - DNA, 4152 bp, Homo sapiens
ccgtttcctcccctcccctccactcggccgtccctccttcctcctccctcctccctcctcctcccgctcctgaagagcgcgccgcgtgggggacggcccggttacttcctccagagactgacgagtgcggtgtcgctccagctcagagctcccggagccgcccggccagcgtccggcctccctgatcgtctctggccggcgccctcgccctcgcccggcgcgcaccgagcagccgcgggcgccgagcagccaccgtcccgaccaagcgccggccctgcccgcagcggcaggatgaatgatttcggaatcaagaatatggaccaggtagcccctgtggctaacagttacagagggacactcaagcgccagccagcctttgacacctttgatgggtccctgtttgctgtttttccttctctaaatgaagagcaaacactgcaagaagtgccaacaggcttggattccatttctcatgactccgccaactgtgaattgcctttgttaaccccgtgcagcaaggctgtgatgagtcaagccttaaaagctaccttcagtggcttcaaaaaggaacagcggcgcctgggcattccaaagagtaagtactgctttcctgagcctgcactgggtgagaagaaccaacttcagtgcagttgtttgatcttgacttgtttattaagcttttgcttggggtattctgcaaagagtagcatggatgtcgttaacctgagccagtttctgtttcaccccaatcaacccaagacttgatccagaactcattaaatatgtagtagaaggacgcattactggtgtcttgaaatgtgcctgggtcgtgtcagaatggtgacgtgtcatcatggtatcttgctcattcgtgggttctggtgtatgtcggtacttggtgcataaattagggatgacagtggtctcactacctttccactgtttttacctcatgtgttccattttttcttctctcctggtagacccctggctgtggagtgagcaacaggtatgccagtggcttctctgggccaccaatgagttcagtctggtgaacgtgaatctgcagaggttcggcatgaatggccagatgctgtgtaaccttggcaaggaacgctttctggagctggcacctgactttgtgggtgacattctctgggaacatctggagcaaatgatcaaagaaaaccaagaaaagacagaagatcaatatgaagaaaattcacacctcacctccgttcctcattggattaacagcaatacattaggttttggcacagagcaggcgccctatggaatgcagacacagaattaccccaaaggcggcctcctggacagcatgtgtccggcctccacacccagcgtactcagctctgagcaggagtttcagatgttccccaagtctcggctcagctccgtcagcgtcacctactgctctgtcagtcaggacttcccaggcagcaacttgaatttgctcaccaacaattctgggacgcccaaagaccacgactcccctgagaacggtgcggacagcttcgagagctcagactccctcctccagtcctggaacagccagtcgtccttgctggatgtgcaacgggttccttccttcgagagcttcgaagatgactgcagccagtctctctgcctcaataagccaaccatgtctttcaaggattacatccaagagaggagtgacccggtggagcaaggcaaaccagttatacctgcagctgtgctggccggcttcacaggaagtggacctattcagctgtggcagtttctcctggagctgctatcagacaaatcctgccagtcattcatcagctggactggagacggatgggagtttaagctcgccgaccccgatgaggtggcccgccggtggggaaagaggaaaaataagcccaagatgaactacgagaagctgagccggggcttacgctactattacgacaagaacatcatccacaagacgtcggggaagcgctacgtgtaccgcttcgtgtgcgacctccagaacttgctggggttcacgcccgaggaactgcacgccatcctgggcgtccagcccgacacggaggactgaggtcgccgggaccaccctgagccggccccaggctcgtggactgagtgggaagcccatcctgaccagctgctccgaggacccaggaaaggcaggattgaaaatgtccaggaaagtggccaagaagcagtggccttattgcatcccaaaccacgcctcttgaccaggctgcctcccttgtggcagcaacggcacagctaattctactcacagtgcttttaagtgaaaatggtcgagaaagaggcaccgggaagccgtcctggcgcctggcagtccgtgggacgggatggttctggctgtttgagattctcaaaggagcgagcatgtcgtggacacacacagactatttttagattttcttttgccttttgcaaccaggaacagcaaatgcaaaaactctttgagagggtaggagggtgggaaggaaacaaccatgtcatttcagaagttagtttgtatatattataataatcttataattgttctcagaatcccttaacagttgtatttaacagaaattgtatattgtaatttaaaataattatataactgtatttgaaataagaattcagacatctgaggttttatttcatttttcaatagcacatatggaattttgcaaagatttaatctgccaagggccgactaagagaagttgtaaagtatgtattatttacatttaatagacttacagggataaggcctgtggggggtaatccctgctttttgtgtttttttgtttgtttgtttgtttgtttttggggggttttcttgccttggttgtctggcaaggactttgtacatttgggagtttttatgagaaacttaaatgttattatctgggcttatatctggcctctgctttctcctttaattgtaaagtaaaagctataaagcagtatttttcttgacaaatggcatatgttttccacttctttgcatgcgtttaagtcagtttatacacaaaatggattttattttttagtttaactgtgtttctccgacagctcacctctctctgaccacccagccatttccttcctgtgctccacgttcttctgtgtgattaaaataagaatattatttttggaaatatgcaactccttttcagagatcaggagggatttatgtagcagctatttttactgcaaaagtaattcactggaaaaaaaatgtaatttgtaagaaagctttatttttatctcagctctatgtaaagttaaagttactgtacagagctgaaggacggggggcggtaggggtcttgatgaaacctcttgaacgaagcacagtttgtcccatctttgttcactcgtgtgtctcaaccatcttaatagcatgctgctcctttttgctcagtgtccacagcaagatgacgtgattcttattttcttggacacagactattctgaggcacagagcggggacttaagatgggaaagagaaagcatcggagccattcattcggagaaaacgttttgatcaaaatggagacttttgtagtcgtttcaaaagagcacctgagtcatgtgtattcccggcctttataaatgacccggtcaagttggtttcaaagtccgacaggcttgtctgtttactagctgcgtggccttggacgggtggctgacatctgtaaagaatcctcctgtgatgaaactgaggaatcgggtggccgggcaagctgggaagagcaaagccagagctgcgctgcctcaatacccacaaaagaccattcccagtatacataagcacaggatgtttttctcaagagggatgtatttatcacttggacatctgtttataatataaacagacatgtgactgggaacatcttgctgccaaaagaatcctaggcagtggctcattgtatgtgaggttgaaccacgtgaaattgccaatattaggctggcttttatctacaaagaaggagtttcatggggttcagcctaacagttatggaaactacagtccttataaaccattggcatggtaataaacagatcttaagtataaaaattttgtaattgggcctttactctctcaataataaagtattttgtttatat

SEQ ID NO: 446788 - DNA, 3710 bp, Homo sapiens
ccgtttcctcccctcccctccactcggccgtccctccttcctcctccctcctccctcctcctcccgctcctgaagagcgcgccgcgtgggggacggcccggttacttcctccagagactgacgagtgcggtgtcgctccagctcagagctcccggagccgcccggccagcgtccggcctccctgatcgtctctggccggcgccctcgccctcgcccggcgcgcaccgagcagccgcgggcgccgagcagccaccgtcccgaccaagcgccggccctgcccgcagcggcaggatgaatgatttcggaatcaagaatatggaccaggtagcccctgtggctaacagttacagagggacactcaagcgccagccagcctttgacacctttgatgggtccctgtttgctgtttttccttctctaaatgaagagcaaacactgcaagaagtgccaacaggcttggattccatttctcatgactccgccaactgtgaattgcctttgttaaccccgtgcagcaaggctgtgatgagtcaagccttaaaagctaccttcagtggcttcaaaaaggaacagcggcgcctgggcattccaaagaacccctggctgtggagtgagcaacaggtatgccagtggcttctctgggccaccaatgagttcagtctggtgaacgtgaatctgcagaggttcggcatgaatggccagatgctgtgtaaccttggcaaggaacgctttctggagctggcacctgactttgtgggtgacattctctgggaacatctggagcaaatgatcaaagaaaaccaagaaaagacagaagatcaatatgaagaaaattcacacctcacctccgttcctcattggattaacagcaatacattaggttttggcacagagcaggcgccctatggaatgcagacacagaattaccccaaaggcggcctcctggacagcatgtgtccggcctccacacccagcgtactcagctctgagcaggagtttcagatgttccccaagtctcggctcagctccgtcagcgtcacctactgctctgtcagtcaggacttcccaggcagcaacttgaatttgctcaccaacaattctgggacgcccaaagaccacgactcccctgagaacggtgcggacagcttcgagagctcagactccctcctccagtcctggaacagccagtcgtccttgctggatgtgcaacgggttccttccttcgagagcttcgaagatgactgcagccagtctctctgcctcaataagccaaccatgtctttcaaggattacatccaagagaggagtgacccggtggagcaaggcaaaccagttatacctgcagctgtgctggccggcttcacaggaagtggacctattcagctgtggcagtttctcctggagctgctatcagacaaatcctgccagtcattcatcagctggactggagacggatgggagtttaagctcgccgaccccgatgaggtggcccgccggtggggaaagaggaaaaataagcccaagatgaactacgagaagctgagccggggcttacgctactattacgacaagaacatcatccacaagacgtcggggaagcgctacgtgtaccgcttcgtgtgcgacctccagaacttgctggggttcacgcccgaggaactgcacgccatcctgggcgtccagcccgacacggaggactgaggtcgccgggaccaccctgagccggccccaggctcgtggactgagtgggaagcccatcctgaccagctgctccgaggacccaggaaaggcaggattgaaaatgtccaggaaagtggccaagaagcagtggccttattgcatcccaaaccacgcctcttgaccaggctgcctcccttgtggcagcaacggcacagctaattctactcacagtgcttttaagtgaaaatggtcgagaaagaggcaccgggaagccgtcctggcgcctggcagtccgtgggacgggatggttctggctgtttgagattctcaaaggagcgagcatgtcgtggacacacacagactatttttagattttcttttgccttttgcaaccaggaacagcaaatgcaaaaactctttgagagggtaggagggtgggaaggaaacaaccatgtcatttcagaagttagtttgtatatattataataatcttataattgttctcagaatcccttaacagttgtatttaacagaaattgtatattgtaatttaaaataattatataactgtatttgaaataagaattcagacatctgaggttttatttcatttttcaatagcacatatggaattttgcaaagatttaatctgccaagggccgactaagagaagttgtaaagtatgtattatttacatttaatagacttacagggataaggcctgtggggggtaatccctgctttttgtgtttttttgtttgtttgtttgtttgtttttggggggttttcttgccttggttgtctggcaaggactttgtacatttgggagtttttatgagaaacttaaatgttattatctgggcttatatctggcctctgctttctcctttaattgtaaagtaaaagctataaagcagtatttttcttgacaaatggcatatgttttccacttctttgcatgcgtttaagtcagtttatacacaaaatggattttattttttagtttaactgtgtttctccgacagctcacctctctctgaccacccagccatttccttcctgtgctccacgttcttctgtgtgattaaaataagaatattatttttggaaatatgcaactccttttcagagatcaggagggatttatgtagcagctatttttactgcaaaagtaattcactggaaaaaaaatgtaatttgtaagaaagctttatttttatctcagctctatgtaaagttaaagttactgtacagagctgaaggacggggggcggtaggggtcttgatgaaacctcttgaacgaagcacagtttgtcccatctttgttcactcgtgtgtctcaaccatcttaatagcatgctgctcctttttgctcagtgtccacagcaagatgacgtgattcttattttcttggacacagactattctgaggcacagagcggggacttaagatgggaaagagaaagcatcggagccattcattcggagaaaacgttttgatcaaaatggagacttttgtagtcgtttcaaaagagcacctgagtcatgtgtattcccggcctttataaatgacccggtcaagttggtttcaaagtccgacaggcttgtctgtttactagctgcgtggccttggacgggtggctgacatctgtaaagaatcctcctgtgatgaaactgaggaatcgggtggccgggcaagctgggaagagcaaagccagagctgcgctgcctcaatacccacaaaagaccattcccagtatacataagcacaggatgtttttctcaagagggatgtatttatcacttggacatctgtttataatataaacagacatgtgactgggaacatcttgctgccccaatattaggctggcttttatctacaaagaaggagtttcatggggttcagcctaacagttatggaaactacagtccttataaaccattggcatggtaataaacagatcttaagtataaaaattttgtaattgggcctttactctctcaataataaagtattttgtttatat

SEQ ID NO: 446789 - DNA, 2988 bp, Homo sapiens
caggggattcgggataacgggcaggagacagaagatcaggagatgaagagatatgtcacagctcgacctccgttccctcatgggattaacagcaatagagtatagttttggcacagagcaggcgccctatggaatgcagacacagaattaccccaaaggcggcctcctggacagcatgtgtccggcctccacacccagcgtactcagctctgagcaggagtttcagatgttccccaagtctcggctcagctccgtcagcgtcacctactgctctgtcagtcaggacttcccaggcagcaacttgaatttgctcaccaacaattctgggacgcccaaagaccacgactcccctgagaacggtgcggacagcttcgagagctcagactccctcctccagtcctggaacagccagtcgtccttgctggatgtgcaacgggttccttccttcgagagcttcgaagatgactgcagccagtctctctgcctcaataagccaaccatgtctttcaaggattacatccaagagaggagtgacccggtggagcaaggcaaaccagttatacctgcagctgtgctggccggcttcacaggaagtggacctattcagctgtggcagtttctcctggagctgctatcagacaaatcctgccagtcattcatcagctggactggagacggatgggagtttaagctcgccgaccccgatgaggtggcccgccggtggggaaagaggaaaaataagcccaagatgaactacgagaagctgagccggggcttacgctactattacgacaagaacatcatccacaagacgtcggggaagcgctacgtgtaccgcttcgtgtgcgacctccagaacttgctggggttcacgcccgaggaactgcacgccatcctgggcgtccagcccgacacggaggactgaggtcgccgggaccaccctgagccggccccaggctcgtggactgagtgggaagcccatcctgaccagctgctccgaggacccaggaaaggcaggattgaaaatgtccaggaaagtggccaagaagcagtggccttattgcatcccaaaccacgcctcttgaccaggctgcctcccttgtggcagcaacggcacagctaattctactcacagtgcttttaagtgaaaatggtcgagaaagaggcaccgggaagccgtcctggcgcctggcagtccgtgggacgggatggttctggctgtttgagattctcaaaggagcgagcatgtcgtggacacacacagactatttttagattttcttttgccttttgcaaccaggaacagcaaatgcaaaaactctttgagagggtaggagggtgggaaggaaacaaccatgtcatttcagaagttagtttgtatatattataataatcttataattgttctcagaatcccttaacagttgtatttaacagaaattgtatattgtaatttaaaataattatataactgtatttgaaataagaattcagacatctgaggttttatttcatttttcaatagcacatatggaattttgcaaagatttaatctgccaagggccgactaagagaagttgtaaagtatgtattatttacatttaatagacttacagggataaggcctgtggggggtaatccctgctttttgtgtttttttgtttgtttgtttgtttgtttttggggggttttcttgccttggttgtctggcaaggactttgtacatttgggagtttttatgagaaacttaaatgttattatctgggcttatatctggcctctgctttctcctttaattgtaaagtaaaagctataaagcagtatttttcttgacaaatggcatatgttttccacttctttgcatgcgtttaagtcagtttatacacaaaatggattttattttttagtttaactgtgtttctccgacagctcacctctctctgaccacccagccatttccttcctgtgctccacgttcttctgtgtgattaaaataagaatattatttttggaaatatgcaactccttttcagagatcaggagggatttatgtagcagctatttttactgcaaaagtaattcactggaaaaaaaatgtaatttgtaagaaagctttatttttatctcagctctatgtaaagttaaagttactgtacagagctgaaggacggggggcggtaggggtcttgatgaaacctcttgaacgaagcacagtttgtcccatctttgttcactcgtgtgtctcaaccatcttaatagcatgctgctcctttttgctcagtgtccacagcaagatgacgtgattcttattttcttggacacagactattctgaggcacagagcggggacttaagatgggaaagagaaagcatcggagccattcattcggagaaaacgttttgatcaaaatggagacttttgtagtcgtttcaaaagagcacctgagtcatgtgtattcccggcctttataaatgacccggtcaagttggtttcaaagtccgacaggcttgtctgtttactagctgcgtggccttggacgggtggctgacatctgtaaagaatcctcctgtgatgaaactgaggaatcgggtggccgggcaagctgggaagagcaaagccagagctgcgctgcctcaatacccacaaaagaccattcccagtatacataagcacaggatgtttttctcaagagggatgtatttatcacttggacatctgtttataatataaacagacatgtgactgggaacatcttgctgccaaaagaatcctaggcagtggctcattgtatgtgaggttgaaccacgtgaaattgccaatattaggctggcttttatctacaaagaaggagtttcatggggttcagcctaacagttatggaaactacagtccttataaaccattggcatggtaataaacagatcttaagtataaaaattttgtaattgggcctttactctctcaataataaagtattttgtttatat

SEQ ID NO: 446790 - DNA, 3467 bp, Homo sapiens
ccgtttcctcccctcccctccactcggccgtccctccttcctcctccctcctccctcctcctcccgctcctgaagagcgcgccgcgtgggggacggcccggttacttcctccagagactgacgagtgcggtgtcgctccagctcagagctcccggagccgcccggccagcgtccggcctccctgatcgtctctggccggcgccctcgccctcgcccggcgcgcaccgagcagccgcgggcgccgagcagccaccgtcccgaccaagcgccggccctgcccgcagcggcaggatgaatgatttcggaatcaagaatatggaccaggtagcccctgtggctaacagttacagagggacactcaagcgccagccagcctttgacacctttgatgggtccctgtttgctgtttttccttctctaaatgaagagcaaacactgcaagaagtgccaacaggcttggattccatttctcatgactccgccaactgtgaattgcctttgttaaccccgtgcagcaaggctgtgatgagtcaagccttaaaagctaccttcagtggcttcaaaaaggaacagcggcgcctgggcattccaaagaacccctggctgtggagtgagcaacaggtatgccagtggcttctctgggccaccaatgagttcagtctggtgaacgtgaatctgcagaggttcggcatgaatggccagatgctgtgtaaccttggcaaggaacgctttctggagctggcacctgactttgtgggtgacattctctgggaacatctggagcaaatgatcaaagaaaaccaagaaaagacagaagatcaatatgaagaaaattcacacctcacctccgttcctcattggattaacagcaatacattaggttttggcacagagcaggcgccctatggaatgcagacacagaattaccccaaaggcggcctcctggacagcatgtgtccggcctccacacccagcgtactcagctctgagcaggagtttcagatgttccccaagtctcggctcagctccgtcagcgtcacctactgctctgtcagtcaggacttcccaggcagcaacttgaatttgctcaccaacaattctgggacgcccaaagaccacgactcccctgagaacggtgcggacagcttcgagagctcagactccctcctccagtcctggaacagccagtcgtccttgctggatgtgcaacgggttccttccttcgagagcttcgaagatgactgcagccagtctctctgcctcaataagccaaccatgtctttcaaggattacatccaagagaggagtgacccggtggagcaaggcaaaccagttatacctgcagctgtgctggccggcttcacaggaagtggacctattcagctgtggcagtttctcctggagctgctatcagacaaatcctgccagtcattcatcagctggactggagacggatgggagtttaagctcgccgaccccgatgaggtggcccgccggtggggaaagaggaaaaataagcccaagatgaactacgagaagctgagccggggcttacgctactattacgacaagaacatcatccacaagacgtcggggaagcgctacgtgtaccgcttcgtgtgcgacctccagaacttgctggggttcacgcccgaggaactgcacgccatcctgggcgtccagcccgacacggaggactgaggtcgccgggaccaccctgagccggccccaggctcgtggactgagtgggaagcccatcctgaccagctgctccgaggacccaggaaaggcaggattgaaaatgtccaggaaagtggccaagaagcagtggccttattgcatcccaaaccacgcctcttgaccaggctgcctcccttgtggcagcaacggcacagctaattctactcacagtgcttttaagtgaaaatggtcgagaaagaggcaccgggaagccgtcctggcgcctggcagtccgtgggacgggatggttctggctgtttgagattctcaaaggagcgagcatgtcgtggacacacacagactatttttagattttcttttgccttttgcaaccaggaacagcaaatgcaaaaactctttgagagggtaggagggtgggaaggaaacaaccatgtcatttcagaagttagtttgtatatattataataatcttataattgttctcagaatcccttaacagttgtatttaacagaaattgtatattgtaatttaaaataattatataactgtatttgaaataagaattcagacatctgaggttttatttcatttttcaatagcacatatggaattttgcaaagatttaatctgccaagggccgactaagagaagttgtaaagtatgtattatttacatttaatagacttacagggataaggcctgtggggggtaatccctgctttttgtgtttttttgtttgtttgtttgtttgtttttggggggttttcttgccttggttgtctggcaaggactttgtacatttgggagtttttatgagaaacttaaatgttattatctgggcttatatctggcctctgctttctcctttaattgtaaagtaaaagctataaagcagtatttttcttgacaaatggcatatgttttccacttctttgcatgcgtttaagtcagtttatacacaaaatggattttattttttagtttaactgtgtttctccgacagctcacctctctctgaccacccagccatttccttcctgtgctccacgttcttctgtgtgattaaaataagaatattatttttggaaatatgcaactccttttcagagatcaggagggatttatgtagcagctatttttactgcaaaagtaattcactggtaaagttaaagttactgtacagagctgaaggacggggggcggtaggggtcttgatgaaacctcttgaacgaagcacagtttgtcccatctttgttcactcgtgtgtctcaaccatcttaatagcatgctgctcctttttgctcagtgtccacagcaagatgacgtgattcttattttcttggacacagactattctgaggcacagagcggggacttaagatgggaaagagaaagcatcggagccattcattcggagaaaacgttttgatcaaaatggagacttttgtagtcgtttcaaaagagcacctgagtcatgtgtattcccggcctttataaatgacccggtcaagttggtttcaaagtccgacaggcttgtctgtttactagctgcgtggccttggacgggtggctgacatctgtaaagaatcctcctgtgatgaaactgaggaatcgggtggccgggcaagctgggaagagcaaagccagagctgcgcttggctcaataccccacagcaccatttccccagggatacattatatacccagggattgtcttttcttaaaggggggaaggatttttaattcacttgggccttttggggct

SEQ ID NO: 446791 - DNA, 2337 bp, Homo sapiens
tatagatagctgaactcagctggcaaggatgggggttaagctcgccgaccccgatgaggtggcccgccggtggggaaagaggaaaaataagcccaagatgaactacgagaagctgagccggggcttacgctactattacgacaagaacatcatccacaagacgtcggggaagcgctacgtgtaccgcttcgtgtgcgacctccagaacttgctggggttcacgcccgaggaactgcacgccatcctgggcgtccagcccgacacggaggactgaggtcgccgggaccaccctgagccggccccaggctcgtggactgagtgggaagcccatcctgaccagctgctccgaggacccaggaaaggcaggattgaaaatgtccaggaaagtggccaagaagcagtggccttattgcatcccaaaccacgcctcttgaccaggctgcctcccttgtggcagcaacggcacagctaattctactcacagtgcttttaagtgaaaatggtcgagaaagaggcaccgggaagccgtcctggcgcctggcagtccgtgggacgggatggttctggctgtttgagattctcaaaggagcgagcatgtcgtggacacacacagactatttttagattttcttttgccttttgcaaccaggaacagcaaatgcaaaaactctttgagagggtaggagggtgggaaggaaacaaccatgtcatttcagaagttagtttgtatatattataataatcttataattgttctcagaatcccttaacagttgtatttaacagaaattgtatattgtaatttaaaataattatataactgtatttgaaataagaattcagacatctgaggttttatttcatttttcaatagcacatatggaattttgcaaagatttaatctgccaagggccgactaagagaagttgtaaagtatgtattatttacatttaatagacttacagggataaggcctgtggggggtaatccctgctttttgtgtttttttgtttgtttgtttgtttgtttttggggggttttcttgccttggttgtctggcaaggactttgtacatttgggagtttttatgagaaacttaaatgttattatctgggcttatatctggcctctgctttctcctttaattgtaaagtaaaagctataaagcagtatttttcttgacaaatggcatatgttttccacttctttgcatgcgtttaagtcagtttatacacaaaatggattttattttttagtttaactgtgtttctccgacagctcacctctctctgaccacccagccatttccttcctgtgctccacgttcttctgtgtgattaaaataagaatattatttttggaaatatgcaactccttttcagagatcaggagggatttatgtagcagctatttttactgcaaaagtaattcactggaaaaaaaatgtaatttgtaagaaagctttatttttatctcagctctatgtaaagttaaagttactgtacagagctgaaggacggggggcggtaggggtcttgatgaaacctcttgaacgaagcacagtttgtcccatctttgttcactcgtgtgtctcaaccatcttaatagcatgctgctcctttttgctcagtgtccacagcaagatgacgtgattcttattttcttggacacagactattctgaggcacagagcggggacttaagatgggaaagagaaagcatcggagccattcattcggagaaaacgttttgatcaaaatggagacttttgtagtcgtttcaaaagagcacctgagtcatgtgtattcccggcctttataaatgacccggtcaagttggtttcaaagtccgacaggcttgtctgtttactagctgcgtggccttggacgggtggctgacatctgtaaagaatcctcctgtgatgaaactgaggaatcgggtggccgggcaagctgggaagagcaaagccagagctgcgctgcctcaatacccacaaaagaccattcccagtatacataagcacaggatgtttttctcaagagggatgtatttatcacttggacatctgtttataatataaacagacatgtgactgggaacatcttgctgccaaaagaatcctaggcagtggctcattgtatgtgaggttgaaccacgtgaaattgccaatattaggctggcttttatctacaaagaaggagtttcatggggttcagcctaacagttatggaaactacagtccttataaaccattggcatggtaataaacagatcttaagtataaaaattttgtaattgggcctttactctctcaataataaagtattttgtttatat

SEQ ID NO: 446792 - DNA, 1802 bp, Homo sapiens
ccgtttcctcccctcccctccactcggccgtccctccttcctcctccctcctccctcctcctcccgctcctgaagagcgcgccgcgtgggggacggcccggttacttcctccagagactgacgagtgcggtgtcgctccagctcagagctcccggagccgcccggccagcgtccggcctccctgatcgtctctggccggcgccctcgccctcgcccggcgcgcaccgagcagccgcgggcgccgagcagccaccgtcccgaccaagcgccggccctgcccgcagcggcaggatgaatgatttcggaatcaagaatatggaccaggtagcccctgtggctaacagttacagagggacactcaagcgccagccagcctttgacacctttgatgggtccctgtttgctgtttttccttctctaaatgaagagcaaacactgcaagaagtgccaacaggcttggattccatttctcatgactccgccaactgtgaattgcctttgttaaccccgtgcagcaaggctgtgatgagtcaagccttaaaagctaccttcagtggcttcaaaaaggaacagcggcgcctgggcattccaaagagtaagtactgctttcctgagcctgcactgggtgagaagaaccaacttcagtgcagttgtttgatcttgacttgtttattaagcttttgcttggggtattctgcaaagagtagcatggatgtcgttaacctgagccagtttctgtttcaccccaatcaacccaagacttgatccagaactcattaaatatgtagtagaaggacgcattactggtgtcttgaaatgtgcctgggtcgtgtcagaatggtgacgtgtcatcatggtatcttgctcattcgtgggttctggtgtatgtcggtacttggtgcataaattagggatgacagtggtctcactacctttccactgtttttacctcatgtgttccattttttcttctctcctggtagacccctggctgtggagtgagcaacaggtatgccagtggcttctctgggccaccaatgagttcagtctggtgaacgtgaatctgcagaggttcggcatgaatggccagatgctgtgtaaccttggcaaggaacgctttctggagctggcacctgactttgtgggtgacattctctgggaacatctggagcaaatgatcaaaggtaccagctgaacgtcttacttctccttgtccaggatgagctgtggccgggaagactgattgggaaagtcacgtgggtgttcttcaaccttagggttgccacttgaaatgacatagagtaccttgcctcaaaatgccactcaagtgagtcagatatatggcagtgattatagatttttatcccactttatgtgagtgtgtgtgtgtgtgtgtgtgtgtgtgtatagcatcaagtatagccacaaggtagtagccttagtcactaaattgtttgctattgctggctgtattcatcacgggagtccatgttgactcagatatgtaggacagcaagaattcccacgtcttctgagctcaccttacagagctaagagatatggcagccttaatgaaaggggggagcctttactcacataaaccctgtgaattctactgtaaattttcctacatccaaatggaatgtattttggatgttgaggattgttgagggggcggggtctgtttttaaacaagtgagaaattgatatatatttacacgctatcatattgtacagaaactggccattgatcagtagaaatctcaccaaatacagagaaagtcttgattcaaaacttaaaa

SEQ ID NO: 446793 - DNA, 905 bp, Homo sapiens
ggccggcggagtttcttcagaggaactaccgccctgggaggaagcgtctgtttagtttcaacacagacgactgggcttgggagcctacgaggttgcagtctggagggcgccaacagcagctaccagggctgcttttcctgaacacgctgcaagcacgtcaaggtagtcggagtcccctaacaatggataaattcgtcattcgaacgcctagaatccagaatagccctcagaagaaagattctggaggaaaggtttacaagcaggccacgattgaatctctgaagagagttgtggttgtagaagacataaaaagatggaaaactatgctggagcttcctgatcaaaccaaagagaatcttgttgaagccttacaagaattaaagaagaaaataccctccagggaagtgttaaaatcaacaaggataggtcacactgtgaacaagatgcgtaaacactcagattcagaagtggcttctcttgccagagaagtttacactgagtggaaaactttcactgaaaaacattcaaatagaccttctattgaagttagaagtgatcccaaaaccgagtcgttgaggaaaaatgctcagaaattactctcagaagccttggaattaaagatggatcacctactggttgaaaatagtgaacgtggatgaagttggtggtgaggccctgggcaggctgctggtggtctacccttggacccagaggttctttgagtcctttggggatctgtccactcctgatgctgttatgggcaaccctaaggtgaaggctcatggcaagaaagtgctcggtgcctttagtgatggcctggctcacctggacaacctcaagggcacctttgccacactgagtgagctgcactgtgacaagctgcacgtggatcctgagaacttcag

SEQ ID NO: 446794 - DNA, 780 bp, Homo sapiens
ggccggcggagtttcttcagaggaactaccgccctgggaggaagcgtctgtttagtttcaacacagacgactgggcttgggagcctgcgagagccagccaactaccccttcttcccagagctcacttatctgaacgtttcagctctccctggaagaccttctgcgttggtctccagagcccccatgctgaggctactaatgaggaactggcccgaagcctcccacacctcagggtttatttgaatacgctggcgctctcagtttagggctctgtagaagatacataatgaaatttctcttgaaatgaattactgcagtagaaaaaagtacatacatatatatgttaaaatgaaatatctctacacaggcctgttttaacaattacgtaaataatacttgtttttttaaaagtaatagtaagctgggaacttttttttctaaaacaaaaggtggagttcgttcactgaaaagtgttttgagttgagaaggggtacagttggtgaaatttaaaaatgatggaacaaggatttgaggaatgtagaagactcaaggaagtggggattagattaggggagactggagcacgtttgtaatctgaaaaatgaaaacaacaatacctacttaatacaatgggtgagagaagtaagcaatatttttacaaaactatataaagatccaggtaaaggttaataaactgtcttaggaaaagtgcctagtatttagaaggtaggcaataatgttagtcccgtcccttctccccttgcttttcacctcgtgccg

SEQ ID NO: 446795 - DNA, 1994 bp, Homo sapiens
ggccggcggagtttcttcagaggaactaccgccctgggaggaagcgtctgtttagtttcaacacagacgactgggcttgggagcctacgaggttgcagtctggagggcgccaacagcagctaccagggctgcttttcctgaacacgctgcaagcacgtcaaggtagtcggagtcccctaacaatggataaattcgtcattcgaacgcctagaatccagaatagccctcagaagaaagattctggaggaaaggtttacaagcaggccacgattgaatctctgaagagagttgtggttgtagaagacataaaaagatggaaaactatgctggagcttcctgatcaaaccaaagagaatcttgttgaagccttacaagaattaaagaagaaaataccctccagggaagtgttaaaatcaacaaggataggtcacactgtgaacaagatgcgtaaacactcagattcagaagtggcttctcttgccagagaagtttacactgagtggaaaactttcactgaaaaacattcaaatagaccttctattgaagttagaagtgatcccaaaaccgagtcgttgaggaaaaatgctcagaaattactctcagaagccttggaattaaagatggatcacctactggttgaaaatattgaacgggaaacgtttcatctctgctcccgcctcattaatgggccgtaccggcggacggtgagagccctggtcttcacattaaagcaccgagctgaaatccgggctcaggtgaagagcggctcgctgccagtcggcacgtttgtacagacccacaaaaagtgacctgaggacggttccagccctgggccaggcagagaggaaaatgggcctgtctctgccgttcaaagacgcttttgagtttgggtgatggctgatgctggctgtgctagattttcccatggtgccgttcctttgcagacagaggattcggagagccctaggagacaggcctgcaggaatgtgcttcattagctgcagtgcgctggtgctgcctaacagaacgcacactggctgtcactaggaagcgccatacggttgctatcacccaacatggtgaaagggtgatggatttcactgtgaatatgccaaggacacctctaaacttcccccatgtcagtcagatgaagttactactatatttcaccaccctgcaggtaactgaaactcaattaccgctgccgctcactcggttccatccccctgagtttagatagctctggtgcctctcagaactcccctgtctgttctctttgctctatcccaggggtgagcctgcgagagccagccaactaccccttcttcccagagctcacttatctgaacgtttcagctctccctggaagaccttctgcgttggtctccagagcccccatgctgaggctactaatgaggaactggcccgaagcctcccacacctcagggtttatttgaatacgctggcgctctcagtttagggctctgtagaagatacataatgaaatttctcttgaaatgaattactgcagtagaaaaaagtacatacatatatatgttaaaatgaaatatctctacacaggcctgttttaacaattacgtaaataatacttgtttttttaaaagtaatagtaagctgggaacttttttttctaaaacaaaaggtggagttcgttcactgaaaagtgttttgagttgagaaggggtacagttggtgaaatttaaaaatgatggaacaaggatttgaggaatgtagaagactcaaggaagtggggattagattaggggagactggagcacgtttgtaatctgaaaaatgaaaacaacaatacctacttaatacaatgggtgagagaagtaagcaatatttttacaaaactatataaagatccaggtaaaggttaataaactgtcttaggaaaagtgcctagtatttagaaggtaggcaataatgttagtcccgtcccttctccccttgcttttcacctcgtgccg

SEQ ID NO: 446796 - DNA, 2326 bp, Homo sapiens
tggagactgaaagcggcggaagggacgctggaatgtggagcggttgtggggcggcagctgcggaactgcgcgattgtggttcccgccgtatttcccgttccccatctagtaactcccatctcagcccacgtatctccctgagtggaaatctcgggccccagaccagtcgattgggaggtccgccctccccttcagcgacttggtctgtgttttggcagttgccgcgacaacagtcacttccgggaaggggctctgcgaatctccttccgtcggtccgctcagaatcagctgtcctctcagactgtgtgggtggtttccccggccgcagctccgtacgggcttggattgctgggcctcggtgcaccccagcctcccccactcgggttctgagcttgagctggcggctctttaactctgcttcactgttgctcttggcaacatccacttccgggagcgagtgccgtttcccccgctcaccgcgggctagggagcgtgggattccggactgtgagcggctgttagtgcgtcgcagctgctggcgatccggcgaccctcggccggcaggacccgcgggccacgcagccggggccttctcaacgcctcagtacctcggcgggaccgccatggttctgctgcacgtgaagcggggcgacgagagccagttcctgctgcaggcgcctgggagtaccgagctggaggagctcacggtgcaggtggcccgggtctataatgggcggctcaaggtgcagcgcctctgctcagaaatggaagaattagccgaacatggcatatttctccctcctaatatgcaaggactgaccgatgatcagattgaagaattgaaattgaaggatgaatggggtgaaaaatgcgtacccagcggaggtgcagtgtttaaaaaggatgatattggacgaaggaatgggcaagctccaaatgagaagatgaagcaagtgttaaagaagactatagaagaagccaaagcaataatatctaagaaacaagtggaagccggtgtctgtgttaccatggagatggtgaaagatgccttggaccagcttcgaggcgcggtgatgattgtttaccccatggggttgccaccgtatgatcccatccgcatggagtttgaaaataaggaagacttgtcgggaacacaggcagggctcaacgtcattaaagaggcagaggcgcagctgtggtgggcagccaaggagctgagaagaacgaagaagctttcagactacgtggggaagaatgaaaaaaccaaaattatcgccaagattcagcaaaggggacagggagctccagcccgagagcctattattagcagtgaggagcagaagcagctgatgctgtactatcacagaagacaagaggagctcaagagattggaagaaaatgatgatgatgcctatttaaactcaccatgggcggataacactgctttgaaaagacattttcatggagtgaaagacataaagtggagaccaagatgaagttcaccagctgatgacacttccaaagagattagctcacctttctcctaggcaattataatttaaaaaaaaaaaaaaggccacttactgccctctgtaaaagatgttaacatttctagttttcttttagtgtgaatttttaaaatagcagttattcaaggttttagaacttaataaatacctagtcagaagaaaatgtgtaaatcgtttttgtttcaggactatttagtatgtcatggttttctttgataaaatactaaacttttggccgggcgcggtggctcacgcctgtaatcccagcactttgggaggccgaggcaggcagatcacgaggtcaggagatcaagaccatccaggctaacacggtgaaaccccgtctctactaaaaatacaaaaaattagccgggcatggtggcaggcgcctgtagtcccagctactcgggaggctgaggcaggagaatggcgtgaacccgggaggtggagcttacagtgagccaagatcactgccactgcactctatcctgggcaacagagcgaaactcttgtctcaaaaaaaaaaaaaaaaaaaaaaaaagctacacttttttttcttcctgattgttttatattctcatgataactggtttattggaggaaagctgatgactggcagtgaccactagtgaccactagatgccgccaggcactcagcatgctttttctcctggccctctagatctattggaagctgaactcccagccttgctggagagacttctctaaccctgctgcggggtctaactgtagccttctttaaccctgctgcggggtctaactgtagccttctttaa

SEQ ID NO: 446797 - DNA, 2624 bp, Homo sapiens
tggagactgaaagcggcggaagggacgctggaatgtggagcggttgtggggcggcagctgcggaactgcgcgattgtggttcccgccgtatttcccgttccccatctagtaactcccatctcagcccacgtatctccctgagtggaaatctcgggccccagaccagtcgattgggaggtccgccctccccttcagcgacttggtctgtgttttggcagttgccgcgacaacagtcacttccgggaaggggctctgcgaatctccttccgtcggtccgctcagaatcagctgtcctctcagactgtgtgggtggtttccccggccgcagctccgtacgggcttggattgctgggcctcggtgcaccccagcctcccccactcgggttctgagcttgagctggcggctctttaactctgcttcactgttgctcttggcaacatccacttccgggagcgagtgccgtttcccccgctcaccgcgggctagggagcgtgggattccggactgtgagcggctgttagtgcgtcgcagctgctggcgatccggcgaccctcggccggcaggacccgcgggccacgcagccggggccttctcaacgcctcagtacctcggcgggaccgccatggttctgctgcacgtgaagcggggcgacgagagccagttcctgctgcaggcgcctgggagtaccgagctggaggagctcacggtgcaggtggcccgggtctataatgggcggctcaaggtgcagcgcctctgctcagaaatggaagaattagccgaacatggcatatttctccctcctaatatgcaaggactgaccgatgatcagattgaagaattgaaattgaaggatgaatggggtgaaaaatgcgtacccagcggaggtgcagtgtttaaaaaggatgatattggacgaaggaatgggcaagctccaaatgagaagatgaagcaagtgttaaagaagactatagaagaagccaaagcaataatatctaagaaacaagtggaagccggtgtctgtgttaccatggagatggtgaaagatgccttggaccagcttcgaggcgcggtgatgattgtttaccccatggggttgccaccgtatgatcccatccgcatggagtttgaaaataaggaagacttgtcgggaacacaggcagggctcaacgtcattaaagaggcagaggcgcagctgtggtgggcagccaaggagctgagaagaacgaagaagctttcagactacgtggggaagaatgaaaaaaccaaaattatcgccaagattcagcaaaggggacagggagctccagcccgagagcctattattagcagtgaggagcagaagcagctgatgctgtactatcacagaagacaagaggagctcaaggtagcaggggacagatgggctttctgcagtgctggcgcccacacatagcctgtgtgccttacctggggctgctggggagcagtgagctctgcagaatgccggggaggggtctttctagagcttctgtctgcaggtctgtcggggtcctgccaggtgtcccctggtgttagacatggcagtatcctgctcctagagggcagggagagggggaggtcagtcatggactctttcttcagtctctttatgtgcaaaacactttcctgaaatgcctgcctgaataaaacatacttatttccagagattggaagaaaatgatgatgatgcctatttaaactcaccatgggcggataacactgctttgaaaagacattttcatggagtgaaagacataaagtggagaccaagatgaagttcaccagctgatgacacttccaaagagattagctcacctttctcctaggcaattataatttaaaaaaaaaaaaaaggccacttactgccctctgtaaaagatgttaacatttctagttttcttttagtgtgaatttttaaaatagcagttattcaaggttttagaacttaataaatacctagtcagaagaaaatgtgtaaatcgtttttgtttcaggactatttagtatgtcatggttttctttgataaaatactaaacttttggccgggcgcggtggctcacgcctgtaatcccagcactttgggaggccgaggcaggcagatcacgaggtcaggagatcaagaccatccaggctaacacggtgaaaccccgtctctactaaaaatacaaaaaattagccgggcatggtggcaggcgcctgtagtcccagctactcgggaggctgaggcaggagaatggcgtgaacccgggaggtggagcttacagtgagccaagatcactgccactgcactctatcctgggcaacagagcgaaactcttgtctcaaaaaaaaaaaaaaaaaaaaaaaaagctacacttttttttcttcctgattgttttatattctcatgataactggtttattggaggaaagctgatgactggcagtgaccactagtgaccactagatgccgccaggcactcagcatgctttttctcctggccctctagatctattggaagctgaactcccagccttgctggagagacttctctaaccctgctgcggggtctaactgtagccttctttaaccctgctgcggggtctaactgtagccttctttaa

SEQ ID NO: 446798 - DNA, 3364 bp, Homo sapiens
tggagactgaaagcggcggaagggacgctggaatgtggagcggttgtggggcggcagctgcggaactgcgcgattgtggttcccgccgtatttcccgttccccatctagtaactcccatctcagcccacgtatctccctgagtggaaatctcgggccccagaccagtcgattgggaggtccgccctccccttcagcgacttggtctgtgttttggcagttgccgcgacaacagtcacttccgggaaggggctctgcgaatctccttccgtcggtccgctcagaatcagctgtcctctcagactgtgtgggtggtttccccggccgcagctccgtacgggcttggattgctgggcctcggtgcaccccagcctcccccactcgggttctgagcttgagctggcggctctttaactctgcttcactgttgctcttggcaacatccacttccgggagcgagtgccgtttcccccgctcaccgcgggctagggagcgtgggattccggactgtgagcggctgttagtgcgtcgcagctgctggcgatccggcgaccctcggccggcaggacccgcgggccacgcagccggggccttctcaacgcctcagtacctcggcgggaccgccatggttctgctgcacgtgaagcggggcgacgagagccagttcctgctgcaggcgcctgggagtaccgagctggaggagctcacggtgcaggtggcccgggtctataatgggcggctcaaggtgcagcgcctctgctcagaaatggaagaattagccgaacatggcatatttctccctcctaatatgcaaggactgaccgatgatcagattgaagaattgaaattgaaggatgaatggggtgaaaaatgcgtacccagcggaggtgcagtgtttaaaaaggatgatattggacgaaggaatgggcaagctccaaatgagaagatgaagcaagtgttaaagaagactatagaagaagccaaagcaataatatctaagaaacaagtggaagccggtgtctgtgttaccatggagatggtgaaagatgccttggaccagcttcgaggcgcggtgatgattgtttaccccatggggttgccaccgtatgatcccatccgcatggagtttgaaaataaggaagacttgtcgggaacacaggcagggctcaacgtcattaaagaggcagaggcgcagctgtggtgggcagccaaggagctgagaagaacgaagaagctttcagactacgtggggaagaatgaaaaaaccaaaattatcgccaagattcagcaagtaagtactttttgctttaatgtgtcagtagtttttgttatttcccttcaaactgataaaaatgtacagtgaatccgaaagatttaaactactggtacaaatattttaatcttattggctcgggtttaaactaaaaatatcctcttcctgcacaccaacaaaaactggaagaaaatatggattgagtaccaatatctagagtttgttttaatatgtgggggagaggaaatatactatgttaatttcaagcgtaaaaatagggctgcaagtaaacagatatgttccttgaaatgtaggagggggaggaggaaaggttcgagacctttgaaggacatcgtgtagcgctgtaacctgaggggccgccttggttttgtgggtgctcctacgtcactaggctgtgattttggggaaatggggccctccaccttatgtagatccagagtccgtggctctgagcatcctccctttcccactggacctgcctgcagtgtctgccttgggaatggtcaagacagagatggtatcgtgcagcctctggtctccacacagtgagagtccagggctcagggctgctcaagaccaaggcttcccttgatgcttcacttcgggtgatcagacatgggggacctgtttatctttagtagccggcaaaggcaatcgtaaaacatttgttgtaacttcaggattgtcactctaagaacaccttaatccacaatttgctctgctctcctctttgcagaaggggacagggagctccagcccgagagcctattattagcagtgaggagcagaagcagctgatgctgtactatcacagaagacaagaggagctcaaggtagcaggggacagatgggctttctgcagtgctggcgcccacacatagcctgtgtgccttacctggggctgctggggagcagtgagctctgcagaatgccggggaggggtctttctagagcttctgtctgcaggtctgtcggggtcctgccaggtgtcccctggtgttagacatggcagtatcctgctcctagagggcagggagagggggaggtcagtcatggactctttcttcagtctctttatgtgcaaaacactttcctgaaatgcctgcctgaataaaacatacttatttccagagattggaagaaaatgatgatgatgcctatttaaactcaccatgggcggataacactgctttgaaaagacattttcatggagtgaaagacataaagtggagaccaagatgaagttcaccagctgatgacacttccaaagagattagctcacctttctcctaggcaattataatttaaaaaaaaaaaaaaggccacttactgccctctgtaaaagatgttaacatttctagttttcttttagtgtgaatttttaaaatagcagttattcaaggttttagaacttaataaatacctagtcagaagaaaatgtgtaaatcgtttttgtttcaggactatttagtatgtcatggttttctttgataaaatactaaacttttggccgggcgcggtggctcacgcctgtaatcccagcactttgggaggccgaggcaggcagatcacgaggtcaggagatcaagaccatccaggctaacacggtgaaaccccgtctctactaaaaatacaaaaaattagccgggcatggtggcaggcgcctgtagtcccagctactcgggaggctgaggcaggagaatggcgtgaacccgggaggtggagcttacagtgagccaagatcactgccactgcactctatcctgggcaacagagcgaaactcttgtctcaaaaaaaaaaaaaaaaaaaaaaaaagctacacttttttttcttcctgattgttttatattctcatgataactggtttattggaggaaagctgatgactggcagtgaccactagtgaccactagatgccgccaggcactcagcatgctttttctcctggccctctagatctattggaagctgaactcccagccttgctggagagacttctctaaccctgctgcggggtctaactgtagccttctttaaccctgctgcggggtctaactgtagccttctttaa

SEQ ID NO: 446799 - DNA, 2230 bp, Homo sapiens
tggagactgaaagcggcggaagggacgctggaatgtggagcggttgtggggcggcagctgcggaactgcgcgattgtggttcccgccgtatttcccgttccccatctagtaactcccatctcagcccacgtatctccctgagtggaaatctcgggccccagaccagtcgattgggaggtccgccctccccttcagcgacttggtctgtgttttggcagttgccgcgacaacagtcacttccgggaaggggctctgcgaatctccttccgtcggtccgctcagaatcagctgtcctctcagactgtgtgggtggtttccccggccgcagctccgtacgggcttggattgctgggcctcggtgcaccccagcctcccccactcgggttctgagcttgagctggcggctctttaactctgcttcactgttgctcttggcaacatccacttccgggagcgagtgccgtttcccccgctcaccgcgggctagggagcgtgggattccggactgtgagcggctgttagtgcgtcgcagctgctggcgatccggcgaccctcggccggcaggacccgcgggccacgcagccggggccttctcaacgcctcagtacctcggcgggaccgccatggttctgctgcacgtgaagcggggcgacgagagccagttcctgctgcaggcgcctgggagtaccgagctggaggagctcacggtgcaggtggcccgggtctataatgggcggctcaaggtgcagcgcctctgctcagaaatggaagaattagccgaacatggcatatttctccctcctaatatgcaaggactgaccgatgatcagattgaagaattgaaattgaaggatgaatggggtgaaaaatgcgtacccagcggaggtgcagtgtttaaaaaggatgatattggacgaaggaatgggcaagctccaaatgagaagatgaagcaagtgttaaagaagactatagaagaagccaaagcaataatatctaagaaacaagtggaagccggtgtctgtgttaccatggagatggtgaaagatgccttggaccagcttcgaggcgcggtgatgattgtttaccccatggggttgccaccgtatgatcccatccgcatggagtttgaaaataaggaagacttgtcgggaacacaggcagggctcaacgtcattaaagaggcagaggcgcagctgtggtgggcagccaaggagctgagaagaacgaagaagctttcagactacgtggggaagaatgaaaaaaccaaaattatcgccaagattcagcaaagattggaagaaaatgatgatgatgcctatttaaactcaccatgggcggataacactgctttgaaaagacattttcatggagtgaaagacataaagtggagaccaagatgaagttcaccagctgatgacacttccaaagagattagctcacctttctcctaggcaattataatttaaaaaaaaaaaaaaggccacttactgccctctgtaaaagatgttaacatttctagttttcttttagtgtgaatttttaaaatagcagttattcaaggttttagaacttaataaatacctagtcagaagaaaatgtgtaaatcgtttttgtttcaggactatttagtatgtcatggttttctttgataaaatactaaacttttggccgggcgcggtggctcacgcctgtaatcccagcactttgggaggccgaggcaggcagatcacgaggtcaggagatcaagaccatccaggctaacacggtgaaaccccgtctctactaaaaatacaaaaaattagccgggcatggtggcaggcgcctgtagtcccagctactcgggaggctgaggcaggagaatggcgtgaacccgggaggtggagcttacagtgagccaagatcactgccactgcactctatcctgggcaacagagcgaaactcttgtctcaaaaaaaaaaaaaaaaaaaaaaaaagctacacttttttttcttcctgattgttttatattctcatgataactggtttattggaggaaagctgatgactggcagtgaccactagtgaccactagatgccgccaggcactcagcatgctttttctcctggccctctagatctattggaagctgaactcccagccttgctggagagacttctctaaccctgctgcggggtctaactgtagccttctttaaccctgctgcggggtctaactgtagccttctttaa

SEQ ID NO: 446800 - DNA, 2258 bp, Homo sapiens
tggagactgaaagcggcggaagggacgctggaatgtggagcggttgtggggcggcagctgcggaactgcgcgattgtggttcccgccgtatttcccgttccccatctagtaactcccatctcagcccacgtatctccctgagtggaaatctcgggccccagaccagtcgattgggaggtccgccctccccttcagcgacttggtctgtgttttggcagttgccgcgacaacagtcacttccgggaaggggctctgcgaatctccttccgtcggtccgctcagaatcagctgtcctctcagactgtgtgggtggtttccccggccgcagctccgtacgggcttggattgctgggcctcggtgcaccccagcctcccccactcgggttctgagcttgagctggcggctctttaactctgcttcactgttgctcttggcaacatccacttccgggagcgagtgccgtttcccccgctcaccgcgggctagggagcgtgggattccggactgtgagcggctgttagtgcgtcgcagctgctggcgatccggcgaccctcggccggcaggacccgcgggccacgcagccggggccttctcaacgcctcagtacctcggcgggaccgccatggttctgctgcacgtgaagcggggcgacgagagccagttcctgctgcaggcgcctgggagtaccgagctggaggagctcacggtgcaggtggcccgggtctataatgggcggctcaaggtgcagcgcctctgctcagaaatggaagaattagccgaacatggcatatttctccctcctaatatgcaaggactgaccgatgatcagattgaagaattgaaattgaaggatgaatggggtgaaaaatgcgtacccagcggaggtgcagtgtttaaaaaggatgatattggacgaaggaatgggcaagaaacaagtggaagccggtgtctgtgttaccatggagatggtgaaagatgccttggaccagcttcgaggcgcggtgatgattgtttaccccatggggttgccaccgtatgatcccatccgcatggagtttgaaaataaggaagacttgtcgggaacacaggcagggctcaacgtcattaaagaggcagaggcgcagctgtggtgggcagccaaggagctgagaagaacgaagaagctttcagactacgtggggaagaatgaaaaaaccaaaattatcgccaagattcagcaaaggggacagggagctccagcccgagagcctattattagcagtgaggagcagaagcagctgatgctgtactatcacagaagacaagaggagctcaagagattggaagaaaatgatgatgatgcctatttaaactcaccatgggcggataacactgctttgaaaagacattttcatggagtgaaagacataaagtggagaccaagatgaagttcaccagctgatgacacttccaaagagattagctcacctttctcctaggcaattataatttaaaaaaaaaaaaaaggccacttactgccctctgtaaaagatgttaacatttctagttttcttttagtgtgaatttttaaaatagcagttattcaaggttttagaacttaataaatacctagtcagaagaaaatgtgtaaatcgtttttgtttcaggactatttagtatgtcatggttttctttgataaaatactaaacttttggccgggcgcggtggctcacgcctgtaatcccagcactttgggaggccgaggcaggcagatcacgaggtcaggagatcaagaccatccaggctaacacggtgaaaccccgtctctactaaaaatacaaaaaattagccgggcatggtggcaggcgcctgtagtcccagctactcgggaggctgaggcaggagaatggcgtgaacccgggaggtggagcttacagtgagccaagatcactgccactgcactctatcctgggcaacagagcgaaactcttgtctcaaaaaaaaaaaaaaaaaaaaaaaaagctacacttttttttcttcctgattgttttatattctcatgataactggtttattggaggaaagctgatgactggcagtgaccactagtgaccactagatgccgccaggcactcagcatgctttttctcctggccctctagatctattggaagctgaactcccagccttgctggagagacttctctaaccctgctgcggggtctaactgtagccttctttaaccctgctgcggggtctaactgtagccttctttaa

SEQ ID NO: 446801 - DNA, 1630 bp, Homo sapiens
  misc_feature (20)..(20): n is a, c, g, or t
tatccacggctcatttgagntcttctcagctccttggctgcccaccacagcagcgcctctgctcagaaatggaagaattagccgaacatggcatatttctccctcctaatatgcaaggactgaccgatgatcagattgaagaattgaaattgaaggatgaatggggtgaaaaatgcgtacccagcggaggtgcagtgtttaaaaaggatgatattggacgaaggaatgggcaagctccaaatgagaagatgaagcaagtgttaaagaagactatagaagaagccaaagcaataatatctaagaaacaagtggaagccggtgtctgtgttaccatggagatggtgaaagatgccttggaccagcttcgaggcgcggtgatgattgtttaccccatggggttgccaccgtatgatcccatccgcatggagtttgaaaataaggaagacttgtcgggaacacaggcagggctcaacgtcattaaagaggcagaggcgcagctgtggtgggcagccaaggagctgagaagaacgaagaagctttcagactacgtggggaagaatgaaaaaaccaaaattatcgccaagattcagcaaaggggacagggagctccagcccgagagcctattattagcagtgaggagcagaagcagctgatgctgtactatcacagaagacaagaggagctcaagagattggaagaaaatgatgatgatgcctatttaaactcaccatgggcggataacactgctttgaaaagacattttcatggagtgaaagacataaagtggagaccaagatgaagttcaccagctgatgacacttccaaagagattagctcacctttctcctaggcaattataatttaaaaaaaaaaaaaaggccacttactgccctctgtaaaagatgttaacatttctagttttcttttagtgtgaatttttaaaatagcagttattcaaggttttagaacttaataaatacctagtcagaagaaaatgtgtaaatcgtttttgtttcaggactatttagtatgtcatggttttctttgataaaatactaaacttttggccgggcgcggtggctcacgcctgtaatcccagcactttgggaggccgaggcaggcagatcacgaggtcaggagatcaagaccatccaggctaacacggtgaaaccccgtctctactaaaaatacaaaaaattagccgggcatggtggcaggcgcctgtagtcccagctactcgggaggctgaggcaggagaatggcgtgaacccgggaggtggagcttacagtgagccaagatcactgccactgcactctatcctgggcaacagagcgaaactcttgtctcaaaaaaaaaaaaaaaaaaaaaaaaagctacacttttttttcttcctgattgttttatattctcatgataactggtttattggaggaaagctgatgactggcagtgaccactagtgaccactagatgccgccaggcactcagcatgctttttctcctggccctctagatctattggaagctgaactcccagccttgctggagagacttctctaaccctgctgcggggtctaactgtagccttctttaaccctgctgcggggtctaactgtagccttctttaa

SEQ ID NO: 446802 - DNA, 1094 bp, Homo sapiens
ataggtacaagtgtacgaactcgaattatgtactcattgctcgatagctgtgaccgtaggggacagggagctccagcccgagagcctattattagcagtgaggagcagaagcagctgatgctgtactatcacagaagacaagaggagctcaagagattggaagaaaatgatgatgatgcctatttaaactcaccatgggcggataacactgctttgaaaagacattttcatggagtgaaagacataaagtggagaccaagatgaagttcaccagctgatgacacttccaaagagattagctcacctttctcctaggcaattataatttaaaaaaaaaaaaaaggccacttactgccctctgtaaaagatgttaacatttctagttttcttttagtgtgaatttttaaaatagcagttattcaaggttttagaacttaataaatacctagtcagaagaaaatgtgtaaatcgtttttgtttcaggactatttagtatgtcatggttttctttgataaaatactaaacttttggccgggcgcggtggctcacgcctgtaatcccagcactttgggaggccgaggcaggcagatcacgaggtcaggagatcaagaccatccaggctaacacggtgaaaccccgtctctactaaaaatacaaaaaattagccgggcatggtggcaggcgcctgtagtcccagctactcgggaggctgaggcaggagaatggcgtgaacccgggaggtggagcttacagtgagccaagatcactgccactgcactctatcctgggcaacagagcgaaactcttgtctcaaaaaaaaaaaaaaaaaaaaaaaaagctacacttttttttcttcctgattgttttatattctcatgataactggtttattggaggaaagctgatgactggcagtgaccactagtgaccactagatgccgccaggcactcagcatgctttttctcctggccctctagatctattggaagctgaactcccagccttgctggagagacttctctaaccctgctgcggggtctaactgtagccttctttaaccctgctgcggggtctaactgtagccttctttaa

SEQ ID NO: 446803 - DNA, 2069 bp, Homo sapiens
tggagactgaaagcggcggaagggacgctggaatgtggagcggttgtggggcggcagctgcggaactgcgcgattgtggttcccgccgtatttcccgttccccatctagtaactcccatctcagcccacgtatctccctgagtggaaatctcgggccccagaccagtcgattgggaggtccgccctccccttcagcgacttggtctgtgttttggcagttgccgcgacaacagtcacttccgggaaggggctctgcgaatctccttccgtcggtccgctcagaatcagctgtcctctcagactgtgtgggtggtttccccggccgcagctccgtacgggcttggattgctgggcctcggtgcaccccagcctcccccactcgggttctgagcttgagctggcggctctttaactctgcttcactgttgctcttggcaacatccacttccgggagcgagtgccgtttcccccgctcaccgcgggctagggagcgtgggattccggactgtgagcggctgttagtgcgtcgcagctgctggcgatccggcgaccctcggccggcaggacccgcgggccacgcagccggggccttctcaacgcctcagtacctcggcgggaccgccatggttctgctgcacgtgaagcggggcgacgagagccagttcctgctgcaggcgcctgggagtaccgagctggaggagctcacggtgcaggtggcccgggtctataatgggcggctcaaggtgcagcgcctctgctcagaaatggaagaattagccgaacatggcatatttctccctcctaatatgcaaggactgaccgatgatcagattgaagaattgaaattgaaggatgaatggggtgaaaaatgcgtacccagcggaggtgcagtgtttaaaaaggatgatattggacgaaggaatgggcaagctccaaatgagaagatgaagcaagtgttaaagaagactatagaagaagccaaagcaataatatctaagaaacaagtggaagccggtgtctgtgttaccatggagatggtgaaagatgccttggaccagcttcgaggcgcggtgatgattgtttaccccatggggttgccaccgtatgatcccatccgcatggagtttgaaaataaggaagacttgtcgggaacacaggcagggctcaacgtcattaaagaggcagaggcgcagctgtggtgggcagccaaggagctgagaagaacgaagaagctttcagactacgtggggaagaatgaaaaaaccaaaattatcgccaagattcagcaaaggggacagggagctccagcccgagagcctattattagcagtgaggagcagaagcagctgatgctgtactatcacagaagacaagaggagctcaagagattggaagaaaatgatgatgatgcctatttaaactcaccatgggcggataacactgctttgaaaagacattttcatggagtgaaagacataaagtggagaccaagatgaagttcaccagctgatgacacttccaaagagattagctcacctttctcctaggcaattataatttaaaaaaaaaaaaaaggccacttactgccctctgtaaaagatgttaacatttctagttttcttttagtgtgaatttttaaaatagcagttattcaaggttttagaacttaataaatacctagtctcaccttagttcaaaaaaaaaaaaaaaaaaacctccggggcctctcttttctccggggggcgggaaaaagggggtatggaatgggccatgggccataagctgtgtttccctgtgaccacagtttctctgtgtcacaagggggaaaaactcggcgggatcccccttattggagagcgatataacttcgaataaacccgggttaccctgttagaattggtcaaaaagcaataggccccgacaccacgacacagcagcatgacgggtgtacggagcgggcaccaccccacgctgtgaaccaagaaacacaagggccaggaaaaacttatcacacagttgacaacacataccattattgtcaccagacgaaaaaacacagagtagataat

SEQ ID NO: 446804 - DNA, 3418 bp, Homo sapiens
tggagactgaaagcggcggaagggacgctggaatgtggagcggttgtggggcggcagctgcggaactgcgcgattgtggttcccgccgtatttcccgttccccatctagtaactcccatctcagcccacgtatctccctgagtggaaatctcgggccccagaccagtcgattgggaggtccgccctccccttcagcgacttggtctgtgttttggcagttgccgcgacaacagtcacttccgggaaggggctctgcgaatctccttccgtcggtccgctcagaatcagctgtcctctcagactgtgtgggtggtttccccggccgcagctccgtacgggcttggattgctgggcctcggtgcaccccagcctcccccactcgggttctgagcttgagctggcggctctttaactctgcttcactgttgctcttggcaacatccacttccgggagcgagtgccgtttcccccgctcaccgcgggctagggagcgtgggattccggactgtgagcggctgttagtgcgtcgcagctgctggcgatccggcgaccctcggccggcaggacccgcgggccacgcagccggggccttctcaacgcctcagtacctcggcgggaccgccatggttctgctgcacgtgaagcggggcgacgagagccagttcctgctgcaggcgcctgggagtaccgagctggaggagctcacggtgcaggtggcccgggtctataatgggcggctcaaggtgcagcgcctctgctcagaaatggaagaattagccgaacatggcatatttctccctcctaatatgcaaggactgaccgatgatcagattgaagaattgaaattgaaggatgaatggggtgaaaaatgcgtacccagcggaggtgcagtgtttaaaaaggatgatattggacgaaggaatgggcaagctccaaatgagaagatgaagcaagtgttaaagaagactatagaagaagccaaagcaataatatctaagaaacaagtggaagccggtgtctgtgttaccatggagatggtgaaagatgccttggaccagcttcgaggcgcggtgatgattgtttaccccatggggttgccaccgtatgatcccatccgcatggagtttgaaaataaggaagacttgtcgggaacacaggcagggctcaacgtcattaaagaggcagaggcgcagctgtggtgggcagccaaggagctgagaagaacgaagaagctttcagactacgtggggaagaatgaaaaaaccaaaattatcgccaagattcagcaagtaagtactttttgctttaatgtgtcagtagtttttgttatttcccttcaaactgataaaaatgtacagtgaatccgaaagatttaaactactggtacaaatattttaatcttattggctcgggtttaaactaaaaatatcctcttcctgcacaccaacaaaaactggaagaaaatatggattgagtaccaatatctagagtttgttttaatatgtgggggagaggaaatatactatgttaatttcaagcgtaaaaatagggctgcaagtaaacagatatgttccttgaaatgtaaaatttcgcccgtcactgatttcaggctttttcaaactgctgatgctgtgtacaggagggggaggaggaaaggttcgagacctttgaaggacatcgtgtagcgctgtaacctgaggggccgccttggttttgtgggtgctcctacgtcactaggctgtgattttggggaaatggggccctccaccttatgtagatccagagtccgtggctctgagcatcctccctttcccactggacctgcctgcagtgtctgccttgggaatggtcaagacagagatggtatcgtgcagcctctggtctccacacagtgagagtccagggctcagggctgctcaagaccaaggcttcccttgatgcttcacttcgggtgatcagacatgggggacctgtttatctttagtagccggcaaaggcaatcgtaaaacatttgttgtaacttcaggattgtcactctaagaacaccttaatccacaatttgctctgctctcctctttgcagaaggggacagggagctccagcccgagagcctattattagcagtgaggagcagaagcagctgatgctgtactatcacagaagacaagaggagctcaaggtagcaggggacagatgggctttctgcagtgctggcgcccacacatagcctgtgtgccttacctggggctgctggggagcagtgagctctgcagaatgccggggaggggtctttctagagcttctgtctgcaggtctgtcggggtcctgccaggtgtcccctggtgttagacatggcagtatcctgctcctagagggcagggagagggggaggtcagtcatggactctttcttcagtctctttatgtgcaaaacactttcctgaaatgcctgcctgaataaaacatacttatttccagagattggaagaaaatgatgatgatgcctatttaaactcaccatgggcggataacactgctttgaaaagacattttcatggagtgaaagacataaagtggagaccaagatgaagttcaccagctgatgacacttccaaagagattagctcacctttctcctaggcaattataatttaaaaaaaaaaaaaaggccacttactgccctctgtaaaagatgttaacatttctagttttcttttagtgtgaatttttaaaatagcagttattcaaggttttagaacttaataaatacctagtcagaagaaaatgtgtaaatcgtttttgtttcaggactatttagtatgtcatggttttctttgataaaatactaaacttttggccgggcgcggtggctcacgcctgtaatcccagcactttgggaggccgaggcaggcagatcacgaggtcaggagatcaagaccatccaggctaacacggtgaaaccccgtctctactaaaaatacaaaaaattagccgggcatggtggcaggcgcctgtagtcccagctactcgggaggctgaggcaggagaatggcgtgaacccgggaggtggagcttacagtgagccaagatcactgccactgcactctatcctgggcaacagagcgaaactcttgtctcaaaaaaaaaaaaaaaaaaaaaaaaagctacacttttttttcttcctgattgttttatattctcatgataactggtttattggaggaaagctgatgactggcagtgaccactagtgaccactagatgccgccaggcactcagcatgctttttctcctggccctctagatctattggaagctgaactcccagccttgctggagagacttctctaaccctgctgcggggtctaactgtagccttctttaaccctgctgcggggtctaactgtagccttctttaa

SEQ ID NO: 446805 - DNA, 1629 bp, Homo sapiens
tggagactgaaagcggcggaagggacgctggaatgtggagcggttgtggggcggcagctgcggaactgcgcgattgtggttcccgccgtatttcccgttccccatctagtaactcccatctcagcccacgtatctccctgagtggaaatctcgggccccagaccagtcgattgggaggtccgccctccccttcagcgacttggtctgtgttttggcagttgccgcgacaacagtcacttccgggaaggggctctgcgaatctccttccgtcggtccgctcagaatcagctgtcctctcagactgtgtgggtggtttccccggccgcagctccgtacgggcttggattgctgggcctcggtgcaccccagcctcccccactcgggttctgagcttgagctggcggctctttaactctgcttcactgttgctcttggcaacatccacttccgggagcgagtgccgtttcccccgctcaccgcgggctagggagcgtgggattccggactgtgagcggctgttagtgcgtcgcagctgctggcgatccggcgaccctcggccggcaggacccgcgggccacgcagccggggccttctcaacgcctcagtacctcggcgggaccgccatggttctgctgcacgtgaagcggggcgacgagagccagttcctgctgcaggcgcctgggagtaccgagctggaggagctcacggtgcaggtggcccgggtctataatgggcggctcaaggtgcagcgcctctgctcagaaatggaagaattagccgaacatggcatatttctccctcctaatatgcaaggactgaccgatgatcagattgaagaattgaaattgaaggatgaatggggtgaaaaatgcgtacccagcggaggtgcagtgtttaaaaaggatgatattggacgaaggaatgggcaagctccaaatgagaagatgaagcaagtgttaaagaagactatagaagaagccaaagcaataatatctaagaaacaagtggaagccggtgtctgtgttaccatggagatggtgaaagatgccttggaccagcttcgaggcgcggtgatgattgtttaccccatggggttgccaccgtatgatcccatccgcatggagtttgaaaataaggaagacttgtcgggaacacaggcagggctcaacgtcattaaagaggcagaggcgcagctgtggtgggcagccaaggagctgagaagaacgaagaagctttcagactacgtggggaagaatgaaaaaaccaaaattatcgccaagattcagcaaatttttgccactttccaggtggtcgttctttgtcctcctgagcttgggcctcgctccttgggacccctggaccagaaccccaatcagctcaggaacaggcttctggcagatgagcccggcggcagtggagcgagagatgcagtgagcaatgtggctccataagcacagtacaatgcatatcctttcagccacgtctttgtttatttcattagctttgctttatgaaatatttcaagaactggcattgtgtgcaaggctctagaagaattttttgcatgtgtttgattttaattttctctgtttgctttttagtaattaagagtaaagtcaaccaagaaca

SEQ ID NO: 446806 - DNA, 2285 bp, Homo sapiens
tggagactgaaagcggcggaagggacgctggaatgtggagcggttgtggggcggcagctgcggaactgcgcgattgtggttcccgccgtatttcccgttccccatctagtaactcccatctcagcccacgtatctccctgagtggaaatctcgggccccagaccagtcgattgggaggtccgccctccccttcagcgacttggtctgtgttttggcagttgccgcgacaacagtcacttccgggaaggggctctgcgaatctccttccgtcggtccgctcagaatcagctgtcctctcagactgtgtgggtggtttccccggccgcagctccgtacgggcttggattgctgggcctcggtgcaccccagcctcccccactcgggttctgagcttgagctggcggctctttaactctgcttcactgttgctcttggcaacatccacttccgggagcgagtgccgtttcccccgctcaccgcgggctagggagcgtgggattccggactgtgagcggctgttagtgcgtcgcagctgctggcgatccggcgaccctcggccggcaggacctcggcgggaccgccatggttctgctgcacgtgaagcggggcgacgagagccagttcctgctgcaggcgcctgggagtaccgagctggaggagctcacggtgcaggtggcccgggtctataatgggcggctcaaggtgcagcgcctctgctcagaaatggaagaattagccgaacatggcatatttctccctcctaatatgcaaggactgaccgatgatcagattgaagaattgaaattgaaggatgaatggggtgaaaaatgcgtacccagcggaggtgcagtgtttaaaaaggatgatattggacgaaggaatgggcaagctccaaatgagaagatgaagcaagtgttaaagaagactatagaagaagccaaagcaataatatctaagaaacaagtggaagccggtgtctgtgttaccatggagatggtgaaagatgccttggaccagcttcgaggcgcggtgatgattgtttaccccatggggttgccaccgtatgatcccatccgcatggagtttgaaaataaggaagacttgtcgggaacacaggcagggctcaacgtcattaaagaggcagaggcgcagctgtggtgggcagccaaggagctgagaagaacgaagaagctttcagactacgtggggaagaatgaaaaaaccaaaattatcgccaagattcagcaaaggggacagggagctccagcccgagagcctattattagcagtgaggagcagaagcagctgatgctgtactatcacagaagacaagaggagctcaagagattggaagaaaatgatgatgatgcctatttaaactcaccatgggcggataacactgctttgaaaagacattttcatggagtgaaagacataaagtggagaccaagatgaagttcaccagctgatgacacttccaaagagattagctcacctttctcctaggcaattataatttaaaaaaaaaaaaaaggccacttactgccctctgtaaaagatgttaacatttctagttttcttttagtgtgaatttttaaaatagcagttattcaaggttttagaacttaataaatacctagtcagaagaaaatgtgtaaatcgtttttgtttcaggactatttagtatgtcatggttttctttgataaaatactaaacttttggccgggcgcggtggctcacgcctgtaatcccagcactttgggaggccgaggcaggcagatcacgaggtcaggagatcaagaccatccaggctaacacggtgaaaccccgtctctactaaaaatacaaaaaattagccgggcatggtggcaggcgcctgtagtcccagctactcgggaggctgaggcaggagaatggcgtgaacccgggaggtggagcttacagtgagccaagatcactgccactgcactctatcctgggcaacagagcgaaactcttgtctcaaaaaaaaaaaaaaaaaaaaaaaaagctacacttttttttcttcctgattgttttatattctcatgataactggtttattggaggaaagctgatgactggcagtgaccactagtgaccactagatgccgccaggcactcagcatgctttttctcctggccctctagatctattggaagctgaactcccagccttgctggagagacttctctaaccctgctgcggggtctaactgtagccttctttaaccctgctgcggggtctaactgtagccttctttaa

SEQ ID NO: 446807 - DNA, 1536 bp, Homo sapiens
tgtgaaggtgtgttctagggcgggagggggtatctagtgatgtgtgtctgtgtgtgtctgtgtatgtaatggtgaaaaatgcgtacccagcggaggtgcagtgtttaaaaaggatgatattggacgaaggaatgggcaagctccaaatgagaagatgaagcaagtgttaaagaagactatagaagaagccaaagcaataatatctaagaaacaagtggaagccggtgtctgtgttaccatggagatggtgaaagatgccttggaccagcttcgaggcgcggtgatgattgtttaccccatggggttgccaccgtatgatcccatccgcatggagtttgaaaataaggaagacttgtcgggaacacaggcagggctcaacgtcattaaagaggcagaggcgcagctgtggtgggcagccaaggagctgagaagaacgaagaagctttcagactacgtggggaagaatgaaaaaaccaaaattatcgccaagattcagcaaaggggacagggagctccagcccgagagcctattattagcagtgaggagcagaagcagctgatgctgtactatcacagaagacaagaggagctcaagagattggaagaaaatgatgatgatgcctatttaaactcaccatgggcggataacactgctttgaaaagacattttcatggagtgaaagacataaagtggagaccaagatgaagttcaccagctgatgacacttccaaagagattagctcacctttctcctaggcaattataatttaaaaaaaaaaaaaaggccacttactgccctctgtaaaagatgttaacatttctagttttcttttagtgtgaatttttaaaatagcagttattcaaggttttagaacttaataaatacctagtcagaagaaaatgtgtaaatcgtttttgtttcaggactatttagtatgtcatggttttctttgataaaatactaaacttttggccgggcgcggtggctcacgcctgtaatcccagcactttgggaggccgaggcaggcagatcacgaggtcaggagatcaagaccatccaggctaacacggtgaaaccccgtctctactaaaaatacaaaaaattagccgggcatggtggcaggcgcctgtagtcccagctactcgggaggctgaggcaggagaatggcgtgaacccgggaggtggagcttacagtgagccaagatcactgccactgcactctatcctgggcaacagagcgaaactcttgtctcaaaaaaaaaaaaaaaaaaaaaaaaagctacacttttttttcttcctgattgttttatattctcatgataactggtttattggaggaaagctgatgactggcagtgaccactagtgaccactagatgccgccaggcactcagcatgctttttctcctggccctctagatctattggaagctgaactcccagccttgctggagagacttctctaaccctgctgcggggtctaactgtagccttctttaaccctgctgcggggtctaactgtagccttctttaa

SEQ ID NO: 446808 - DNA, 994 bp, Homo sapiens
  misc_feature (799)..(799): n is a, c, g, or t
  misc_feature (802)..(803): n is a, c, g, or t
  misc_feature (805)..(805): n is a, c, g, or t
  misc_feature (811)..(811): n is a, c, g, or t
  misc_feature (814)..(814): n is a, c, g, or t
  misc_feature (827)..(827): n is a, c, g, or t
  misc_feature (841)..(841): n is a, c, g, or t
ctaagtgttactgtttgggattgacaactggaattttgttaagtcctaacttcagtccactgttggatctctaaattccctaactcaggcctgctttacagagcccttgtgagagggtgctaaggagcctaagacaacagcaagcttcttttatgctttccaccccccaggagtggtgaaaggacataggaaggagtctggggaactgtactacagcattgaaaaagaaggccaaagaaagtggtataagcgaatggctgtcatcctgtccttggagcaaggaaacagactgagagagcagtatgggcttggcccctatgaagcagtaacacctcttacaaaggcagcagatatcagcttagacaatttggtggaagggaagcggaaacggcgcagtaacgtcagctccccagccacccctactgcctccagtagcagcagcacaacccctacccgaaagatcacagaaagtcctcgtgcctccatgggagttctctcaggcaaaagaaaacttatcacttctgaagaggaacggtcccctgccaagcgaggtcgcaagtctgccacagtaaaacctggtgcagtaggggcaggagagtttgtgagcccctgtgagagtggagacaacaccggtgaaccctctgccctggaagagcagagagggcctttgcctctcaacaagaccttgtttctgggctacgcatttctccttaccatggccacaaccagtgacaagttggccagccgctccaaactgccagatggtcctacaggaagcagtgaagaagaggaggaattnggnnantcctcnttncacaggcagatangaatcccggtgaangaggggtaatcccgaaattccacgagccgcggcacacgctacacgggcttaaaggcggagaaaattggcaccccgaaatccggcggcacgggaccggggcaaggggcgcgaagggagcccgcaaaaggattgcgcggcgcagagacatggtgc

SEQ ID NO: 446809 - DNA, 470 bp, Homo sapiens
ttggtggtgttctagaggatctcgggttcccttgtcggggtaattcgatacaaaatgatttcaggagtttatctagtttatttccctaggttacattggctaggaaccttttgcaaatgtgtgaagatttgtatataggttcaatattctcaacctgtaaagtcagagaactaagttttaagcaagcattaaaaatatataggctcaggagcatgatttggattattctcagccccagaacaaacatggaaattagaaagccaggaatgcaaggaatacagatcattcatagaaagaaggaagagaagggggaccctaatatagggcttagttttttaagatgaagtcttgctctgtcacctaggctgtacccagctggcaacagataattacggtagttctggagctggtgggcatggcaactatcatggacccagacatgagacaaagggaaacaccgggtaccgagc

SEQ ID NO: 446810 - DNA, 6758 bp, Homo sapiens
acagcggcgacctagggatcgatctggagggacttggggagcgtgcagagacctctagctcgagcgcgagggacctcccgccgggatgcctggggagcagatggaccctactggaagtcagttggattcagatttctctcagcaagatactccttgcctgataattgaagattctcagcctgaaagccaggttctagaggatgattctggttctcacttcagtatgctatctcgacaccttcctaatctccagacgcacaaagaaaatcctgtgttggatgttgtgtccaatcctgaacaaacagctggagaagaacgaggagacggtaatagtgggttcaatgaacatttgaaagaaaacaaggttgcagaccctgtggattcttctaacttggacacatgtggttccatcagtcaggtcattgagcagttacctcagccaaacaggacaagcagtgttctgggaatgtcagtggaatctgctcctgctgtggaggaagagaagggagaagagttggaacagaaggagaaagagaaggaagaagatacttcaggcaatactacacattcccttggtgctgaagatactgcctcatcacagttgggttttggggttctggaactctcccagagccaggatgttgaggaaaatactgtgccatatgaagtggacaaagagcagctacaatcagtaaccaccaactctggttataccaggctgtctgatgtggatgctaatactgcaattaagcatgaagaacagtccaacgaagatatccccatagcagaacagtccagcaaggacatccctgtgacagcacagcccagtaaggatgtacatgttgtaaaagagcaaaatccaccacctgcaaggtcagaggacatgccttttagccccaaagcatctgttgctgctatggaagcaaaagaacagttgtctgcacaagaacttatggaaagtggactgcagattcagaagtcaccagagcctgaggttttgtcaactcaggaagacttgtttgaccagagcaataaaacagtatcttctgatggttgctctactccttcaagggaggaaggtgggtgttctttggcttccactcctgccaccactctgcatctcctgcagctctctggtcagaggtcccttgttcaggacagtctttccacgaattcttcagatcttgttgctccttctcctgatgctttccgatctactccttttatcgttcctagcagtcccacagagcaagaagggagacaagataagccaatggacacgtcagtgttatctgaagaaggaggagagccttttcagaagaaacttcaaagtggtgaaccagtggagttagaaaacccccctctcctgcctgagtccactgtatcaccacaagcctcaacaccaatatctcagagcacaccagtcttccctcctgggtcacttcctatcccatcccagcctcagttttctcatgacatttttattccttccccaagtctggaagaacaatcaaatgatgggaagaaagatggagatatgcatagttcatctttgacagttgagtgttctaaaacttcagagattgaaccaaagaattcccctgaggatcttgggctatctttgacaggggattcttgcaagttgatgctttctacaagtgaatatagtcagtccccaaagatggagagcttgagttctcacagaattgatgaagatggagaaaacacacagattgaggatacggaacccatgtctccagttctcaattctaaatttgttcctgctgaaaatgatagtatcctgatgaatccagcacaggatggtgaagtacaactgagtcagaatgatgacaaaacaaagggagatgatacagacaccagggatgacattagtattttagccactggttgcaagggcagagaagaaacggtagcagaagatgtttgtattgatctcacttgtgattcggggagtcaggcagttccgtcaccagctactcgatctgaggcactttctagtgtgttagatcaggaggaagctatggaaattaaagaacaccatccagaggaggggtcttcagggtctgaggtggaagaaatccctgagacaccttgtgaaagtcaaggagaggaactcaaagaagaaaatatggagagtgttccgttgcacctttctctgactgaaactcagtcccaagggttgtgtcttcaaaaggaaatgccaaaaaaagaatgctcagaagctatggaagttgaaaccagtgtgattagtattgattcccctcaaaagttggcaatacttgaccaagaattggaacataaggaacaggaagcttgggaagaagctacttcagaggactccagtgttgtcattgtagatgtgaaagagccatctcccagagttgatgtttcttgtgaacctttggagggagtggagaagtgctcagattcccagtcatgggaggatattgctccagaaatagaaccatgtgctgagaatagattagacaccaaggaagaaaagagtgtagaatatgaaggagatctgaaatcagggactgcagaaacagaacctgtagagcaagattcttcacagccttccttacctttagtgagagcagatgatcctttaagacttgaccaggagttgcagcagccccaaactcaggagaaaacaagtaattcattaacagaagactcaaaaatggctaatgcaaagcagctaagctcagatgcagaggcccagaagctggggaagccctctgcccatgcctcacaaagcttctgtgaaagttctagtgaaaccccatttcatttcactttgcctaaagaaggtgatatcatcccaccattgactggtgcaaccccacctcttattgggcacctaaaattggagcccaagagacacagtactcctattggtattagcaactatccagaaagcaccatagcaaccagtgatgtcatgtctgaaagcatggtggagacccatgatcccatacttgggagtggaaaaggggattctggggctgccccagacgtggatgataaattatgtctaagaatgaaactggttagtcctgagactgaggcgagtgaagagtctttgcagttcaacctggaaaagcctgcaactggtgaaagaaaaaatggatctactgctgttgctgagtctgttgccagtccccagaagaccatgtctgtgttgagctgtatctgtgaagccaggcaagagaatgaggctcgaagtgaggatccccccaccacacccatcagggggaacttgctccactttccaagttctcaaggagaagaggagaaagaaaaattggagggtgaccatacaatcaggcagagtcaacagcctatgaagcccattagtcctgtcaaggaccctgtttctcctgcttcccagaagatggtcatacaagggccatccagtcctcaaggagaggcaatggtgacagatgtgctagaagaccagaaagaaggacggagtactaataaggaaaatcctagtaaggccttgattgaaaggcccagccaaaataacataggaatccaaaccatggagtgttccttgagggtcccagaaactgtttcagcagcaacccagactataaagaatgtgtgtgagcaggggaccagtacagtggaccagaactttggaaagcaagatgccacagttcagactgagagggggagtggtgagaaaccagtcagtgctcctggggatgatacagagtcgctccatagccagggagaagaagagtttgatatgcctcagcctccacatggccatgtcttacatcgtcacatgagaacaatccgggaagtacgcacacttgtcactcgtgtcattacagatgtgtattatgtggatggaacagaagtagaaagaaaagtaactgaggagactgaagagccaattgtagagtgtcaggagtgtgaaactgaagtttccccttcacagactgggggctcctcaggtgacctgggggatatcagctccttctcctccaaggcatccagcttacaccgcacatcaagtgggacaagtctctcagctatgcacagcagtggaagctcagggaaaggagccggaccactcagagggaaaaccagcgggacagaacccgcagattttgccttacccagctcccgaggaggcccaggaaaactgagtcctagaaaaggggtcagtcagacagggacgccagtgtgtgaggaggatggtgatgcaggccttggcatcagacagggagggaaggctccagtcacgcctcgtgggcgtgggcgaaggggccgcccaccttctcggaccactggaaccagagaaacagctgtgcctggccccttgggcatagaggacatttcacctaacttgtcaccagatgataaatccttcagccgtgtcgtgccccgagtgccagactccaccagacgaacagatgtgggtgctggtgctttgcgtcgtagtgactctccagaaattcctttccaggctgctgctggcccttctgatggcttagatgcctcctctccaggaaatagctttgtagggctccgtgttgtagccaagtggtcatccaatggctacttttactctgggaaaatcacacgagatgtcggagctgggaagtataaattgctctttgatgatgggtacgaatgtgatgtgttgggcaaagacattctgttatgtgaccccatcccgctggacactgaagtgacggccctctcggaggatgagtatttcagtgcaggagtggtgaaaggacataggaaggagtctggggaactgtactacagcattgaaaaagaaggccaaagaaagtggtataagcgaatggctgtcatcctgtccttggagcaaggaaacagactgagagagcagtatgggcttggcccctatgaagcagtaacacctcttacaaaggcagcagatatcagcttagacaatttggtggaagggaagcggaaacggcgcagtaacgtcagctccccagccacccctactgcctccagtagcagcagcacaacccctacccgaaagatcacagaaagtcctcgtgcctccatgggagttctctcaggcaaaagaaaacttatcacttctgaagaggaacggtcccctgccaagcgaggtcgcaagtctgccacagtaaaacctggtgcagtaggggcaggagagtttgtgagcccctgtgagagtggagacaacaccggtgaaccctctgccctggaagagcagagagggcctttgcctctcaacaagaccttgtttctgggctacgcatttctccttaccatggccacaaccagtgacaagttggccagccgctccaaactgccagatggtcctacaggaagcagtgaagaagaggaggaatttttggaaattcctcctttcaacaagcagtatacagaatcccagcttcgagcaggagctggctatatccttgaagatttcaatgaagcccagtgtaacacagcttaccagtgtcttctaattgcggatcagcattgtcgaacccggaagtacttcctgtgccttgccagtgggattccttgtgtgtctcatgtctgggtccatgatagttgccatgccaaccagctccagaactaccgtaattatctgttgccagctgggtacagccttgaggagcaaagaattctggactggcaaccccgtgaaaatcctttccagaatctgaaggtactcttggtatcagaccaacagcagaacttcctggagctctggtctgagatcctcatgactggtggtgcagcctctgtgaagcagcaccattcaagtgcccataacaaagatattgctttaggggtatttgatgtggtggtgacggacccctcatgcccagcctcggtgctgaagtgtgctgaagcattgcagctgcctgtggtgtcacaagagtgggtgatccagtgcctcattgttggggagagaattggattcaagcagcatccaaaatataaacacgattatgtttctcactaaagatacttggtcttactggttttattccctgctatcgtggagattgtgttttaaccaggttttaaatgtgtcttgtgtgtaactggattccttgcatggatcttgtatatagttttatttgctgaacttttatgataaaataaatgttgaatctctttggttgtagtaactgggatttcttcatctgtttttttgagcttaatctcagaacaaatgacaagacatagtactttctctgagtctttcaacaggcttattcacttacggaggacagctcaccaaggaaattgaaaagttaagagtgaactttattctgtggcatcattcccaaaaggttattccagggtgtctaaaatgctatgcttgcagaaactcagtttaaggtaggtgaaggcccagattaacagttgtgccaaaagttgagtggaattgggcacagctctgtttcctgacagttaaaaaagacctcatgctctctctctgagctgagatcacagctcacctgtgggtactccccaactcttagagctaaagggagaacgaaaggaccaactgccatgaagggacagtgaccataagcttgatggaatgaccttccgtaagataaacatgggaagcacaagtgagaacacctggaaatgttacacgttctagtcaaagacccaatattattattattattattgtcacaatagctggaagcagttccttcccttcctctggcatcactgatccctgc

SEQ ID NO: 446811 - DNA, 5706 bp, Homo sapiens
  misc_feature (18)..(18): n is a, c, g, or t
  misc_feature (24)..(24): n is a, c, g, or t
cccgtagcacttccttanctttantgagagcagatgatcctctaagacttgaccaggagttgcagcagccccaaactcaggagaaaacaagtaattcattaacagaagactcaaaaatggctaatgcaaagcagctaagctcagatgcagaggcccagaagctggggaagccctctgcccatgcctcacaaagcttctgtgaaagttctagtgataagccaatggacacgtcagtgttatctgaagaaggaggagagccttttcagaagaaacttcaaagtggtgaaccagtggagttagaaaacccccctctcctgcctgagtccactgtatcaccacaagcctcaacaccaatatctcagagcacaccagtcttccctcctgggtcacttcctatcccatcccagcctcagttttctcatgacatttttattccttccccaagtctggaagaacaatcaaatgatgggaagaaagatggagatatgcatagttcatctttgacagttgagtgttctaaaacttcagagattgaaccaaagaattcccctgaggatcttgggctatctttgacaggggattcttgcaagttgatgctttctacaagtgaatatagtcagtccccaaagatggagagcttgagttctcacagaattgatgaagatggagaaaacacacagattgaggatacggaacccatgtctccagttctcaattctaaatttgttcctgctgaaaatgatagtatcctgatgaatccagcacaggatggtgaagtacaactgagtcagaatgatgacaaaacaaagggagatgatacagacaccagggatgacattagtattttagccactggttgcaagggcagagaagaaacggtagcagaagatgtttgtattgatctcacttgtgattcggggagtcaggcagttccgtcaccagctactcgatctgaggcactttctagtgtgttagatcaggaggaagctatggaaattaaagaacaccatccagaggaggggtcttcagggtctgaggtggaagaaatccctgagacaccttgtgaaagtcaaggagaggaactcaaagaagaaaatatggagagtgttccgttgcacctttctctgactgaaactcagtcccaagggttgtgtcttcaaaaggaaatgccaaaaaaagaatgctcagaagctatggaagttgaaaccagtgtgattagtattgattcccctcaaaagttggcaatacttgaccaagaattggaacataaggaacaggaagcttgggaagaagctacttcagaggactccagtgttgtcattgtagatgtgaaagagccatctcccagagttgatgtttcttgtgaacctttggagggagtggagaagtgctcagattcccagtcatgggaggatattgctccagaaatagaaccatgtgctgagaatagattagacaccaaggaagaaaagagtgtagaatatgaaggagatctgaaatcagggactgcagaaacagaacctgtagagcaagattcttcacagccttccttacctttagtgagagcagatgatcctttaagacttgaccaggagttgcagcagccccaaactcaggagaaaacaagtaattcattaacagaagactcaaaaatggctaatgcaaagcagctaagctcagatgcagaggcccagaagctggggaagccctctgcccatgcctcacaaagcttctgtgaaagttctagtgaaaccccatttcatttcactttgcctaaagaaggtgatatcatcccaccattgactggtgcaaccccacctcttattgggcacctaaaattggagcccaagagacacagtactcctattggtattagcaactatccagaaagcaccatagcaaccagtgatgtcatgtctgaaagcatggtggagacccatgatcccatacttgggagtggaaaaggggattctggggctgccccagacgtggatgataaattatgtctaagaatgaaactggttagtcctgagactgaggcgagtgaagagtctttgcagttcaacctggaaaagcctgcaactggtgaaagaaaaaatggatctactgctgttgctgagtctgttgccagtccccagaagaccatgtctgtgttgagctgtatctgtgaagccaggcaagagaatgaggctcgaagtgaggatccccccaccacacccatcagggggaacttgctccactttccaagttctcaaggagaagaggagaaagaaaaattggagggtgaccatacaatcaggcagagtcaacagcctatgaagcccattagtcctgtcaaggaccctgtttctcctgcttcccagaagatggtcatacaagggccatccagtcctcaaggagaggcaatggtgacagatgtgctagaagaccagaaagaaggacggagtactaataaggaaaatcctagtaaggccttgattgaaaggcccagccaaaataacataggaatccaaaccatggagtgttccttgagggtcccagaaactgtttcagcagcaacccagactataaagaatgtgtgtgagcaggggaccagtacagtggaccagaactttggaaagcaagatgccacagttcagactgagagggggagtggtgagaaaccagtcagtgctcctggggatgatacagagtcgctccatagccagggagaagaagagtttgatatgcctcagcctccacatggccatgtcttacatcgtcacatgagaacaatccgggaagtacgcacacttgtcactcgtgtcattacagatgtgtattatgtggatggaacagaagtagaaagaaaagtaactgaggagactgaagagccaattgtagagtgtcaggagtgtgaaactgaagtttccccttcacagactgggggctcctcaggtgacctgggggatatcagctccttctcctccaaggcatccagcttacaccgcacatcaagtgggacaagtctctcagctatgcacagcagtggaagctcagggaaaggagccggaccactcagagggaaaaccagcgggacagaacccgcagattttgccttacccagctcccgaggaggcccaggaaaactgagtcctagaaaaggggtcagtcagacagggacgccagtgtgtgaggaggatggtgatgcaggccttggcatcagacagggagggaaggctccagtcacgcctcgtgggcgtgggcgaaggggccgcccaccttctcggaccactggaaccagagaaacagctgtgcctggccccttgggcatagaggacatttcacctaacttgtcaccagatgataaatccttcagccgtgtcgtgccccgagtgccagactccaccagacgaacagatgtgggtgctggtgctttgcgtcgtagtgactctccagaaattcctttccaggctgctgctggcccttctgatggcttagatgcctcctctccaggaaatagctttgtagggctccgtgttgtagccaagtggtcatccaatggctacttttactctgggaaaatcacacgagatgtcggagctgggaagtataaattgctctttgatgatgggtacgaatgtgatgtgttgggcaaagacattctgttatgtgaccccatcccgctggacactgaagtgacggccctctcggaggatgagtatttcagtgcaggagtggtgaaaggacataggaaggagtctggggaactgtactacagcattgaaaaagaaggccaaagaaagtggtataagcgaatggctgtcatcctgtccttggagcaaggaaacagactgagagagcagtatgggcttggcccctatgaagcagtaacacctcttacaaaggcagcagatatcagcttagacaatttggtggaagggaagcggaaacggcgcagtaacgtcagctccccagccacccctactgcctccagtagcagcagcacaacccctacccgaaagatcacagaaagtcctcgtgcctccatgggagttctctcaggcaaaagaaaacttatcacttctgaagaggaacggtcccctgccaagcgaggtcgcaagtctgccacagtaaaacctggtgcagtaggggcaggagagtttgtgagcccctgtgagagtggagacaacaccggtgaaccctctgccctggaagagcagagagggcctttgcctctcaacaagaccttgtttctgggctacgcatttctccttaccatggccacaaccagtgacaagttggccagccgctccaaactgccagatggtcctacaggaagcagtgaagaagaggaggaatttttggaaattcctcctttcaacaagcagtatacagaatcccagcttcgagcaggagctggctatatccttgaagatttcaatgaagcccagtgtaacacagcttaccagtgtcttctaattgcggatcagcattgtcgaacccggaagtacttcctgtgccttgccagtgggattccttgtgtgtctcatgtctgggtccatgatagttgccatgccaaccagctccagaactaccgtaattatctgttgccagctgggtacagccttgaggagcaaagaattctggactggcaaccccgtgaaaatcctttccagaatctgaaggtactcttggtatcagaccaacagcagaacttcctggagctctggtctgagatcctcatgactggtggtgcagcctctgtgaagcagcaccattcaagtgcccataacaaagatattgctttaggggtatttgatgtggtggtgacggacccctcatgcccagcctcggtgctgaagtgtgctgaagcattgcagctgcctgtggtgtcacaagagtgggtgatccagtgcctcattgttggggagagaattggattcaagcagcatccaaaatataaacacgattatgtttctcactaaagatacttggtcttactggttttattccctgctatcgtggagattgtgttttaaccaggttttaaatgtgtcttgtgtgtaactggattccttgcatggatcttgtatatagttttatttgctgaacttttatgataaaataaatgttgaatctctttggttgtagtaactgggatttcttcatctgtttttttgagcttaatctcagaacaaatgacaagacatagtactttctctgagtctttcaacaggcttattcacttacggaggacagctcaccaaggaaattgaaaagttaagagtgaactttattctgtggcatcattcccaaaaggttattccagggtgtctaaaatgctatgcttgcagaaactcagtttaaggtaggtgaaggcccagattaacagttgtgccaaaagttgagtggaattgggcacagctctgtttcctgacagttaaaaaagacctcatgctctctctctgagctgagatcacagctcacctgtgggtactccccaactcttagagctaaagggagaacgaaaggaccaactgccatgaagggacagtgaccataagcttgatggaatgaccttccgtaagataaacatgggaagcacaagtgagaacacctggaaatgttacacgttctagtcaaagacccaatattattattattattattgtcacaatagctggaagcagttccttcccttcctctggcatcactgatccctgc

SEQ ID NO: 446812 - DNA, 6737 bp, Homo sapiens
acagcggcgacctagggatcgatctggagggacttggggagcgtgcagagacctctagctcgagcgcgagggacctcccgccgggatgcctggggagcagatggaccctactggaagtcagttggattcagatttctctcagcaagatactccttgcctgataattgaagattctcagcctgaaagccaggttctagaggatgattctggttctcacttcagtatgctatctcgacaccttcctaatctccagacgcacaaagaaaatcctgtgttggatgttgtgtccaatcctgaacaaacagctggagaagaacgaggagacggtaatagtgggttcaatgaacatttgaaagaaaacaaggttgcagaccctgtggattcttctaacttggacacatgtggttccatcagtcaggtcattgagcagttacctcagccaaacaggacaagcagtgttctgggaatgtcagtggaatctgctcctgctgtggaggaagagaagggagaagagttggaacagaaggagaaagagaaggaagaagatacttcaggcaatactacacattcccttggtgctgaagatactgcctcatcacagttgggttttggggttctggaactctcccagagccaggatgttgaggaaaatactgtgccatatgaagtggacaaagagcagctacaatcagtaaccaccaactctggttataccaggctgtctgatgtggatgctaatactgcaattaagcatgaagaacagtccaacgaagatatccccatagcagaacagtccagcaaggacatccctgtgacagcacagcccagtaaggatgtacatgttgtaaaagagcaaaatccaccacctgcaaggtcagaggacatgccttttagccccaaagcatctgttgctgctatggaagcaaaagaacagttgtctgcacaagaacttatggaaagtggactgcagattcagaagtcaccagagcctgaggttttgtcaactcaggaagacttgtttgaccagagcaataaaacagtatcttctgatggttgctctactccttcaagggaggaaggtgggtgttctttggcttccactcctgccaccactctgcatctcctgcagctctctggtcagaggtcccttgttcaggacagtctttccacgaattcttcagatcttgttgctccttctcctgatgctttccgatctactccttttatcgttcctagcagtcccacagagcaagaagggagacaagataagccaatggacacgtcagtgttatctgaagaaggaggagagccttttcagaagaaacttcaaagtggtgaaccagtggagttagaaaacccccctctcctgcctgagtccactgtatcaccacaagcctcaacaccaatatctcagagcacaccagtcttccctcctgggtcacttcctatcccatcccagcctcagttttctcatgacatttttattccttccccaagtctggaagaacaatcaaatgatgggaagaaagatggagatatgcatagttcatctttgacagttgagtgttctaaaacttcagagattgaaccaaagaattcccctgaggatcttgggctatctttgacaggggattcttgcaagttgatgctttctacaagtgaatatagtcagtccccaaagatggagagcttgagttctcacagaattgatgaagatggagaaaacacacagattgaggatacggaacccatgtctccagttctcaattctaaatttgttcctgctgaaaatgatagtatcctgatgaatccagcacaggatggtgaagtacaactgagtcagaatgatgacaaaacaaagggagatgatacagacaccagggatgacattagtattttagccactggttgcaagggcagagaagaaacggtagcagaagatgtttgtattgatctcacttgtgattcggggagtcaggcagttccgtcaccagctactcgatctgaggcactttctagtgtgttagatcaggaggaagctatggaaattaaagaacaccatccagaggaggggtcttcagggtctgaggtggaagaaatccctgagacaccttgtgaaagtcaaggagaggaactcaaagaagaaaatatggagagtgttccgttgcacctttctctgactgaaactcagtcccaagggttgtgtcttcaaaaggaaatgccaaaaaaagaatgctcagaagctatggaagttgaaaccagtgtgattagtattgattcccctcaaaagttggcaatacttgaccaagaattggaacataaggaacaggaagcttgggaagaagctacttcagaggactccagtgttgtcattgtagatgtgaaagagccatctcccagagttgatgtttcttgtgaacctttggagggagtggagaagtgctcagattcccagtcatgggaggatattgctccagaaatagaaccatgtgctgagaatagattagacaccaaggaagaaaagagtgtagaatatgaaggagatctgaaatcagggactgcagaaacagaacctgtagagcaagattcttcacagccttccttacctttagtgagagcagatgatcctttaagacttgaccaggagttgcagcagccccaaactcaggagaaaacaagtaattcattaacagaagactcaaaaatggctaatgcaaagcagctaagctcagatgcagaggcccagaagctggggaagccctctgcccatgcctcacaaagcttctgtgaaagttctagtgaaaccccatttcatttcactttgcctaaagaaggtgatatcatcccaccattgactggtgcaaccccacctcttattgggcacctaaaattggagcccaagagacacagtactcctattggtattagcaactatccagaaagcaccatagcaaccagtgatgtcatgtctgaaagcatggtggagacccatgatcccatacttgggagtggaaaaggggattctggggctgccccagacgtggatgataaattatgtctaagaatgaaactggttagtcctgagactgaggcgagtgaagagtctttgcagttcaacctggaaaagcctgcaactggtgaaagaaaaaatggatctactgctgttgctgagtctgttgccagtccccagaagaccatgtctgtgttgagctgtatctgtgaagccaggcaagagaatgaggctcgaagtgaggatccccccaccacacccatcagggggaacttgctccactttccaagttctcaaggagaagaggagaaagaaaaattggagggtgaccatacaatcaggcagagtcaacagcctatgaagcccattagtcctgtcaaggaccctgtttctcctgcttcccagaagatggtcatacaagggccatccagtcctcaaggagaggcaatggtgacagatgtgctagaagaccagaaagaaggacggagtactaataaggaaaatcctagtaaggccttgattgaaaggcccagccaaaataacataggaatccaaaccatggagtgttccttgagggtcccagaaactgtttcagcagcaacccagactataaagaatgtgtgtgagcaggggaccagtacagtggaccagaactttggaaagcaagatgccacagttcagactgagagggggagtggtgagaaaccagtcagtgctcctggggatgatacagagtcgctccatagccagggagaagaagagtttgatatgcctcagcctccacatggccatgtcttacatcgtcacatgagaacaatccgggaagtacgcacacttgtcactcgtgtcattacagatgtgtattatgtggatggaacagaagtagaaagaaaagtaactgaggagactgaagagccaattgtagagtgtcaggagtgtgaaactgaagtttccccttcacagactgggggctcctcaggtgacctgggggatatcagctccttctcctccaaggcatccagcttacaccgcacatcaagtgggacaagtctctcagctatgcacagcagtggaagctcagggaaaggagccggaccactcagagggaaaaccagcgggacagaacccgcagattttgccttacccagctcccgaggaggcccaggaaaactgagtcctagaaaaggggtcagtcagacagggacgccagtgtgtgaggaggatggtgatgcaggccttggcatcagacagggagggaaggctccagtcacgcctcgtgggcgtgggcgaaggggccgcccaccttctcggaccactggaaccagagaaacagctgtgcctggccccttgggcatagaggacatttcacctaacttgtcaccagatgataaatccttcagccgtgtcgtgccccgagtgccagactccaccagacgaacagatgtgggtgctggtgctttgcgtcgtagtgactctccagaaattcctttccaggctgctgctggcccttctgatggcttagatgcctcctctccaggaaatagctttgtagggctccgtgttgtagccaagtggtcatccaatggctacttttactctgggaaaatcacacgagatgtcggagctgggaagtataaattgctctttgatgatgggtacgaatgtgatgtgttgggcaaagacattctgttatgtgaccccatcccgctggacactgaagtgacggccctctcggaggatgagtatttcagtgcaggagtggtgaaaggacataggaaggagtctggggaactgtactacagcattgaaaaagaaggccaaagaaagtggtataagcgaatggctgtcatcctgtccttggagcaaggaaacagactgagagagcagtatgggcttggcccctatgaagcagtaacacctcttacaaaggcagcagatatcagcttagacaatttggtggaagggaagcggaaacggcgcagtaacgtcagctccccagccacccctactgcctccagtagcagcagcacaacccctacccgaaagatcacagaaagtcctcgtgcctccatgggagttctctcaggcaaaagaaaacttatcacttctgaagaggaacggtcccctgccaagcgaggtcgcaagtctgccacagtaaaacctggtgcagtaggggcaggagagtttgtgagcccctgtgagagtggagacaacaccggtgaaccctctgccctggaagagcagagagggcctttgcctctcaacaagaccttgtttctgggctacgcatttctccttaccatggccacaaccagtgacaagttggccagccgctccaaactgccagatggtcctacaggaagcagtgaagaagaggaggaatttttggaaattcctcctttcaacaagcagtatacagaatcccagcttcgagcaggagctggctatatccttgaagatttcaatgaagcccaggtgaggagtttctttgtgtaacctaatatagtggcaatgataagagccaacttgctgtgttgagaagaggcctgggaggggttggggaacctggataaagtagccagagatttcaggaactgagaaactgccaaaatgtttttgcatgaaatagaatttttgttgtgtatagggaagagaaggtaggaccttgggttagttaatggctatggttctgttgctgggacaaaagaagattgatgtttatgtttagtagtagaaacccctattagggttgctgatttttagcctgaaaggctgagttcataggttttggttgtccgttgaggatttaggtcctcagtatgctgcaggtgaggcagagagaacatctatggaaattacttgggccttccagtgagaagagtggccttgggcaggatagactaaatcacattttgggtagtagttgggagtcttcagatctgctcttcatggctcattatggctgctgcttaggagctttccacagaagtcaccaaacccattggctctgcttcttttcttgcagtgtaacacagcttaccagtgtcttctaattgcggatcagcattgtcgaacccggaagtacttcctgtgccttgccagtgggattccttgtgtgtctcatgtctgggtccatgatagttgccatgccaaccagctccagaactaccgtaattatctgttgccagctgggtacagccttgaggagcaaagaattctggactggcaaccccgtgaaaatcctttccagaatctgaaggtactcttggtatcagaccaacagcagaacttcctggagctctggtctgagatcctcatgactggtggtgcagcctctgtgaagcagcaccattcaagtgcccataacaaagatattgctttaggggtatttgatgtggtggtgacggacccctcatgcccagcctcggtgctgaagtgtgctgaagcattgcagctgcctgtggtgtcacaagagtgggtgatccagtgcctcattgttggggagagaattggattcaagcagcatccaaaatataaacacgattatgtttctcactaaagatacttggtcttactggttttattccctgctatcgtggagattgtgttttaaccaggttttaaatgtgtcttgtgtgtaactggattccttgcatggatcttgtatatagttttatttgctgaacttttatgataaaataaatgttgaatctctttggttgtagta

SEQ ID NO: 446813 - DNA, 6283 bp, Homo sapiens
acagcggcgacctagggatcgatctggagggacttggggagcgtgcagagacctctagctcgagcgcgagggacctcccgccgggatgcctggggagcagatggaccctactggaagtcagttggattcagatttctctcagcaagatactccttgcctgataattgaagattctcagcctgaaagccaggttctagaggatgattctggttctcacttcagtatgctatctcgacaccttcctaatctccagacgcacaaagaaaatcctgtgttggatgttgtgtccaatcctgaacaaacagctggagaagaacgaggagacggtaatagtgggttcaatgaacatttgaaagaaaacaaggttgcagaccctgtggattcttctaacttggacacatgtggttccatcagtcaggtcattgagcagttacctcagccaaacaggacaagcagtgttctgggaatgtcagtggaatctgctcctgctgtggaggaagagaagggagaagagttggaacagaaggagaaagagaaggaagaagatacttcaggcaatactacacattcccttggtgctgaagatactgcctcatcacagttgggttttggggttctggaactctcccagagccaggatgttgaggaaaatactgtgccatatgaagtggacaaagagcagctacaatcagtaaccaccaactctggttataccaggctgtctgatgtggatgctaatactgcaattaagcatgaagaacagtccaacgaagatatccccatagcagaacagtccagcaaggacatccctgtgacagcacagcccagtaaggatgtacatgttgtaaaagagcaaaatccaccacctgcaaggtcagaggacatgccttttagccccaaagcatctgttgctgctatggaagcaaaagaacagttgtctgcacaagaacttatggaaagtggactgcagattcagaagtcaccagagcctgaggttttgtcaactcaggaagacttgtttgaccagagcaataaaacagtatcttctgatggttgctctactccttcaagggaggaaggtgggtgttctttggcttccactcctgccaccactctgcatctcctgcagctctctggtcagaggtcccttgttcaggacagtctttccacgaattcttcagatcttgttgctccttctcctgatgctttccgatctactccttttatcgttcctagcagtcccacagagcaagaagggagacaagataagccaatggacacgtcagtgttatctgaagaaggaggagagccttttcagaagaaacttcaaagtggtgaaccagtggagttagaaaacccccctctcctgcctgagtccactgtatcaccacaagcctcaacaccaatatctcagagcacaccagtcttccctcctgggtcacttcctatcccatcccagcctcagttttctcatgacatttttattccttccccaagtctggaagaacaatcaaatgatgggaagaaagatggagatatgcatagttcatctttgacagttgagtgttctaaaacttcagagattgaaccaaagaattcccctgaggatcttgggctatctttgacaggggattcttgcaagttgatgctttctacaagtgaatatagtcagtccccaaagatggagagcttgagttctcacagaattgatgaagatggagaaaacacacagattgaggatacggaacccatgtctccagttctcaattctaaatttgttcctgctgaaaatgatagtatcctgatgaatccagcacaggatggtgaagtacaactgagtcagaatgatgacaaaacaaagggagatgatacagacaccagggatgacattagtattttagccactggttgcaagggcagagaagaaacggtagcagaagatgtttgtattgatctcacttgtgattcggggagtcaggcagttccgtcaccagctactcgatctgaggcactttctagtgtgttagatcaggaggaagctatggaaattaaagaacaccatccagaggaggggtcttcagggtctgaggtggaagaaatccctgagacaccttgtgaaagtcaaggagaggaactcaaagaagaaaatatggagagtgttccgttgcacctttctctgactgaaactcagtcccaagggttgtgtcttcaaaaggaaatgccaaaaaaagaatgctcagaagctatggaagttgaaaccagtgtgattagtattgattcccctcaaaagttggcaatacttgaccaagaattggaacataaggaacaggaagcttgggaagaagctacttcagaggactccagtgttgtcattgtagatgtgaaagagccatctcccagagttgatgtttcttgtgaacctttggagggagtggagaagtgctcagattcccagtcatgggaggatattgctccagaaatagaaccatgtgctgagaatagattagacaccaaggaagaaaagagtgtagaatatgaaggagatctgaaatcagggactgcagaaacagaacctgtagagcaagattcttcacagccttccttacctttagtgagagcagatgatcctttaagacttgaccaggagttgcagcagccccaaactcaggagaaaacaagtaattcattaacagaagactcaaaaatggctaatgcaaagcagctaagctcagatgcagaggcccagaagctggggaagccctctgcccatgcctcacaaagcttctgtgaaagttctagtgaaaccccatttcatttcactttgcctaaagaaggtgatatcatcccaccattgactggtgcaaccccacctcttattgggcacctaaaattggagcccaagagacacagtactcctattggtattagcaactatccagaaagcaccatagcaaccagtgatgtcatgtctgaaagcatggtggagacccatgatcccatacttgggagtggaaaaggggattctggggctgccccagacgtggatgataaattatgtctaagaatgaaactggttagtcctgagactgaggcgagtgaagagtctttgcagttcaacctggaaaagcctgcaactggtgaaagaaaaaatggatctactgctgttgctgagtctgttgccagtccccagaagaccatgtctgtgttgagctgtatctgtgaagccaggcaagagaatgaggctcgaagtgaggatccccccaccacacccatcagggggaacttgctccactttccaagttctcaaggagaagaggagaaagaaaaattggagggtgaccatacaatcaggcagagtcaacagcctatgaagcccattagtcctgtcaaggaccctgtttctcctgcttcccagaagatggtcatacaagggccatccagtcctcaaggagaggcaatggtgacagatgtgctagaagaccagaaagaaggacggagtactaataaggaaaatcctagtaaggccttgattgaaaggcccagccaaaataacataggaatccaaaccatggagtgttccttgagggtcccagaaactgtttcagcagcaacccagactataaagaatgtgtgtgagcaggggaccagtacagtggaccagaactttggaaagcaagatgccacagttcagactgagagggggagtggtgagaaaccagtcagtgctcctggggatgatacagagtcgctccatagccagggagaagaagagtttgatatgcctcagcctccacatggccatgtcttacatcgtcacatgagaacaatccgggaagtacgcacacttgtcactcgtgtcattacagatgtgtattatgtggatggaacagaagtagaaagaaaagtaactgaggagactgaagagccaattgtagagtgtcaggagtgtgaaactgaagtttccccttcacagactgggggctcctcaggtgacctgggggatatcagctccttctcctccaaggcatccagcttacaccgcacatcaagtgggacaagtctctcagctatgcacagcagtggaagctcagggaaaggagccggaccactcagagggaaaaccagcgggacagaacccgcagattttgccttacccagctcccgaggaggcccaggaaaactgagtcctagaaaaggggtcagtcagacagggacgccagtgtgtgaggaggatggtgatgcaggccttggcatcagacagggagggaaggctccagtcacgcctcgtgggcgtgggcgaaggggccgcccaccttctcggaccactggaaccagagaaacagctgtgcctggccccttgggcatagaggacatttcacctaacttgtcaccagatgataaatccttcagccgtgtcgtgccccgagtgccagactccaccagacgaacagatgtgggtgctggtgctttgcgtcgtagtgactctccagaaattcctttccaggctgctgctggcccttctgatggcttagatgcctcctctccaggaaatagctttgtagggctccgtgttgtagccaagtggtcatccaatggctacttttactctgggaaaatcacacgagatgtcggagctgggaagtataaattgctctttgatgatgggtacgaatgtgatgtgttgggcaaagacattctgttatgtgaccccatcccgctggacactgaagtgacggccctctcggaggatgagtatttcagtgcaggagtggtgaaaggacataggaaggagtctggggaactgtactacagcattgaaaaagaaggccaaagaaagtggtataagcgaatggctgtcatcctgtccttggagcaaggaaacagactgagagagcagtatgggcttggcccctatgaagcagtaacacctcttacaaaggcagcagatatcagcttagacaatttggtggaagggaagcggaaacggcgcagtaacgtcagctccccagccacccctactgcctccagtagcagcagcacaacccctacccgaaagatcacagaaagtcctcgtgcctccatgggagttctctcaggcaaaagaaaacttatcacttctgaagaggaacggtcccctgccaagcgaggtcgcaagtctgccacagtaaaacctggtgcagtaggggcaggagagtttgtgagcccctgtgagagtggagacaacaccggtgaaccctctgccctggaagagcagagagggcctttgcctctcaacaagaccttgtttctgggctacgcatttctccttaccatggccacaaccagtgacaagttggccagccgctccaaactgccagatggtcctacaggaagcagtgaagaagaggaggcctactgcaaccatccaagtcaatcaggtctgaatgccctgccatcttccccatttgcgttctatgggcatctgctagagcaaacccatgtggaggaatttttggaaattcctcctttcaacaagcagtatacagaatcccagcttcgagcaggagctggctatatccttgaagatttcaatgaagcccagtgtaacacagcttaccagtgtcttctaattgcggatcagcattgtcgaacccggaagtacttcctgtgccttgccagtgggattccttgtgtgtctcatgtctgggtccatgatagttgccatgccaaccagctccagaactaccgtaattatctgttgccagctgggtacagccttgaggagcaaagaattctggactggcaaccccgtgaaaatcctttccagaatctgaaggtactcttggtatcagaccaacagcagaacttcctggagctctggtctgagatcctcatgactggtggtgcagcctctgtgaagcagcaccattcaagtgcccataacaaagatattgctttaggggtatttgatgtggtggtgacggacccctcatgcccagcctcggtgctgaagtgtgctgaagcattgcagctgcctgtggtgtcacaagagtgggtgatccagtgcctcattgttggggagagaattggattcaagcagcatccaaaatataaacacgattatgtttctcactaaagatacttggtcttactggttttattccctgctatcgtggagattgtgttttaaccaggttttaaatgtgtcttgtgtgtaactggattccttgcatggatcttgtatatagttttatttgctgaacttttatgataaaataaatgttgaatctctttggttgtagta

SEQ ID NO: 446814 - DNA, 7777 bp, Homo sapiens
acagcggcgacctagggatcgatctggagggacttggggagcgtgcagagacctctagctcgagcgcgagggacctcccgccgggatgcctggggagcagatggaccctactggaagtcagttggattcagatttctctcagcaagatactccttgcctgataattgaagattctcagcctgaaagccaggttctagaggatgattctggttctcacttcagtatgctatctcgacaccttcctaatctccagacgcacaaagaaaatcctgtgttggatgttgtgtccaatcctgaacaaacagctggagaagaacgaggagacggtaatagtgggttcaatgaacatttgaaagaaaacaaggttgcagaccctgtggattcttctaacttggacacatgtggttccatcagtcaggtcattgagcagttacctcagccaaacaggacaagcagtgttctgggaatgtcagtggaatctgctcctgctgtggaggaagagaagggagaagagttggaacagaaggagaaagagaaggaagaagatacttcaggcaatactacacattcccttggtgctgaagatactgcctcatcacagttgggttttggggttctggaactctcccagagccaggatgttgaggaaaatactgtgccatatgaagtggacaaagagcagctacaatcagtaaccaccaactctggttataccaggctgtctgatgtggatgctaatactgcaattaagcatgaagaacagtccaacgaagatatccccatagcagaacagtccagcaaggacatccctgtgacagcacagcccagtaaggatgtacatgttgtaaaagagcaaaatccaccacctgcaaggtcagaggacatgccttttagccccaaagcatctgttgctgctatggaagcaaaagaacagttgtctgcacaagaacttatggaaagtggactgcagattcagaagtcaccagagcctgaggttttgtcaactcaggaagacttgtttgaccagagcaataaaacagtatcttctgatggttgctctactccttcaagggaggaaggtgggtgttctttggcttccactcctgccaccactctgcatctcctgcagctctctggtcagaggtcccttgttcaggacagtctttccacgaattcttcagatcttgttgctccttctcctgatgctttccgatctactccttttatcgttcctagcagtcccacagagcaagaagggagacaagataagccaatggacacgtcagtgttatctgaagaaggaggagagccttttcagaagaaacttcaaagtggtgaaccagtggagttagaaaacccccctctcctgcctgagtccactgtatcaccacaagcctcaacaccaatatctcagagcacaccagtcttccctcctgggtcacttcctatcccatcccagcctcagttttctcatgacatttttattccttccccaagtctggaagaacaatcaaatgatgggaagaaagatggagatatgcatagttcatctttgacagttgagtgttctaaaacttcagagattgaaccaaagaattcccctgaggatcttgggctatctttgacaggggattcttgcaagttgatgctttctacaagtgaatatagtcagtccccaaagatggagagcttgagttctcacagaattgatgaagatggagaaaacacacagattgaggatacggaacccatgtctccagttctcaattctaaatttgttcctgctgaaaatgatagtatcctgatgaatccagcacaggatggtgaagtacaactgagtcagaatgatgacaaaacaaagggagatgatacagacaccagggatgacattagtattttagccactggttgcaagggcagagaagaaacggtagcagaagatgtttgtattgatctcacttgtgattcggggagtcaggcagttccgtcaccagctactcgatctgaggcactttctagtgtgttagatcaggaggaagctatggaaattaaagaacaccatccagaggaggggtcttcagggtctgaggtggaagaaatccctgagacaccttgtgaaagtcaaggagaggaactcaaagaagaaaatatggagagtgttccgttgcacctttctctgactgaaactcagtcccaagggttgtgtcttcaaaaggaaatgccaaaaaaagaatgctcagaagctatggaagttgaaaccagtgtgattagtattgattcccctcaaaagttggcaatacttgaccaagaattggaacataaggaacaggaagcttgggaagaagctacttcagaggactccagtgttgtcattgtagatgtgaaagagccatctcccagagttgatgtttcttgtgaacctttggagggagtggagaagtgctcagattcccagtcatgggaggatattgctccagaaatagaaccatgtgctgagaatagattagacaccaaggaagaaaagagtgtagaatatgaaggagatctgaaatcagggactgcagaaacagaacctgtagagcaagattcttcacagccttccttacctttagtgagagcagatgatcctttaagacttgaccaggagttgcagcagccccaaactcaggagaaaacaagtaattcattaacagaagactcaaaaatggctaatgcaaagcagctaagctcagatgcagaggcccagaagctggggaagccctctgcccatgcctcacaaagcttctgtgaaagttctagtgaaaccccatttcatttcactttgcctaaagaaggtgatatcatcccaccattgactggtgcaaccccacctcttattgggcacctaaaattggagcccaagagacacagtactcctattggtattagcaactatccagaaagcaccatagcaaccagtgatgtcatgtctgaaagcatggtggagacccatgatcccatacttgggagtggaaaaggggattctggggctgccccagacgtggatgataaattatgtctaagaatgaaactggttagtcctgagactgaggcgagtgaagagtctttgcagttcaacctggaaaagcctgcaactggtgaaagaaaaaatggatctactgctgttgctgagtctgttgccagtccccagaagaccatgtctgtgttgagctgtatctgtgaagccaggcaagagaatgaggctcgaagtgaggatccccccaccacacccatcagggggaacttgctccactttccaagttctcaaggagaagaggagaaagaaaaattggagggtgaccatacaatcaggcagagtcaacagcctatgaagcccattagtcctgtcaaggaccctgtttctcctgcttcccagaagatggtcatacaagggccatccagtcctcaaggagaggcaatggtgacagatgtgctagaagaccagaaagaaggacggagtactaataaggaaaatcctagtaaggccttgattgaaaggcccagccaaaataacataggaatccaaaccatggagtgttccttgagggtcccagaaactgtttcagcagcaacccagactataaagaatgtgtgtgagcaggggaccagtacagtggaccagaactttggaaagcaagatgccacagttcagactgagagggggagtggtgagaaaccagtcagtgctcctggggatgatacagagtcgctccatagccagggagaagaagagtttgatatgcctcagcctccacatggccatgtcttacatcgtcacatgagaacaatccgggaagtacgcacacttgtcactcgtgtcattacagatgtgtattatgtggatggaacagaagtagaaagaaaagtaactgaggagactgaagagccaattgtagagtgtcaggagtgtgaaactgaagtttccccttcacagactgggggctcctcaggtgacctgggggatatcagctccttctcctccaaggcatccagcttacaccgcacatcaagtgggacaagtctctcagctatgcacagcagtggaagctcagggaaaggagccggaccactcagagggaaaaccagcgggacagaacccgcagattttgccttacccagctcccgaggaggcccaggaaaactgagtcctagaaaaggggtcagtcagacagggacgccagtgtgtgaggaggatggtgatgcaggccttggcatcagacagggagggaaggctccagtcacgcctcgtgggcgtgggcgaaggggccgcccaccttctcggaccactggaaccagagaaacagctgtgcctggccccttgggcatagaggacatttcacctaacttgtcaccagatgataaatccttcagccgtgtcgtgccccgagtgccagactccaccagacgaacagatgtgggtgctggtgctttgcgtcgtagtgactctccagaaattcctttccaggctgctgctggcccttctgatggcttagatgcctcctctccaggaaatagctttgtagggctccgtgttgtagccaagtggtcatccaatggctacttttactctgggaaaatcacacgagatgtcggagctgggaagtataaattgctctttgatgatgggtacgaatgtgatgtgttgggcaaagacattctgttatgtgaccccatcccgctggacactgaagtgacggccctctcggaggatgagtatttcagtgcaggagtggtgaaaggacataggaaggagtctggggaactgtactacagcattgaaaaagaaggccaaagaaagtggtataagcgaatggctgtcatcctgtccttggagcaaggaaacagactgagagagcagtatgggcttggcccctatgaagcagtaacacctcttacaaaggcagcagatatcagcttagacaatttggtggaagggaagcggaaacggcgcagtaacgtcagctccccagccacccctactgcctccagtagcagcagcacaacccctacccgaaagatcacagaaagtcctcgtgcctccatgggagttctctcaggcaaaagaaaacttatcacttctgaagaggaacggtcccctgccaagcgaggtcgcaagtctgccacagtaaaacctggtgcagtaggggcaggagagtttgtgagcccctgtgagagtggagacaacaccggtgaaccctctgccctggaagagcagagagggcctttgcctctcaacaagaccttgtttctgggctacgcatttctccttaccatggccacaaccagtgacaagttggccagccgctccaaactgccagatggtcctacaggaagcagtgaagaagaggaggaatttttggaaattcctcctttcaacaagcagtatacagaatcccagcttcgagcaggagctggctatatccttgaagatttcaatgaagcccaggtgaggagtttctttgtgtaacctaatatagtggcaatgataagagccaacttgctgtgttgagaagaggcctgggaggggttggggaacctggataaagtagccagagatttcaggaactgagaaactgccaaaatgtttttgcatgaaatagaatttttgttgtgtatagggaagagaaggtaggaccttgggttagttaatggctatggttctgttgctgggacaaaagaagattgatgtttatgtttagtagtagaaacccctattagggttgctgatttttagcctgaaaggctgagttcataggttttggttgtccgttgaggatttaggtcctcagtatgctgcaggtgaggcagagagaacatctatggaaattacttgggccttccagtgagaagagtggccttgggcaggatagactaaatcacattttgggtagtagttgggagtcttcagatctgctcttcatggctcattatggctgctgcttaggagctttccacagaagtcaccaaacccattggctctgcttcttttcttgcagtgtaacacagcttaccagtgtcttctaattgcggatcagcattgtcgaacccggaagtacttcctgtgccttgccagtgggattccttgtgtgtctcatgtctgggtccatgatagttgccatgccaaccagctccagaactaccgtaattatctgttgccagctgggtacagccttgaggagcaaagaattctggactggtaagtatttgaagcccatccagaattgtataggcaggaggacagcaagctttggagggaagagaatctaggtgagagagtaaagctttctagaaattggaatgtctgtgggataaatttgagtgggtttgaaatgacttcaggagtttatctagtttatttccctaggttacattggctaggaaccttttgcaaatgtgtgaagatttgtatataggttcaatattctcaacctgtaaagtcagagaactaagttttaagcaagcattaaaaatatataggctcaggagcatgatttggattattctcagccccagaacaaacatggaaattagaaagccaggaatgcaaggaatacagatcattcatagaaagaaggaagagaagggggaccctaatatagggcttagttttttaagatgaagtcttgctctgtcacctaggctggagtacagtggcgcagtgacgacttactgcagcctcaacctcccaggctgaagtgatccccctacctcagcctcccaagctgctgggactacaggcactcgccaccacacccagctaatttttttgttgtcttttgtagagatggggtctcaccacattgcccaggctggtctcgaactcccaggcccaagagatccaaccacgacagcctcccaaagtgctgggattacaggcttgagacactatgtctgatggggcatttatttttgaaagcattcagatgtacatgagtccctttgcagaaaggcagtttgttggatattacttgtcatgctaaggtcctttcctgtctccttcataggcaaccccgtgaaaatcctttccagaatctgaaggtactcttggtatcagaccaacagcagaacttcctggagctctggtctgagatcctcatgactggtggtgcagcctctgtgaagcagcaccattcaagtgcccataacaaaggtacctgaaagagtgtgtgtagtgtctttgttccagggatctccttagacctgtaggtgttaggccttgtggtccaaggctcaggcctaataggttgaccgtatccatgtttcttagagaagaaaagtaccaccttcaagaggtgagtcaacataagtgaagcactggacgtatatttgttaaatatttctacaaggtcagcacatagtgattataactctgcctttggtcatgatcagtagcagtgtgtttgacataatagggctttggtttgtgcagagtgggatgtattggttagaatcaaatctctctttctaatggagggctaagttgagtgtcctttccttcttcactttcccttgctccttgcagatattgctttaggggtatttgatgtggtggtgacggacccctcatgcccagcctcggtgctgaagtgtgctgaagcattgcagctgcctgtggtgtcacaagagtgggtgatccagtgcctcattgttggggagagaattggattcaagcagcatccaaaatataaacacgattatggtcgaccggccgatgaatttagtagtagtaggcggctgc

SEQ ID NO: 446815 - DNA, 5371 bp, Homo sapiens
acagcggcgacctagggatcgatctggagggacttggggagcgtgcagagacctctagctcgagcgcgagggacctcccgccgggatgcctggggagcagatggaccctactggaagtcagttggattcagatttctctcagcaagatactccttgcctgataattgaagattctcagcctgaaagccaggttctagaggatgattctggttctcacttcagtatgctatctcgacaccttcctaatctccagacgcacaaagaaaatcctgtgttggatgttgtgtccaatcctgaacaaacagctggagaagaacgaggagacggtaatagtgggttcaatgaacatttgaaagaaaacaaggttgcagaccctgtggattcttctaacttggacacatgtggttccatcagtcaggtcattgagcagttacctcagccaaacaggacaagcagtgttctgggaatgtcagtggaatctgctcctgctgtggaggaagagaagggagaagagttggaacagaaggagaaagagaaggaagaagatacttcaggcaatactacacattcccttggtgctgaagatactgcctcatcacagttgggttttggggttctggaactctcccagagccaggatgttgaggaaaatactgtgccatatgaagtggacaaagagcagctacaatcagtaaccaccaactctggttataccaggctgtctgatgtggatgctaatactgcaattaagcatgaagaacagtccaacgaagatatccccatagcagaacagtccagcaaggacatccctgtgacagcacagcccagtaaggatgtacatgttgtaaaagagcaaaatccaccacctgcaaggtcagaggacatgccttttagccccaaagcatctgttgctgctatggaagcaaaagaacagttgtctgcacaagaacttatggaaagtggactgcagattcagaagtcaccagagcctgaggttttgtcaactcaggaagacttgtttgaccagagcaataaaacagtatcttctgatggttgctctactccttcaagggaggaaggtgggtgttctttggcttccactcctgccaccactctgcatctcctgcagctctctggtcagaggtcccttgttcaggacagtctttccacgaattcttcagatcttgttgctccttctcctgatgctttccgatctactccttttatcgttcctagcagtcccacagagcaagaagggagacaagataagccaatggacacgtcagtgttatctgaagaaggaggagagccttttcagaagaaacttcaaagtggtgaaccagtggagttagaaaacccccctctcctgcctgagtccactgtatcaccacaagcctcaacaccaatatctcagagcacaccagtcttccctcctgggtcacttcctatcccatcccagcctcagttttctcatgacatttttattccttccccaagtctggaagaacaatcaaatgatgggaagaaagatggagatatgcatagttcatctttgacagttgagtgttctaaaacttcagagattgaaccaaagaattcccctgaggatcttgggctatctttgacaggggattcttgcaagttgatgctttctacaagtgaatatagtcagtccccaaagatggagagcttgagttctcacagaattgatgaagatggagaaaacacacagattgaggatacggaacccatgtctccagttctcaattctaaatttgttcctgctgaaaatgatagtatcctgatgaatccagcacaggatggtgaagtacaactgagtcagaatgatgacaaaacaaagggagatgatacagacaccagggatgacattagtattttagccactggttgcaagggcagagaagaaacggtagcagaagatgtttgtattgatctcacttgtgattcggggagtcaggcagttccgtcaccagctactcgatctgaggcactttctagtgtgttagatcaggaggaagctatggaaattaaagaacaccatccagaggaggggtcttcagggtctgaggtggaagaaatccctgagacaccttgtgaaagtcaaggagaggaactcaaagaagaaaatatggagagtgttccgttgcacctttctctgactgaaactcagtcccaagggttgtgtcttcaaaaggaaatgccaaaaaaagaatgctcagaagctatggaagttgaaaccagtgtgattagtattgattcccctcaaaagttggcaatacttgaccaagaattggaacataaggaacaggaagcttgggaagaagctacttcagaggactccagtgttgtcattgtagatgtgaaagagccatctcccagagttgatgtttcttgtgaacctttggagggagtggagaagtgctcagattcccagtcatgggaggatattgctccagaaatagaaccatgtgctgagaatagattagacaccaaggaagaaaagagtgtagaatatgaaggagatctgaaatcagggactgcagaaacagaacctgtagagcaagattcttcacagccttccttacctttagtgagagcagatgatcctttaagacttgaccaggagttgcagcagccccaaactcaggagaaaacaagtaattcattaacagaagactcaaaaatggctaatgcaaagcagctaagctcagatgcagaggcccagaagctggggaagccctctgcccatgcctcacaaagcttctgtgaaagttctagtgaaaccccatttcatttcactttgcctaaagaaggtgatatcatcccaccattgactggtgcaaccccacctcttattgggcacctaaaattggagcccaagagacacagtactcctattggtattagcaactatccagaaagcaccatagcaaccagtgatgtcatgtctgaaagcatggtggagacccatgatcccatacttgggagtggaaaaggggattctggggctgccccagacgtggatgataaattatgtctaagaatgaaactggttagtcctgagactgaggcgagtgaagagtctttgcagttcaacctggaaaagcctgcaactggtgaaagaaaaaatggatctactgctgttgctgagtctgttgccagtccccagaagaccatgtctgtgttgagctgtatctgtgaagccaggcaagagaatgaggctcgaagtgaggatccccccaccacacccatcagggggaacttgctccactttccaagttctcaaggagaagaggagaaagaaaaattggagggtgaccatacaatcaggcagagtcaacagcctatgaagcccattagtcctgtcaaggaccctgtttctcctgcttcccagaagatggtcatacaagggccatccagtcctcaaggagaggcaatggtgacagatgtgctagaagaccagaaagaaggacggagtactaataaggaaaatcctagtaaggccttgattgaaaggcccagccaaaataacataggaatccaaaccatggagtgttccttgagggtcccagaaactgtttcagcagcaacccagaactccaccagacgaacagatgtgggtgctggtgctttgcgtcgtagtgactctccagaaattcctttccaggctgctgctggcccttctgatggcttagatgcctcctctccaggaaatagctttgtagggctccgtgttgtagccaagtggtcatccaatggctacttttactctgggaaaatcacacgagatgtcggagctgggaagtataaattgctctttgatgatgggtacgaatgtgatgtgttgggcaaagacattctgttatgtgaccccatcccgctggacactgaagtgacggccctctcggaggatgagtatttcagtgcaggagtggtgaaaggacataggaaggagtctggggaactgtactacagcattgaaaaagaaggccaaagaaagtggtataagcgaatggctgtcatcctgtccttggagcaaggaaacagactgagagagcagtatgggcttggcccctatgaagcagtaacacctcttacaaaggcagcagatatcagcttagacaatttggtggaagggaagcggaaacggcgcagtaacgtcagctccccagccacccctactgcctccagtagcagcagcacaacccctacccgaaagatcacagaaagtcctcgtgcctccatgggagttctctcaggcaaaagaaaacttatcacttctgaagaggaacggtcccctgccaagcgaggtcgcaagtctgccacagtaaaacctggtgcagtaggggcaggagagtttgtgagcccctgtgagagtggagacaacaccggtgaaccctctgccctggaagagcagagagggcctttgcctctcaacaagaccttgtttctgggctacgcatttctccttaccatggccacaaccagtgacaagttggccagccgctccaaactgccagatggtcctacaggaagcagtgaagaagaggaggaatttttggaaattcctcctttcaacaagcagtatacagaatcccagcttcgagcaggagctggctatatccttgaagatttcaatgaagcccagtgtaacacagcttaccagtgtcttctaattgcggatcagcattgtcgaacccggaagtacttcctgtgccttgccagtgggattccttgtgtgtctcatgtctgggtccatgatagttgccatgccaaccagctccagaactaccgtaattatctgttgccagctgggtacagccttgaggagcaaagaattctggactggcaaccccgtgaaaatcctttccagaatctgaaggtactcttggtatcagaccaacagcagaacttcctggagctctggtctgagatcctcatgactggtggtgcagcctctgtgaagcagcaccattcaagtgcccataacaaagatattgctttaggggtatttgatgtggtggtgacggacccctcatgcccagcctcggtgctgaagtgtgctgaagcattgcagctgcctgtggtgtcacaagagtgggtgatccagtgcctcattgttggggagagaattggattcaagcagcatccaaaatataaacacgattatgtttctcactaaagatacttggtcttactggttttattccctgctatcgtggagattgtgttttaaccaggttttaaatgtgtcttgtgtgtaactggattccttgcatggatcttgtatatagttttatttgctgaacttttatgataaaataaatgttgaatctctttggttgtagta

SEQ ID NO: 446816 - DNA, 2591 bp, Homo sapiens
accaatatagtaccatgtttattttatattttattgagatacagtatagtcccattagaatgaacaattcttctcagaatcacctgggggagaaaaaaaaaagaacagatcctaaatgttcagttcagtggcttttgaaaattttatctaaccactactcaaaacagatacagaacattcccattattccagaaagtctcctgattctcacctttttgaattataattttgtgccatctgtaggattttccaaccatcatattagcattgtgttattatggcatcttttatcttctgtatctattttttccttgcaggagactgaagagccaattgtagagtgtcaggagtgtgaaactgaagtttccccttcacagactgggggctcctcaggtgacctgggggatatcagctccttctcctccaaggcatccagcttacaccgcacatcaagtgggacaagtctctcagctatgcacagcagtggaagctcagggaaaggagccggaccactcagagggaaaaccagcgggacagaacccgcagattttgccttacccagctcccgaggaggcccaggaaaactgagtcctagaaaaggggtcagtcagacagggacgccagtgtgtgaggaggatggtgatgcaggccttggcatcagacagggagggaaggctccagtcacgcctcgtgggcgtgggcgaaggggccgcccaccttctcggaccactggaaccagagaaacagctgtgcctggccccttgggcatagaggacatttcacctaacttgtcaccagatgataaatccttcagccgtgtcgtgccccgagtgccagactccaccagacgaacagatgtgggtgctggtgctttgcgtcgtagtgactctccagaaattcctttccaggctgctgctggcccttctgatggcttagatgcctcctctccaggaaatagctttgtagggctccgtgttgtagccaagtggtcatccaatggctacttttactctgggaaaatcacacgagatgtcggagctgggaagtataaattgctctttgatgatgggtacgaatgtgatgtgttgggcaaagacattctgttatgtgaccccatcccgctggacactgaagtgacggccctctcggaggatgagtatttcagtgcaggagtggtgaaaggacataggaaggagtctggggaactgtactacagcattgaaaaagaaggccaaagaaagtggtataagcgaatggctgtcatcctgtccttggagcaaggaaacagactgagagagcagtatgggcttggcccctatgaagcagtaacacctcttacaaaggcagcagatatcagcttagacaatttggtggaagggaagcggaaacggcgcagtaacgtcagctccccagccacccctactgcctccagtagcagcagcacaacccctacccgaaagatcacagaaagtcctcgtgcctccatgggagttctctcaggcaaaagaaaacttatcacttctgaagaggaacggtcccctgccaagcgaggtcgcaagtctgccacagtaaaacctggtgcagtaggggcaggagagtttgtgagcccctgtgagagtggagacaacaccggtgaaccctctgccctggaagagcagagagggcctttgcctctcaacaagaccttgtttctgggctacgcatttctccttaccatggccacaaccagtgacaagttggccagccgctccaaactgccagatggtcctacaggaagcagtgaagaagaggaggaatttttggaaattcctcctttcaacaagcagtatacagaatcccagcttcgagcaggagctggctatatccttgaagatttcaatgaagcccagtgtaacacagcttaccagtgtcttctaattgcggatcagcattgtcgaacccggaagtacttcctgtgccttgccagtgggattccttgtgtgtctcatgtctgggtccatgatagttgccatgccaaccagctccagaactaccgtaattatctgttgccagctgggtacagccttgaggagcaaagaattctggactggcaaccccgtgaaaatcctttccagaatctgaaggtactcttggtatcagaccaacagcagaacttcctggagctctggtctgagatcctcatgactggtggtgcagcctctgtgaagcagcaccattcaagtgcccataacaaagatattgctttaggggtatttgatgtggtggtgacggacccctcatgcccagcctcggtgctgaagtgtgctgaagcattgcagctgcctgtggtgtcacaagagtgggtgatccagtgcctcattgttggggagagaattggattcaagcagcatccaaaatataaacacgattatgtttctcactaaagatacttggtcttactggttttattccctgctatcgtggagattgtgttttaaccaggttttaaatgtgtcttgtgtgtaactggattccttgcatggatcttgtatatagttttatttgctgaacttttatgataaaataaatgttgaatctctttggttgtagta

SEQ ID NO: 446817 - DNA, 2261 bp, Homo sapiens
cagcaggtttgagcagagcagctggtgaatcccagacgtggccccagctctgcctggctctctagcacctgggggatatcagctccttctcctccaaggcatccagcttacaccgcacatcaagtgggacaagtctctcagctatgcacagcagtggaagctcagggaaaggagccggaccactcagagggaaaaccagcgggacagaacccgcagattttgccttacccagctcccgaggaggcccaggaaaactgagtcctagaaaaggggtcagtcagacagggacgccagtgtgtgaggaggatggtgatgcaggccttggcatcagacagggagggaaggctccagtcacgcctcgtgggcgtgggcgaaggggccgcccaccttctcggaccactggaaccagagaaacagctgtgcctggccccttgggcatagaggacatttcacctaacttgtcaccagatgataaatccttcagccgtgtcgtgccccgagtgccagactccaccagacgaacagatgtgggtgctggtgctttgcgtcgtagtgactctccagaaattcctttccaggctgctgctggcccttctgatggcttagatgcctcctctccaggaaatagctttgtagggctccgtgttgtagccaagtggtcatccaatggctacttttactctgggaaaatcacacgagatgtcggagctgggaagtataaattgctctttgatgatgggtacgaatgtgatgtgttgggcaaagacattctgttatgtgaccccatcccgctggacactgaagtgacggccctctcggaggatgagtatttcagtgcaggagtggtgaaaggacataggaaggagtctggggaactgtactacagcattgaaaaagaaggccaaagaaagtggtataagcgaatggctgtcatcctgtccttggagcaaggaaacagactgagagagcagtatgggcttggcccctatgaagcagtaacacctcttacaaaggcagcagatatcagcttagacaatttggtggaagggaagcggaaacggcgcagtaacgtcagctccccagccacccctactgcctccagtagcagcagcacaacccctacccgaaagatcacagaaagtcctcgtgcctccatgggagttctctcaggcaaaagaaaacttatcacttctgaagaggaacggtcccctgccaagcgaggtcgcaagtctgccacagtaaaacctggtgcagtaggggcaggagagtttgtgagcccctgtgagagtggagacaacaccggtgaaccctctgccctggaagagcagagagggcctttgcctctcaacaagaccttgtttctgggctacgcatttctccttaccatggccacaaccagtgacaagttggccagccgctccaaactgccagatggtcctacaggaagcagtgaagaagaggaggaatttttggaaattcctcctttcaacaagcagtatacagaatcccagcttcgagcaggagctggctatatccttgaagatttcaatgaagcccagtgtaacacagcttaccagtgtcttctaattgcggatcagcattgtcgaacccggaagtacttcctgtgccttgccagtgggattccttgtgtgtctcatgtctgggtccatgatagttgccatgccaaccagctccagaactaccgtaattatctgttgccagctgggtacagccttgaggagcaaagaattctggactggcaaccccgtgaaaatcctttccagaatctgaaggtactcttggtatcagaccaacagcagaacttcctggagctctggtctgagatcctcatgactggtggtgcagcctctgtgaagcagcaccattcaagtgcccataacaaagatattgctttaggggtatttgatgtggtggtgacggacccctcatgcccagcctcggtgctgaagtgtgctgaagcattgcagctgcctgtggtgtcacaagagtgggtgatccagtgcctcattgttggggagagaattggattcaagcagcatccaaaatataaacacgattatgtttctcactaaagatacttggtcttactggttttattccctgctatcgtggagattgtgttttaaccaggttttaaatgtgtcttgtgtgtaactggattccttgcatggatcttgtatatagttttatttgctgaacttttatgataaaataaatgttgaatctctttggttgtagta

SEQ ID NO: 446818 - DNA, 1591 bp, Homo sapiens
ctaagtgttactgtttgggattgacaactggaattttgttaagtcctaacttcagtccactgttggatctctaaattccctaactcaggcctgctttacagagcccttgtgagagggtgctaaggagcctaagacaacagcaagcttcttttatgctttccaccccccaggagtggtgaaaggacataggaaggagtctggggaactgtactacagcattgaaaaagaaggccaaagaaagtggtataagcgaatggctgtcatcctgtccttggagcaaggaaacagactgagagagcagtatgggcttggcccctatgaagcagtaacacctcttacaaaggcagcagatatcagcttagacaatttggtggaagggaagcggaaacggcgcagtaacgtcagctccccagccacccctactgcctccagtagcagcagcacaacccctacccgaaagatcacagaaagtcctcgtgcctccatgggagttctctcaggcaaaagaaaacttatcacttctgaagaggaacggtcccctgccaagcgaggtcgcaagtctgccacagtaaaacctggtgcagtaggggcaggagagtttgtgagcccctgtgagagtggagacaacaccggtgaaccctctgccctggaagagcagagagggcctttgcctctcaacaagaccttgtttctgggctacgcatttctccttaccatggccacaaccagtgacaagttggccagccgctccaaactgccagatggtcctacaggaagcagtgaagaagaggaggaatttttggaaattcctcctttcaacaagcagtatacagaatcccagcttcgagcaggagctggctatatccttgaagatttcaatgaagcccagtgtaacacagcttaccagtgtcttctaattgcggatcagcattgtcgaacccggaagtacttcctgtgccttgccagtgggattccttgtgtgtctcatgtctgggtccatgatagttgccatgccaaccagctccagaactaccgtaattatctgttgccagctgggtacagccttgaggagcaaagaattctggactggcaaccccgtgaaaatcctttccagaatctgaaggtactcttggtatcagaccaacagcagaacttcctggagctctggtctgagatcctcatgactggtggtgcagcctctgtgaagcagcaccattcaagtgcccataacaaagatattgctttaggggtatttgatgtggtggtgacggacccctcatgcccagcctcggtgctgaagtgtgctgaagcattgcagctgcctgtggtgtcacaagagtgggtgatccagtgcctcattgttggggagagaattggattcaagcagcatccaaaatataaacacgattatgtttctcactaaagatacttggtcttactggttttattccctgctatcgtggagattgtgttttaaccaggttttaaatgtgtcttgtgtgtaactggattccttgcatggatcttgtatatagttttatttgctgaacttttatgataaaataaatgttgaatctctttggttgtagta

SEQ ID NO: 446819 - DNA, 5546 bp, Homo sapiens
acagcggcgacctagggatcgatctggagggacttggggagcgtgcagagacctctagctcgagcgcgagggacctcccgccgggatgcctggggagcagatggaccctactggaagtcagttggattcagatttctctcagcaagatactccttgcctgataattgaagattctcagcctgaaagccaggttctagaggatgattctggttctcacttcagtatgctatctcgacaccttcctaatctccagacgcacaaagaaaatcctgtgttggatgttgtgtccaatcctgaacaaacagctggagaagaacgaggagacggtaatagtgggttcaatgaacatttgaaagaaaacaaggttgcagaccctgtggattcttctaacttggacacatgtggttccatcagtcaggtcattgagcagttacctcagccaaacaggacaagcagtgttctgggaatgtcagtggaatctgctcctgctgtggaggaagagaagggagaagagttggaacagaaggagaaagagaaggaagaagatacttcaggcaatactacacattcccttggtgctgaagatactgcctcatcacagttgggttttggggttctggaactctcccagagccaggatgttgaggaaaatactgtgccatatgaagtggacaaagagcagctacaatcagtaaccaccaactctggttataccaggctgtctgatgtggatgctaatactgcaattaagcatgaagaacagtccaacgaagatatccccatagcagaacagtccagcaaggacatccctgtgacagcacagcccagtaaggatgtacatgttgtaaaagagcaaaatccaccacctgcaaggtcagaggacatgccttttagccccaaagcatctgttgctgctatggaagcaaaagaacagttgtctgcacaagaacttatggaaagtggactgcagattcagaagtcaccagagcctgaggttttgtcaactcaggaagacttgtttgaccagagcaataaaacagtatcttctgatggttgctctactccttcaagggaggaaggtgggtgttctttggcttccactcctgccaccactctgcatctcctgcagctctctggtcagaggtcccttgttcaggacagtctttccacgaattcttcagatcttgttgctccttctcctgatgctttccgatctactccttttatcgttcctagcagtcccacagagcaagaagggagacaagataagccaatggacacgtcagtgttatctgaagaaggaggagagccttttcagaagaaacttcaaagtggtgaaccagtggagttagaaaacccccctctcctgcctgagtccactgtatcaccacaagcctcaacaccaatatctcagagcacaccagtcttccctcctgggtcacttcctatcccatcccagcctcagttttctcatgacatttttattccttccccaagtctggaagaacaatcaaatgatgggaagaaagatggagatatgcatagttcatctttgacagttgagtgttctaaaacttcagagattgaaccaaagaattcccctgaggatcttgggctatctttgacaggggattcttgcaagttgatgctttctacaagtgaatatagtcagtccccaaagatggagagcttgagttctcacagaattgatgaagatggagaaaacacacagattgaggatacggaacccatgtctccagttctcaattctaaatttgttcctgctgaaaatgatagtatcctgatgaatccagcacaggatggtgaagtacaactgagtcagaatgatgacaaaacaaagggagatgatacagacaccagggatgacattagtattttagccactggttgcaagggcagagaagaaacggtagcagaagatgtttgtattgatctcacttgtgattcggggagtcaggcagttccgtcaccagctactcgatctgaggcactttctagtgtgttagatcaggaggaagctatggaaattaaagaacaccatccagaggaggggtcttcagggtctgaggtggaagaaatccctgagacaccttgtgaaagtcaaggagaggaactcaaagaagaaaatatggagagtgttccgttgcacctttctctgactgaaactcagtcccaagggttgtgtcttcaaaaggaaatgccaaaaaaagaatgctcagaagctatggaagttgaaaccagtgtgattagtattgattcccctcaaaagttggcaatacttgaccaagaattggaacataaggaacaggaagcttgggaagaagctacttcagaggactccagtgttgtcattgtagatgtgaaagagccatctcccagagttgatgtttcttgtgaacctttggagggagtggagaagtgctcagattcccagtcatgggaggatattgctccagaaatagaaccatgtgctgagaatagattagacaccaaggaagaaaagagtgtagaatatgaaggagatctgaaatcagggactgcagaaacagaacctgtagagcaagattcttcacagccttccttacctttagtgagagcagatgatcctttaagacttgaccaggagttgcagcagccccaaactcaggagaaaacaagtaattcattaacagaagactcaaaaatggctaatgcaaagcagctaagctcagatgcagaggcccagaagctggggaagccctctgcccatgcctcacaaagcttctgtgaaagttctagtgaaaccccatttcatttcactttgcctaaagaaggtgatatcatcccaccattgactggtgcaaccccacctcttattgggcacctaaaattggagcccaagagacacagtactcctattggtattagcaactatccagaaagcaccatagcaaccagtgatgtcatgtctgaaagcatggtggagacccatgatcccatacttgggagtggaaaaggggattctggggctgccccagacgtggatgataaattatgtctaagaatgaaactggttagtcctgagactgaggcgagtgaagagtctttgcagttcaacctggaaaagcctgcaactggtgaaagaaaaaatggatctactgctgttgctgagtctgttgccagtccccagaagaccatgtctgtgttgagctgtatctgtgaagccaggcaagagaatgaggctcgaagtgaggatccccccaccacacccatcagggggaacttgctccactttccaagttctcaaggagaagaggagaaagaaaaattggagggtgaccatacaatcaggcagagtcaacagcctatgaagcccattagtcctgtcaaggaccctgtttctcctgcttcccagaagatggtcatacaagggccatccagtcctcaaggagaggcaatggtgacagatgtgctagaagaccagaaagaaggacggagtactaataaggaaaatcctagtaaggccttgattgaaaggcccagccaaaataacataggaatccaaaccatggagtgttccttgagggtcccagaaactgtttcagcagcaacccagactataaagaatgtgtgtgagcaggggaccagtacagtggaccagaactttggaaagcaagatgccacagttcagactgagagggggagtggtgagaaaccagtcagtgctcctggggatgatacagagtcgctccatagccagggagaagaagagtttgatatgcctcagcctccacatggccatgtcttacatcgtcacatgagaacaatccgggaagtacgcacacttgtcactcgtgtcattacagatgtgtattatgtggatggaacagaagtagaaagaaaagtaactgaggagactgaagagccaattgtagagtgtcaggagtgtgaaactgaagtttccccttcacagactgggggctcctcaggtgacctgggggatatcagctccttctcctccaaggcatccagcttacaccgcacatcaagtgggacaagtctctcagctatgcacagcagtggaagctcagggaaaggagccggaccactcagagggaaaaccagcgggacagaacccgcagattttgccttacccagctcccgaggaggcccaggaaaactgagtcctagaaaaggggtcagtcagacagggacgccagtgtgtgaggaggatggtgatgcaggccttggcatcagacagggagggaaggctccagtcacgcctcgtgggcgtgggcgaaggggccgcccaccttctcggaccactggaaccagagaaacagctgtgcctggccccttgggcatagaggacatttcacctaacttgtcaccagatgataaatccttcagccgtgtcgtgccccgagtgccagactccaccagacgaacagatgtgggtgctggtgctttgcgtcgtagtgactctccagaaattcctttccaggctgctgctggcccttctgatggcttagatgcctcctctccaggaaatagctttgtagggctccgtgttgtagccaagtggtcatccaatggctacttttactctgggaaaatcacacgagatgtcggagctgggaagtataaattgctctttgatgatgggtacgaatgtgatgtgttgggcaaagacattctgttatgtgaccccatcccgctggacactgaagtgacggccctctcggaggatgagtatttcagtgcaggagtggtgaaaggacataggaaggagtctggggaactgtactacagcattgaaaaagaaggccaaagaaagtggtataagcgaatggctgtcatcctgtccttggagcaaggaaacagactgagagagcagtatgggcttggcccctatgaagcagtaacacctcttacaaaggcagcagatatcagcttagacaatttggtggaagggaagcggaaacggcgcagtaacgtcagctccccagccacccctactgcctccagtagcagcagcacaacccctacccgaaagatcacagaaagtcctcgtgcctccatgggagttctctcaggcaaaagaaaacttatcacttctgaagaggaacggtcccctgccaagcgaggtcgcaagtctgccacagtaaaacctggtaagtgctcctttttgcctcattcttccttcagaccatggcagaatgcagggtcagctgctggaaaaatggagcttaatatgtggcagtggcccttctgtcctgctataaagtcggggtcctgcccaagcccacaggtgatattcagggacagctcactgtatccctcctcccccatcccctacagactctagtgcgggtagatagcaaggccagaattagctgagtgtggtggcgggcgcctgtaataccagctactggggaggctgaggtgggagaatcgcttgaacccaggaaggcggaggttgcagtgagccgaaattgcaccattgcactccagcctgggcaacaagagtgaaacttggtctccag

SEQ ID NO: 446820 - DNA, 1381 bp, Homo sapiens
gtttttattatcttggtttttttttttaatatagaatttttggaaattcctcctttcaacaagcagtatacagaatcccagcttcgagcaggagctggctatatccttgaagatttcaatgaagcccaggtgaggagtttctttgtgtaacctaatatagtggcaatgataagagccaacttgctgtgttgagaagaggcctgggaggggttggggaacctggataaagtagccagagatttcaggaactgagaaactgccaaaatgtttttgcatgaaatagaatttttgttgtgtatagggaagagaaggtaggaccttgggttagttaatggctatggttctgttgctgggacaaaagaagattgatgtttatgtttagtagtagaaacccctattagggttgctgatttttagcctgaaaggctgagttcataggttttggttgtccgttgaggatttaggtcctcagtatgctgcaggtgaggcagagagaacatctatggaaattacttgggccttccagtgagaagagtggccttgggcaggatagactaaatcacattttgggtagtagttgggagtcttcagatctgctcttcatggctcattatggctgctgcttaggagctttccacagaagtcaccaaacccattggctctgcttcttttcttgcagtgtaacacagcttaccagtgtcttctaattgcggatcagcattgtcgaacccggaagtacttcctgtgccttgccagtgggattccttgtgtgtctcatgtctgggtccatgatagttgccatgccaaccagctccagaactaccgtaattatctgttgccagctgggtacagccttgaggagcaaagaattctggactggcaaccccgtgaaaatcctttccagaatctgaaggtactcttggtatcagaccaacagcagaacttcctggagctctggtctgagatcctcatgactggtggtgcagcctctgtgaagcagcaccattcaagtgcccataacaaagatattgctttaggggtatttgatgtggtggtgacggacccctcatgcccagcctcggtgctgaagtgtgctgaagcattgcagctgcctgtggtgtcacaagagtgggtgatccagtgcctcattgttggggagagaattggattcaagcagcatccaaaatataaacacgattatgtttctcactaaagatacttggtcttactggttttattccctgctatcgtggagattgtgttttaaccaggttttaaatgtgtcttgtgtgtaactggattccttgcatggatcttgtatatagttttatttgctgaacttttatgataaaataaatgttgaatctctttggttgtagta

SEQ ID NO: 446821 - DNA, 5528 bp, Homo sapiens
acagcggcgacctagggatcgatctggagggacttggggagcgtgcagagacctctagctcgagcgcgagggacctcccgccgggatgcctggggagcagatggaccctactggaagtcagttggattcagatttctctcagcaagatactccttgcctgataattgaagattctcagcctgaaagccaggttctagaggatgattctggttctcacttcagtatgctatctcgacaccttcctaatctccagacgcacaaagaaaatcctgtgttggatgttgtgtccaatcctgaacaaacagctggagaagaacgaggagacggtaatagtgggttcaatgaacatttgaaagaaaacaaggttgcagaccctgtggattcttctaacttggacacatgtggttccatcagtcaggtcattgagcagttacctcagccaaacaggacaagcagtgttctgggaatgtcagtggaatctgctcctgctgtggaggaagagaagggagaagagttggaacagaaggagaaagagaaggaagaagatacttcaggcaatactacacattcccttggtgctgaagatactgcctcatcacagttgggttttggggttctggaactctcccagagccaggatgttgaggaaaatactgtgccatatgaagtggacaaagagcagctacaatcagtaaccaccaactctggttataccaggctgtctgatgtggatgctaatactgcaattaagcatgaagaacagtccaacgaagatatccccatagcagaacagtccagcaaggacatccctgtgacagcacagcccagtaaggatgtacatgttgtaaaagagcaaaatccaccacctgcaaggtcagaggacatgccttttagccccaaagcatctgttgctgctatggaagcaaaagaacagttgtctgcacaagaacttatggaaagtggactgcagattcagaagtcaccagagcctgaggttttgtcaactcaggaagacttgtttgaccagagcaataaaacagtatcttctgatggttgctctactccttcaagggaggaaggtgggtgttctttggcttccactcctgccaccactctgcatctcctgcagctctctggtcagaggtcccttgttcaggacagtctttccacgaattcttcagatcttgttgctccttctcctgatgctttccgatctactccttttatcgttcctagcagtcccacagagcaagaagggagacaagataagccaatggacacgtcagtgttatctgaagaaggaggagagccttttcagaagaaacttcaaagtggtgaaccagtggagttagaaaacccccctctcctgcctgagtccactgtatcaccacaagcctcaacaccaatatctcagagcacaccagtcttccctcctgggtcacttcctatcccatcccagcctcagttttctcatgacatttttattccttccccaagtctggaagaacaatcaaatgatgggaagaaagatggagatatgcatagttcatctttgacagttgagtgttctaaaacttcagagattgaaccaaagaattcccctgaggatcttgggctatctttgacaggggattcttgcaagttgatgctttctacaagtgaatatagtcagtccccaaagatggagagcttgagttctcacagaattgatgaagatggagaaaacacacagattgaggatacggaacccatgtctccagttctcaattctaaatttgttcctgctgaaaatgatagtatcctgatgaatccagcacaggatggtgaagtacaactgagtcagaatgatgacaaaacaaagggagatgatacagacaccagggatgacattagtattttagccactggttgcaagggcagagaagaaacggtagcagaagatgtttgtattgatctcacttgtgattcggggagtcaggcagttccgtcaccagctactcgatctgaggcactttctagtgtgttagatcaggaggaagctatggaaattaaagaacaccatccagaggaggggtcttcagggtctgaggtggaagaaatccctgagacaccttgtgaaagtcaaggagaggaactcaaagaagaaaatatggagagtgttccgttgcacctttctctgactgaaactcagtcccaagggttgtgtcttcaaaaggaaatgccaaaaaaagaatgctcagaagctatggaagttgaaaccagtgtgattagtattgattcccctcaaaagttggcaatacttgaccaagaattggaacataaggaacaggaagcttgggaagaagctacttcagaggactccagtgttgtcattgtagatgtgaaagagccatctcccagagttgatgtttcttgtgaacctttggagggagtggagaagtgctcagattcccagtcatgggaggatattgctccagaaatagaaccatgtgctgagaatagattagacaccaaggaagaaaagagtgtagaatatgaaggagatctgaaatcagggactgcagaaacagaacctgtagagcaagattcttcacagccttccttacctttagtgagagcagatgatcctttaagacttgaccaggagttgcagcagccccaaactcaggagaaaacaagtaattcattaacagaagactcaaaaatggctaatgcaaagcagctaagctcagatgcagaggcccagaagctggggaagccctctgcccatgcctcacaaagcttctgtgaaagttctagtgaaaccccatttcatttcactttgcctaaagaaggtgatatcatcccaccattgactggtgcaaccccacctcttattgggcacctaaaattggagcccaagagacacagtactcctattggtattagcaactatccagaaagcaccatagcaaccagtgatgtcatgtctgaaagcatggtggagacccatgatcccatacttgggagtggaaaaggggattctggggctgccccagacgtggatgataaattatgtctaagaatgaaactggttagtcctgagactgaggcgagtgaagagtctttgcagttcaacctggaaaagcctgcaactggtgaaagaaaaaatggatctactgctgttgctgagtctgttgccagtccccagaagaccatgtctgtgttgagctgtatctgtgaagccaggcaagagaatgaggctcgaagtgaggatccccccaccacacccatcagggggaacttgctccactttccaagttctcaaggagaagaggagaaagaaaaattggagggtgaccatacaatcaggcagagtcaacagcctatgaagcccattagtcctgtcaaggaccctgtttctcctgcttcccagaagatggtcatacaagggccatccagtcctcaaggagaggcaatggtgacagatgtgctagaagaccagaaagaaggacggagtactaataaggaaaatcctagtaaggccttgattgaaaggcccagccaaaataacataggaatccaaaccatggagtgttccttgagggtcccagaaactgtttcagcagcaacccagactataaagaatgtgtgtgagcaggggaccagtacagtggaccagaactttggaaagcaagatgccacagttcagactgagagggggagtggtgagaaaccagtcagtgctcctggggatgatacagagtcgctccatagccagggagaagaagagtttgatatgcctcagcctccacatggccatgtcttacatcgtcacatgagaacaatccgggaagtacgcacacttgtcactcgtgtcattacagatgtgtattatgtggatggaacagaagtagaaagaaaagtaactgaggagactgaagagccaattgtagagtgtcaggagtgtgaaactgaagtttccccttcacagactgggggctcctcaggtgacctgggggatatcagctccttctcctccaaggcatccagcttacaccgcacatcaagtgggacaagtctctcagctatgcacagcagtggaagctcagggaaaggagccggaccactcagagggaaaaccagcgggacagaacccgcagattttgccttacccagctcccgaggaggcccaggaaaactgagtcctagaaaaggggtcagtcagacagggacgccagtgtgtgaggaggatggtgatgcaggccttggcatcagacagggagggaaggctccagtcacgcctcgtgggcgtgggcgaaggggccgcccaccttctcggaccactggaaccagagaaacagctgtgcctggccccttgggcatagaggacatttcacctaacttgtcaccagatgataaatccttcagccgtgtcgtgccccgagtgccagactccaccagacgaacagatgtgggtgctggtgctttgcgtcgtagtgactctccagaaattcctttccaggctgctgctggcccttctgatggcttagatgcctcctctccaggaaatagctttgtagggctccgtgttgtagccaagtggtcatccaatggctacttttactctgggaaaatcacacgagatgtcggagctgggaagtataaattgctctttgatgatgggtacgaatgtgatgtgttgggcaaagacattctgttatgtgaccccatcccgctggacactgaagtgacggccctctcggaggatgagtatttcagtgcaggtaatgaaagaagcagagtttgtagagatttttttgtgccttggggcaataatactctgttatgttagtagttaccaagacattacttggtacttttccagtgtctctaaagtcagaaatttcattcctacaaaattggttactcttgccactgacttttctgtttgttcatttgtttttgaataaacttatttggaatattttagatgatttacagaaaatttgcgaagtacaaagtactgctagtacagagagttcctgtatacccctcatccagctttccctattgttgacatctggtgttagtatgggacgtttgtcaaaactaaaaatccaaccttggtgtattactattcacaaaactttagactttatttggatttcactagcttttccatcatgtcctttttctcttccagcatccaacattgcatttagtcatcacataccctttggtctcctctgatttgtggcaatttctcagtcttttgtttttcatgaccttgacagttttggggagtcctggtcaggtattttgtggaatgtccctccatttggatttgtctaatattttctcattagactggagttatgggatattttaaaaataatgccacatagatgggtgggtgtggtagctcatgcctgtaattccagcactttgggaggccaaagcagggggatcacttgaggtcaggagtttgagaccaggctgaaacatagtgagaccctgtctctcaaaaaaaaaaaaaaaaaaaaaaa

SEQ ID NO: 446822 - DNA, 3142 bp, Homo sapiens
acagcggcgacctagggatcgatctggagggacttggggagcgtgcagagacctctagctcgagcgcgagggacctcccgccgggatgcctggggagcagatggaccctactggaagtcagttggattcagatttctctcagcaagatactccttgcctgataattgaagattctcagcctgaaagccaggttctagaggatgattctggttctcacttcagtatgctatctcgacaccttcctaatctccagacgcacaaagaaaatcctgtgttggatgttgtgtccaatcctgaacaaacagctggagaagaacgaggagacggtaatagtgggttcaatgaacatttgaaagaaaacaaggttgcagaccctgtggattcttctaacttggacacatgtggttccatcagtcaggtcattgagcagttacctcagccaaacaggacaagcagtgttctgggaatgtcagtggaatctgctcctgctgtggaggaagagaagggagaagagttggaacagaaggagaaagagaaggaagaagatacttcaggcaatactacacattcccttggtgctgaagatactgcctcatcacagttgggttttggggttctggaactctcccagagccaggatgttgaggaaaatactgtgccatatgaagtggacaaagagcagctacaatcagtaaccaccaactctggttataccaggctgtctgatgtggatgctaatactgcaattaagcatgaagaacagtccaacgaagatatccccatagcagaacagtccagcaaggacatccctgtgacagcacagcccagtaaggatgtacatgttgtaaaagagcaaaatccaccacctgcaaggtcagaggacatgccttttagccccaaagcatctgttgctgctatggaagcaaaagaacagttgtctgcacaagaacttatggaaagtggactgcagattcagaagtcaccagagcctgaggttttgtcaactcaggaagacttgtttgaccagagcaataaaacagtatcttctgatggttgctctactccttcaagggaggaaggtgggtgttctttggcttccactcctgccaccactctgcatctcctgcagctctctggtcagaggtcccttgttcaggacagtctttccacgaattcttcagatcttgttgctccttctcctgatgctttccgatctactccttttatcgttcctagcagtcccacagagcaagaagggagacaagataagccaatggacacgtcagtgttatctgaagaaggaggagagccttttcagaagaaacttcaaagtggtgaaccagtggagttagaaaacccccctctcctgcctgagtccactgtatcaccacaagcctcaacaccaatatctcagagcacaccagtcttccctcctgggtcacttcctatcccatcccagcctcagttttctcatgacatttttattccttccccaagtctggaagaacaatcaaatgatgggaagaaagatggagatatgcatagttcatctttgacagttgagtgttctaaaacttcagagattgaaccaaagaattcccctgaggatcttgggctatctttgacaggggattcttgcaagttgatgctttctacaagtgaatatagtcagtccccaaagatggagagcttgagttctcacagaattgatgaagatggagaaaacacacagattgaggatacggaacccatgtctccagttctcaattctaaatttgttcctgctgaaaatgatagtatcctgatgaatccagcacaggatggtgaagtacaactgagtcagaatgatgacaaaacaaagggagatgatacagacaccagggatgacattagtattttagccactggttgcaagggcagagaagaaacggtagcagaagatgtttgtattgatctcacttgtgattcggggagtcaggcagttccgtcaccagctactcgatctgaggcactttctagtgtgttagatcaggaggaagctatggaaattaaagaacaccatccagaggaggggtcttcagggtctgaggtggaagaaatccctgagacaccttgtgaaagtcaaggagaggaactcaaagaagaaaatatggagagtgttccgttgcacctttctctgactgaaactcagtcccaagggttgtgtcttcaaaaggaaatgccaaaaaaagaatgctcagaagctatggaagttgaaaccagtgtgattagtattgattcccctcaaaagttggcaatacttgaccaagaattggaacataaggaacaggaagcttgggaagaagctacttcagaggactccagtgttgtcattgtagatgtgaaagagccatctcccagagttgatgtttcttgtgaacctttggagggagtggagaagtgctcagattcccagtcatgggaggatattgctccagaaatagaaccatgtgctgagaatagattagacaccaaggaagaaaagagtgtagaatatgaaggagatctgaaatcagggactgcagaaacagaacctgtagagcaagattcttcacagccttccttacctttagtgagagcagatgatcctttaagacttgaccaggagttgcagcagccccaaactcaggagaaaacaagtaattcattaacagaagactcaaaaatggctaatgcaaagcagctaagctcagatgcagaggcccagaagctggggaagccctctgcccatgcctcacaaagcttctgtgaaagttctagtgaaaccccatttcatttcactttgcctaaagaaggtgatatcatcccaccattgactggtgcaaccccacctcttattgggcacctaaaattggagcccaagagacacagtactcctattggtgagtgaataaaaagtaatgatatttaaggcagaatttctgagatatcattctctacacaagtgatattttagatctgaggagttgggtctggctggtaaggttgatttttgttttagggaaaatagggttatgaagtctggttctgtgattttactactaggagatgaggggtaaagagaggaaggaaagaaagggtggagggaagtaagaaagaaaga

SEQ ID NO: 446823 - DNA, 2345 bp, Homo sapiens
  misc_feature (2304)..(2304): n is a, c, g, or t
acagcggcgacctagggatcgatctggagggacttggggagcgtgcagagacctctagctcgagcgcgagggacctcccgccgggatgcctggggagcagatggaccctactggaagtcagttggattcagatttctctcagcaagatactccttgcctgataattgaagattctcagcctgaaagccaggttctagaggatgattctggttctcacttcagtatgctatctcgacaccttcctaatctccagacgcacaaagaaaatcctgtgttggatgttgtgtccaatcctgaacaaacagctggagaagaacgaggagacggtaatagtgggttcaatgaacatttgaaagaaaacaaggttgcagaccctgtggattcttctaacttggacacatgtggttccatcagtcaggtcattgagcagttacctcagccaaacaggacaagcagtgttctgggaatgtcagtggaatctgctcctgctgtggaggaagagaagggagaagagttggaacagaaggagaaagagaaggaagaagatacttcaggcaatactacacattcccttggtgctgaagatactgcctcatcacagttgggttttggggttctggaactctcccagagccaggatgttgaggaaaatactgtgccatatgaagtggacaaagagcagctacaatcagtaaccaccaactctggttataccaggctgtctgatgtggatgctaatactgcaattaagcatgaagaacagtccaacgaagatatccccatagcagaacagtccagcaaggacatccctgtgacagcacagcccagtaaggatgtacatgttgtaaaagagcaaaatccaccacctgcaaggtcagaggacatgccttttagccccaaagcatctgttgctgctatggaagcaaaagaacagttgtctgcacaagaacttatggaaagtggactgcagattcagaagtcaccagagcctgaggttttgtcaactcaggaagacttgtttgaccagagcaataaaacagtatcttctgatggttgctctactccttcaagggaggaaggtgggtgttctttggcttccactcctgccaccactctgcatctcctgcagctctctggtcagaggtcccttgttcaggacagtctttccacgaattcttcagatcttgttgctccttctcctgatgctttccgatctactccttttatcgttcctagcagtcccacagagcaagaagggagacaagataagccaatggacacgtcagtgttatctgaagaaggaggagagccttttcagaagaaacttcaaagtggtgaaccagtggagttagaaaacccccctctcctgcctgagtccactgtatcaccacaagcctcaacaccaatatctcagagcacaccagtcttccctcctgggtcacttcctatcccatcccagcctcagttttctcatgacatttttattccttccccaagtctggaagaacaatcaaatgatgggaagaaagatggagatatgcatagttcatctttgacagttgagtgttctaaaacttcagagattgaaccaaagaattcccctgaggatcttgggctatctttgacaggggattcttgcaagttgatgctttctacaagtgaatatagtcagtccccaaagatggagagcttgagttctcacagaattgatgaagatggagaaaacacacagattgaggatacggaacccatgtctccagttctcaattctaaatttgttcctgctgaaaatgatagtatcctgatgaatccagcacaggatggtgaagtacaactgagtcagaatgatgacaaaacaaagggagatgatacagacaccagggatgacattagtattttagccactggttgcaagggcagagaagaaacggtagcagaagatgtttgtattgatctcacttgtgattcggggagtcaggcagttccgtcaccagctactcgatctgaggcactttctagtgtgttagatcaggaggaagctatggaaattaaagaacaccatccagaggaggggtcttcagggtctgaggtggaagaaatccctgagacaccttgtgaaagtcaaggagaggaactcaaagaagaaaatatggagagtgttccgttgcacctttctctgactgaaactcagtcccgacgatggttggcaagcggaccatggtctagcggtagcatcagtgtcaaggaagaacacccgctacttagcagacctgcaaagggagtctccctttccctgggggagtntggagaagactctactcctccacctcttgtggagggcctga

SEQ ID NO: 446824 - DNA, 1754 bp, Homo sapiens
acagcggcgacctagggatcgatctggagggacttggggagcgtgcagagacctctagctcgagcgcgagggacctcccgccgggatgcctggggagcagatggaccctactggaagtcagttggattcagatttctctcagcaagatactccttgcctgataattgaagattctcagcctgaaagccaggttctagaggatgattctggttctcacttcagtatgctatctcgacaccttcctaatctccagacgcacaaagaaaatcctgtgttggatgttgtgtccaatcctgaacaaacagctggagaagaacgaggagacggtaatagtgggttcaatgaacatttgaaagaaaacaaggttgcagaccctgtggattcttctaacttggacacatgtggttccatcagtcaggtcattgagcagttacctcagccaaacaggacaagcagtgttctgggaatgtcagtggaatctgctcctgctgtggaggaagagaagggagaagagttggaacagaaggagaaagagaaggaagaagatacttcaggcaatactacacattcccttggtgctgaagatactgcctcatcacagttgggttttggggttctggaactctcccagagccaggatgttgaggaaaatactgtgccatatgaagtggacaaagagcagctacaatcagtaaccaccaactctggttataccaggctgtctgatgtggatgctaatactgcaattaagcatgaagaacagtccaacgaagatatccccatagcagaacagtccagcaaggacatccctgtgacagcacagcccagtaaggatgtacatgttgtaaaagagcaaaatccaccacctgcaaggtcagaggacatgccttttagccccaaagcatctgttgctgctatggaagcaaaagaacagttgtctgcacaagaacttatggaaagtggactgcagattcagaagtcaccagagcctgaggttttgtcaactcaggaagacttgtttgaccagagcaataaaacagtatcttctgatggttgctctactccttcaagggaggaaggtgggtgttctttggcttccactcctgccaccactctgcatctcctgcagctctctggtcagaggtcccttgttcaggacagtctttccacgaattcttcagatcttgttgctccttctcctgatgctttccgatctactccttttatcgttcctagcagtcccacagagcaagaagggagacaagataagccaatggacacgtcagtgttatctgaagaaggaggagagccttttcagaagaaacttcaaagtggtgaaccagtggagttagaaaacccccctctcctgcctgagtccactgtatcaccacaagcctcaacaccaatatctcagagcacaccagtcttccctcctgggtcacttcctatcccatcccagcctcagttttctcatgacatttttattccttccccaagtctggaagaacaatcaaatgatgggaagaaagatggagatatgcatagttcatctttgacagttgagtgttctaaaacttcagagattgaaccaaagaattcccctgaggatcttgggctatctttgacaggggattcttgcaagttgatgctttctacaagtgaatatagtcagtccccaaagatggagagcttgagcccaggagttcgagacctgcctgggcaatatagcgagaccccgttctccagaaaaagga

SEQ ID NO: 446825 - DNA, 438 bp, Homo sapiens
aatgtttgtatgtttatacttactagttttacttatttttatttctttttgttattttttgcaaatactagtagagcagagtgaaggtttaggtgtgatactaactaaattctgtttctctttcctttctctccttggttttgtttttattcagagcctgcaactggtgaaagaaaaaatggatctactgctgttgctgagtctgttgccaggtaaccaaagctggatgctatttagagtttaatacacagctactggtgatgagggtagatggtttatcaacaaaggaaaaaagttaaatgagaaagttaaaatgagactctttcataaaggatttagcaatgttttgaatggatcatagactttttagttaatacttttttaagttcagtgaagcttttttctacacctagaactaagataattgaaatgtcttta

SEQ ID NO: 446826 - DNA, 6800 bp, Homo sapiens
tgtcactgcctgcctgggtcctgcccgaggtctccatcctcggtttccctgtccttgccccgggccctgggagtgctctggaaggctgcgcagtattggaggggacagaatgaccttccggccttgagtccctggggagcagatggaccctactggaagtcagttggattcagatttctctcagcaagatactccttgcctgataattgaagattctcagcctgaaagccaggttctagaggatgattctggttctcacttcagtatgctatctcgacaccttcctaatctccagacgcacaaagaaaatcctgtgttggatgttgtgtccaatcctgaacaaacagctggagaagaacgaggagacggtaatagtgggttcaatgaacatttgaaagaaaacaaggttgcagaccctgtggattcttctaacttggacacatgtggttccatcagtcaggtcattgagcagttacctcagccaaacaggacaagcagtgttctgggaatgtcagtggaatctgctcctgctgtggaggaagagaagggagaagagttggaacagaaggagaaagagaaggaagaagatacttcaggcaatactacacattcccttggtgctgaagatactgcctcatcacagttgggttttggggttctggaactctcccagagccaggatgttgaggaaaatactgtgccatatgaagtggacaaagagcagctacaatcagtaaccaccaactctggttataccaggctgtctgatgtggatgctaatactgcaattaagcatgaagaacagtccaacgaagatatccccatagcagaacagtccagcaaggacatccctgtgacagcacagcccagtaaggatgtacatgttgtaaaagagcaaaatccaccacctgcaaggtcagaggacatgccttttagccccaaagcatctgttgctgctatggaagcaaaagaacagttgtctgcacaagaacttatggaaagtggactgcagattcagaagtcaccagagcctgaggttttgtcaactcaggaagacttgtttgaccagagcaataaaacagtatcttctgatggttgctctactccttcaagggaggaaggtgggtgttctttggcttccactcctgccaccactctgcatctcctgcagctctctggtcagaggtcccttgttcaggacagtctttccacgaattcttcagatcttgttgctccttctcctgatgctttccgatctactccttttatcgttcctagcagtcccacagagcaagaagggagacaagataagccaatggacacgtcagtgttatctgaagaaggaggagagccttttcagaagaaacttcaaagtggtgaaccagtggagttagaaaacccccctctcctgcctgagtccactgtatcaccacaagcctcaacaccaatatctcagagcacaccagtcttccctcctgggtcacttcctatcccatcccagcctcagttttctcatgacatttttattccttccccaagtctggaagaacaatcaaatgatgggaagaaagatggagatatgcatagttcatctttgacagttgagtgttctaaaacttcagagattgaaccaaagaattcccctgaggatcttgggctatctttgacaggggattcttgcaagttgatgctttctacaagtgaatatagtcagtccccaaagatggagagcttgagttctcacagaattgatgaagatggagaaaacacacagattgaggatacggaacccatgtctccagttctcaattctaaatttgttcctgctgaaaatgatagtatcctgatgaatccagcacaggatggtgaagtacaactgagtcagaatgatgacaaaacaaagggagatgatacagacaccagggatgacattagtattttagccactggttgcaagggcagagaagaaacggtagcagaagatgtttgtattgatctcacttgtgattcggggagtcaggcagttccgtcaccagctactcgatctgaggcactttctagtgtgttagatcaggaggaagctatggaaattaaagaacaccatccagaggaggggtcttcagggtctgaggtggaagaaatccctgagacaccttgtgaaagtcaaggagaggaactcaaagaagaaaatatggagagtgttccgttgcacctttctctgactgaaactcagtcccaagggttgtgtcttcaaaaggaaatgccaaaaaaagaatgctcagaagctatggaagttgaaaccagtgtgattagtattgattcccctcaaaagttggcaatacttgaccaagaattggaacataaggaacaggaagcttgggaagaagctacttcagaggactccagtgttgtcattgtagatgtgaaagagccatctcccagagttgatgtttcttgtgaacctttggagggagtggagaagtgctcagattcccagtcatgggaggatattgctccagaaatagaaccatgtgctgagaatagattagacaccaaggaagaaaagagtgtagaatatgaaggagatctgaaatcagggactgcagaaacagaacctgtagagcaagattcttcacagccttccttacctttagtgagagcagatgatcctttaagacttgaccaggagttgcagcagccccaaactcaggagaaaacaagtaattcattaacagaagactcaaaaatggctaatgcaaagcagctaagctcagatgcagaggcccagaagctggggaagccctctgcccatgcctcacaaagcttctgtgaaagttctagtgaaaccccatttcatttcactttgcctaaagaaggtgatatcatcccaccattgactggtgcaaccccacctcttattgggcacctaaaattggagcccaagagacacagtactcctattggtattagcaactatccagaaagcaccatagcaaccagtgatgtcatgtctgaaagcatggtggagacccatgatcccatacttgggagtggaaaaggggattctggggctgccccagacgtggatgataaattatgtctaagaatgaaactggttagtcctgagactgaggcgagtgaagagtctttgcagttcaacctggaaaagcctgcaactggtgaaagaaaaaatggatctactgctgttgctgagtctgttgccagtccccagaagaccatgtctgtgttgagctgtatctgtgaagccaggcaagagaatgaggctcgaagtgaggatccccccaccacacccatcagggggaacttgctccactttccaagttctcaaggagaagaggagaaagaaaaattggagggtgaccatacaatcaggcagagtcaacagcctatgaagcccattagtcctgtcaaggaccctgtttctcctgcttcccagaagatggtcatacaagggccatccagtcctcaaggagaggcaatggtgacagatgtgctagaagaccagaaagaaggacggagtactaataaggaaaatcctagtaaggccttgattgaaaggcccagccaaaataacataggaatccaaaccatggagtgttccttgagggtcccagaaactgtttcagcagcaacccagactataaagaatgtgtgtgagcaggggaccagtacagtggaccagaactttggaaagcaagatgccacagttcagactgagagggggagtggtgagaaaccagtcagtgctcctggggatgatacagagtcgctccatagccagggagaagaagagtttgatatgcctcagcctccacatggccatgtcttacatcgtcacatgagaacaatccgggaagtacgcacacttgtcactcgtgtcattacagatgtgtattatgtggatggaacagaagtagaaagaaaagtaactgaggagactgaagagccaattgtagagtgtcaggagtgtgaaactgaagtttccccttcacagactgggggctcctcaggtgacctgggggatatcagctccttctcctccaaggcatccagcttacaccgcacatcaagtgggacaagtctctcagctatgcacagcagtggaagctcagggaaaggagccggaccactcagagggaaaaccagcgggacagaacccgcagattttgccttacccagctcccgaggaggcccaggaaaactgagtcctagaaaaggggtcagtcagacagggacgccagtgtgtgaggaggatggtgatgcaggccttggcatcagacagggagggaaggctccagtcacgcctcgtgggcgtgggcgaaggggccgcccaccttctcggaccactggaaccagagaaacagctgtgcctggccccttgggcatagaggacatttcacctaacttgtcaccagatgataaatccttcagccgtgtcgtgccccgagtgccagactccaccagacgaacagatgtgggtgctggtgctttgcgtcgtagtgactctccagaaattcctttccaggctgctgctggcccttctgatggcttagatgcctcctctccaggaaatagctttgtagggctccgtgttgtagccaagtggtcatccaatggctacttttactctgggaaaatcacacgagatgtcggagctgggaagtataaattgctctttgatgatgggtacgaatgtgatgtgttgggcaaagacattctgttatgtgaccccatcccgctggacactgaagtgacggccctctcggaggatgagtatttcagtgcaggagtggtgaaaggacataggaaggagtctggggaactgtactacagcattgaaaaagaaggccaaagaaagtggtataagcgaatggctgtcatcctgtccttggagcaaggaaacagactgagagagcagtatgggcttggcccctatgaagcagtaacacctcttacaaaggcagcagatatcagcttagacaatttggtggaagggaagcggaaacggcgcagtaacgtcagctccccagccacccctactgcctccagtagcagcagcacaacccctacccgaaagatcacagaaagtcctcgtgcctccatgggagttctctcaggcaaaagaaaacttatcacttctgaagaggaacggtcccctgccaagcgaggtcgcaagtctgccacagtaaaacctggtgcagtaggggcaggagagtttgtgagcccctgtgagagtggagacaacaccggtgaaccctctgccctggaagagcagagagggcctttgcctctcaacaagaccttgtttctgggctacgcatttctccttaccatggccacaaccagtgacaagttggccagccgctccaaactgccagatggtcctacaggaagcagtgaagaagaggaggaatttttggaaattcctcctttcaacaagcagtatacagaatcccagcttcgagcaggagctggctatatccttgaagatttcaatgaagcccagtgtaacacagcttaccagtgtcttctaattgcggatcagcattgtcgaacccggaagtacttcctgtgccttgccagtgggattccttgtgtgtctcatgtctgggtccatgatagttgccatgccaaccagctccagaactaccgtaattatctgttgccagctgggtacagccttgaggagcaaagaattctggactggcaaccccgtgaaaatcctttccagaatctgaaggtactcttggtatcagaccaacagcagaacttcctggagctctggtctgagatcctcatgactggtggtgcagcctctgtgaagcagcaccattcaagtgcccataacaaagatattgctttaggggtatttgatgtggtggtgacggacccctcatgcccagcctcggtgctgaagtgtgctgaagcattgcagctgcctgtggtgtcacaagagtgggtgatccagtgcctcattgttggggagagaattggattcaagcagcatccaaaatataaacacgattatgtttctcactaaagatacttggtcttactggttttattccctgctatcgtggagattgtgttttaaccaggttttaaatgtgtcttgtgtgtaactggattccttgcatggatcttgtatatagttttatttgctgaacttttatgataaaataaatgttgaatctctttggttgtagtaactgggatttcttcatctgtttttttgagcttaatctcagaacaaatgacaagacatagtactttctctgagtctttcaacaggcttattcacttacggaggacagctcaccaaggaaattgaaaagttaagagtgaactttattctgtggcatcattcccaaaaggttattccagggtgtctaaaatgctatgcttgcagaaactcagtttaaggtaggtgaaggcccagattaacagttgtgccaaaagttgagtggaattgggcacagctctgtttcctgacagttaaaaaagacctcatgctctctctctgagctgagatcacagctcacctgtgggtactccccaactcttagagctaaagggagaacgaaaggaccaactgccatgaagggacagtgaccataagcttgatggaatgaccttccgtaagataaacatgggaagcacaagtgagaacacctggaaatgttacacgttctagtcaaagacccaatattattattattattattgtcacaatagctggaagcagttccttcccttcctctggcatcactgatccctgc

SEQ ID NO: 446827 - DNA, 622 bp, Homo sapiens
acagcggcgacctagggatcgatctggagggacttggggagcgtgcagagacctctagctcgagcgcgagggacctcccgccgggatgcctggggagcagatggaccctactggaagtcagttggattcagatttctctcagcaagatactccttgcctgataattgaagattctcagcctgaaagccaggttctagaggatgattctggttctcacttcagtatgctatctcgacaccttcctaatctccagacgcacaaagaaaatcctgtgttgaaaaaaaaaaattgtgtggggcgcgggccggggcccccggagaagggtttttttaagacaccaactgtggtgtggggcggcgcggacccccaagagtagaggttacggtgaggcaagcgtggcgacacaaagtgtgctcccccaagagggaacaagcccggggcaagagaaagaggggccggggagtatctccacacccaacataagaaaaggccccggggggacacccggaggtgtttgggaacaacactacgaagacgggaggttcagcgagcacacgaacggctcctcacagaggggggccccaggacaggcccgaaatcaaattagccgcgcggggtagcg

SEQ ID NO: 446828 - DNA, 6187 bp, Homo sapiens
acagcggcgacctagggatcgatctggagggacttggggagcgtgcagagacctctagctcgagcgcgagggacctcccgccgggatgcctggggagcagatggaccctactggaagtcagttggattcagatttctctcagcaagatactccttgcctgataattgaagattctcagcctgaaagccaggttctagaggatgattctggttctcacttcagtatgctatctcgacaccttcctaatctccagacgcacaaagaaaatcctgtgttggatgttgtgtccaatcctgaacaaacagctggagaagaacgaggagacggtaatagtgggttcaatgaacatttgaaagaaaacaaggttgcagaccctgtggattcttctaacttggacacatgtggttccatcagtcaggtcattgagcagttacctcagccaaacaggacaagcagtgttctgggaatgtcagtggaatctgctcctgctgtggaggaagagaagggagaagagttggaacagaaggagaaagagaaggaagaagatacttcaggcaatactacacattcccttggtgctgaagatactgcctcatcacagttgggttttggggttctggaactctcccagagccaggatgttgaggaaaatactgtgccatatgaagtggacaaagagcagctacaatcagtaaccaccaactctggttataccaggctgtctgatgtggatgctaatactgcaattaagcatgaagaacagtccaacgaagatatccccatagcagaacagtccagcaaggacatccctgtgacagcacagcccagtaaggatgtacatgttgtaaaagagcaaaatccaccacctgcaaggtcagaggacatgccttttagccccaaagcatctgttgctgctatggaagcaaaagaacagttgtctgcacaagaacttatggaaagtggactgcagattcagaagtcaccagagcctgaggttttgtcaactcaggaagacttgtttgaccagagcaataaaacagtatcttctgatggttgctctactccttcaagggaggaaggtgggtgttctttggcttccactcctgccaccactctgcatctcctgcagctctctggtcagaggtcccttgttcaggacagtctttccacgaattcttcagatcttgttgctccttctcctgatgctttccgatctactccttttatcgttcctagcagtcccacagagcaagaagggagacaagataagccaatggacacgtcagtgttatctgaagaaggaggagagccttttcagaagaaacttcaaagtggtgaaccagtggagttagaaaacccccctctcctgcctgagtccactgtatcaccacaagcctcaacaccaatatctcagagcacaccagtcttccctcctgggtcacttcctatcccatcccagcctcagttttctcatgacatttttattccttccccaagtctggaagaacaatcaaatgatgggaagaaagatggagatatgcatagttcatctttgacagttgagtgttctaaaacttcagagattgaaccaaagaattcccctgaggatcttgggctatctttgacaggggattcttgcaagttgatgctttctacaagtgaatatagtcagtccccaaagatggagagcttgagttctcacagaattgatgaagatggagaaaacacacagattgaggatacggaacccatgtctccagttctcaattctaaatttgttcctgctgaaaatgatagtatcctgatgaatccagcacaggatggtgaagtacaactgagtcagaatgatgacaaaacaaagggagatgatacagacaccagggatgacattagtattttagccactggttgcaagggcagagaagaaacggtagcagaagatgtttgtattgatctcacttgtgattcggggagtcaggcagttccgtcaccagctactcgatctgaggcactttctagtgtgttagatcaggaggaagctatggaaattaaagaacaccatccagaggaggggtcttcagggtctgaggtggaagaaatccctgagacaccttgtgaaagtcaaggagaggaactcaaagaagaaaatatggagagtgttccgttgcacctttctctgactgaaactcagtcccaagggttgtgtcttcaaaaggaaatgccaaaaaaagaatgctcagaagctatggaagttgaaaccagtgtgattagtattgattcccctcaaaagttggcaatacttgaccaagaattggaacataaggaacaggaagcttgggaagaagctacttcagaggactccagtgttgtcattgtagatgtgaaagagccatctcccagagttgatgtttcttgtgaacctttggagggagtggagaagtgctcagattcccagtcatgggaggatattgctccagaaatagaaccatgtgctgagaatagattagacaccaaggaagaaaagagtgtagaatatgaaggagatctgaaatcagggactgcagaaacagaacctgtagagcaagattcttcacagccttccttacctttagtgagagcagatgatcctttaagacttgaccaggagttgcagcagccccaaactcaggagaaaacaagtaattcattaacagaagactcaaaaatggctaatgcaaagcagctaagctcagatgcagaggcccagaagctggggaagccctctgcccatgcctcacaaagcttctgtgaaagttctagtgaaaccccatttcatttcactttgcctaaagaaggtgatatcatcccaccattgactggtgcaaccccacctcttattgggcacctaaaattggagcccaagagacacagtactcctattggtattagcaactatccagaaagcaccatagcaaccagtgatgtcatgtctgaaagcatggtggagacccatgatcccatacttgggagtggaaaaggggattctggggctgccccagacgtggatgataaattatgtctaagaatgaaactggttagtcctgagactgaggcgagtgaagagtctttgcagttcaacctggaaaagcctgcaactggtgaaagaaaaaatggatctactgctgttgctgagtctgttgccagtccccagaagaccatgtctgtgttgagctgtatctgtgaagccaggcaagagaatgaggctcgaagtgaggatccccccaccacacccatcagggggaacttgctccactttccaagttctcaaggagaagaggagaaagaaaaattggagggtgaccatacaatcaggcagagtcaacagcctatgaagcccattagtcctgtcaaggaccctgtttctcctgcttcccagaagatggtcatacaagggccatccagtcctcaaggagaggcaatggtgacagatgtgctagaagaccagaaagaaggacggagtactaataaggaaaatcctagtaaggccttgattgaaaggcccagccaaaataacataggaatccaaaccatggagtgttccttgagggtcccagaaactgtttcagcagcaacccagactataaagaatgtgtgtgagcaggggaccagtacagtggaccagaactttggaaagcaagatgccacagttcagactgagagggggagtggtgagaaaccagtcagtgctcctggggatgatacagagtcgctccatagccagggagaagaagagtttgatatgcctcagcctccacatggccatgtcttacatcgtcacatgagaacaatccgggaagtacgcacacttgtcactcgtgtcattacagatgtgtattatgtggatggaacagaagtagaaagaaaagtaactgaggagactgaagagccaattgtagagtgtcaggagtgtgaaactgaagtttccccttcacagactgggggctcctcaggtgacctgggggatatcagctccttctcctccaaggcatccagcttacaccgcacatcaagtgggacaagtctctcagctatgcacagcagtggaagctcagggaaaggagccggaccactcagagggaaaaccagcgggacagaacccgcagattttgccttacccagctcccgaggaggcccaggaaaactgagtcctagaaaaggggtcagtcagacagggacgccagtgtgtgaggaggatggtgatgcaggccttggcatcagacagggagggaaggctccagtcacgcctcgtgggcgtgggcgaaggggccgcccaccttctcggaccactggaaccagagaaacagctgtgcctggccccttgggcatagaggacatttcacctaacttgtcaccagatgataaatccttcagccgtgtcgtgccccgagtgccagactccaccagacgaacagatgtgggtgctggtgctttgcgtcgtagtgactctccagaaattcctttccaggctgctgctggcccttctgatggcttagatgcctcctctccaggaaatagctttgtagggctccgtgttgtagccaagtggtcatccaatggctacttttactctgggaaaatcacacgagatgtcggagctgggaagtataaattgctctttgatgatgggtacgaatgtgatgtgttgggcaaagacattctgttatgtgaccccatcccgctggacactgaagtgacggccctctcggaggatgagtatttcagtgcaggagtggtgaaaggacataggaaggagtctggggaactgtactacagcattgaaaaagaaggccaaagaaagtggtataagcgaatggctgtcatcctgtccttggagcaaggaaacagactgagagagcagtatgggcttggcccctatgaagcagtaacacctcttacaaaggcagcagatatcagcttagacaatttggtggaagggaagcggaaacggcgcagtaacgtcagctccccagccacccctactgcctccagtagcagcagcacaacccctacccgaaagatcacagaaagtcctcgtgcctccatgggagttctctcaggcaaaagaaaacttatcacttctgaagaggaacggtcccctgccaagcgaggtcgcaagtctgccacagtaaaacctggtgcagtaggggcaggagagtttgtgagcccctgtgagagtggagacaacaccggtgaaccctctgccctggaagagcagagagggcctttgcctctcaacaagaccttgtttctgggctacgcatttctccttaccatggccacaaccagtgacaagttggccagccgctccaaactgccagatggtcctacaggaagcagtgaagaagaggaggaatttttggaaattcctcctttcaacaagcagtatacagaatcccagcttcgagcaggagctggctatatccttgaagatttcaatgaagcccagtgtaacacagcttaccagtgtcttctaattgcggatcagcattgtcgaacccggaagtacttcctgtgccttgccagtgggattccttgtgtgtctcatgtctgggtccatgatagttgccatgccaaccagctccagaactaccgtaattatctgttgccagctgggtacagccttgaggagcaaagaattctggactggcaaccccgtgaaaatcctttccagaatctgaaggtactcttggtatcagaccaacagcagaacttcctggagctctggtctgagatcctcatgactggtggtgcagcctctgtgaagcagcaccattcaagtgcccataacaaagatattgctttaggggtatttgatgtggtggtgacggacccctcatgcccagcctcggtgctgaagtgtgctgaagcattgcagctgcctgtggtgtcacaagagtgggtgatccagtgcctcattgttggggagagaattggattcaagcagcatccaaaatataaacacgattatgtttctcactaaagatacttggtcttactggttttattccctgctatcgtggagattgtgttttaaccaggttttaaatgtgtcttgtgtgtaactggattccttgcatggatcttgtatatagttttatttgctgaacttttatgataaaataaatgttgaatctctttggttgtagta

SEQ ID NO: 446829 - DNA, 8488 bp, Homo sapiens
acagcggcgacctagggatcgatctggagggacttggggagcgtgcagagacctctagctcgagcgcgagggacctcccgccgggatgcctggggagcagatggaccctactggaagtcagttggattcagatttctctcagcaagatactccttgcctgataattgaagattctcagcctgaaagccaggttctagaggatgattctggttctcacttcagtatgctatctcgacaccttcctaatctccagacgcacaaagaaaatcctgtgttggatgttgtgtccaatcctgaacaaacagctggagaagaacgaggagacggtaatagtgggttcaatgaacatttgaaagaaaacaaggttgcagaccctgtggattcttctaacttggacacatgtggttccatcagtcaggtcattgagcagttacctcagccaaacaggacaagcagtgttctgggaatgtcagtggaatctgctcctgctgtggaggaagagaagggagaagagttggaacagaaggagaaagagaaggaagaagatacttcaggcaatactacacattcccttggtgctgaagatactgcctcatcacagttgggttttggggttctggaactctcccagagccaggatgttgaggaaaatactgtgccatatgaagtggacaaagagcagctacaatcagtaaccaccaactctggttataccaggctgtctgatgtggatgctaatactgcaattaagcatgaagaacagtccaacgaagatatccccatagcagaacagtccagcaaggacatccctgtgacagcacagcccagtaaggatgtacatgttgtaaaagagcaaaatccaccacctgcaaggtcagaggacatgccttttagccccaaagcatctgttgctgctatggaagcaaaagaacagttgtctgcacaagaacttatggaaagtggactgcagattcagaagtcaccagagcctgaggttttgtcaactcaggaagacttgtttgaccagagcaataaaacagtatcttctgatggttgctctactccttcaagggaggaaggtgggtgttctttggcttccactcctgccaccactctgcatctcctgcagctctctggtcagaggtcccttgttcaggacagtctttccacgaattcttcagatcttgttgctccttctcctgatgctttccgatctactccttttatcgttcctagcagtcccacagagcaagaagggagacaagataagccaatggacacgtcagtgttatctgaagaaggaggagagccttttcagaagaaacttcaaagtggtgaaccagtggagttagaaaacccccctctcctgcctgagtccactgtatcaccacaagcctcaacaccaatatctcagagcacaccagtcttccctcctgggtcacttcctatcccatcccagcctcagttttctcatgacatttttattccttccccaagtctggaagaacaatcaaatgatgggaagaaagatggagatatgcatagttcatctttgacagttgagtgttctaaaacttcagagattgaaccaaagaattcccctgaggatcttgggctatctttgacaggggattcttgcaagttgatgctttctacaagtgaatatagtcagtccccaaagatggagagcttgagttctcacagaattgatgaagatggagaaaacacacagattgaggatacggaacccatgtctccagttctcaattctaaatttgttcctgctgaaaatgatagtatcctgatgaatccagcacaggatggtgaagtacaactgagtcagaatgatgacaaaacaaagggagatgatacagacaccagggatgacattagtattttagccactggttgcaagggcagagaagaaacggtagcagaagatgtttgtattgatctcacttgtgattcggggagtcaggcagttccgtcaccagctactcgatctgaggcactttctagtgtgttagatcaggaggaagctatggaaattaaagaacaccatccagaggaggggtcttcagggtctgaggtggaagaaatccctgagacaccttgtgaaagtcaaggagaggaactcaaagaagaaaatatggagagtgttccgttgcacctttctctgactgaaactcagtcccaagggttgtgtcttcaaaaggaaatgccaaaaaaagaatgctcagaagctatggaagttgaaaccagtgtgattagtattgattcccctcaaaagttggcaatacttgaccaagaattggaacataaggaacaggaagcttgggaagaagctacttcagaggactccagtgttgtcattgtagatgtgaaagagccatctcccagagttgatgtttcttgtgaacctttggagggagtggagaagtgctcagattcccagtcatgggaggatattgctccagaaatagaaccatgtgctgagaatagattagacaccaaggaagaaaagagtgtagaatatgaaggagatctgaaatcagggactgcagaaacagaacctgtagagcaagattcttcacagccttccttacctttagtgagagcagatgatcctttaagacttgaccaggagttgcagcagccccaaactcaggagaaaacaagtaattcattaacagaagactcaaaaatggctaatgcaaagcagctaagctcagatgcagaggcccagaagctggggaagccctctgcccatgcctcacaaagcttctgtgaaagttctagtgaaaccccatttcatttcactttgcctaaagaaggtgatatcatcccaccattgactggtgcaaccccacctcttattgggcacctaaaattggagcccaagagacacagtactcctattggtattagcaactatccagaaagcaccatagcaaccagtgatgtcatgtctgaaagcatggtggagacccatgatcccatacttgggagtggaaaaggggattctggggctgccccagacgtggatgataaattatgtctaagaatgaaactggttagtcctgagactgaggcgagtgaagagtctttgcagttcaacctggaaaagcctgcaactggtgaaagaaaaaatggatctactgctgttgctgagtctgttgccagtccccagaagaccatgtctgtgttgagctgtatctgtgaagccaggcaagagaatgaggctcgaagtgaggatccccccaccacacccatcagggggaacttgctccactttccaagttctcaaggagaagaggagaaagaaaaattggagggtgaccatacaatcaggcagagtcaacagcctatgaagcccattagtcctgtcaaggaccctgtttctcctgcttcccagaagatggtcatacaagggccatccagtcctcaaggagaggcaatggtgacagatgtgctagaagaccagaaagaaggacggagtactaataaggaaaatcctagtaaggccttgattgaaaggcccagccaaaataacataggaatccaaaccatggagtgttccttgagggtcccagaaactgtttcagcagcaacccagactataaagaatgtgtgtgagcaggggaccagtacagtggaccagaactttggaaagcaagatgccacagttcagactgagagggggagtggtgagaaaccagtcagtgctcctggggatgatacagagtcgctccatagccagggagaagaagagtttgatatgcctcagcctccacatggccatgtcttacatcgtcacatgagaacaatccgggaagtacgcacacttgtcactcgtgtcattacagatgtgtattatgtggatggaacagaagtagaaagaaaagtaactgaggagactgaagagccaattgtagagtgtcaggagtgtgaaactgaagtttccccttcacagactgggggctcctcaggtgacctgggggatatcagctccttctcctccaaggcatccagcttacaccgcacatcaagtgggacaagtctctcagctatgcacagcagtggaagctcagggaaaggagccggaccactcagagggaaaaccagcgggacagaacccgcagattttgccttacccagctcccgaggaggcccaggaaaactgagtcctagaaaaggggtcagtcagacagggacgccagtgtgtgaggaggatggtgatgcaggccttggcatcagacagggagggaaggctccagtcacgcctcgtgggcgtgggcgaaggggccgcccaccttctcggaccactggaaccagagaaacagctgtgcctggccccttgggcatagaggacatttcacctaacttgtcaccagatgataaatccttcagccgtgtcgtgccccgagtgccagactccaccagacgaacagatgtgggtgctggtgctttgcgtcgtagtgactctccagaaattcctttccaggctgctgctggcccttctgatggcttagatgcctcctctccaggaaatagctttgtagggctccgtgttgtagccaagtggtcatccaatggctacttttactctgggaaaatcacacgagatgtcggagctgggaagtataaattgctctttgatgatgggtacgaatgtgatgtgttgggcaaagacattctgttatgtgaccccatcccgctggacactgaagtgacggccctctcggaggatgagtatttcagtgcaggagtggtgaaaggacataggaaggagtctggggaactgtactacagcattgaaaaagaaggccaaagaaagtggtataagcgaatggctgtcatcctgtccttggagcaaggaaacagactgagagagcagtatgggcttggcccctatgaagcagtaacacctcttacaaaggcagcagatatcagcttagacaatttggtggaagggaagcggaaacggcgcagtaacgtcagctccccagccacccctactgcctccagtagcagcagcacaacccctacccgaaagatcacagaaagtcctcgtgcctccatgggagttctctcaggcaaaagaaaacttatcacttctgaagaggaacggtcccctgccaagcgaggtcgcaagtctgccacagtaaaacctggtgcagtaggggcaggagagtttgtgagcccctgtgagagtggagacaacaccggtgaaccctctgccctggaagagcagagagggcctttgcctctcaacaagaccttgtttctgggctacgcatttctccttaccatggccacaaccagtgacaagttggccagccgctccaaactgccagatggtcctacaggaagcagtgaagaagaggaggaatttttggaaattcctcctttcaacaagcagtatacagaatcccagcttcgagcaggagctggctatatccttgaagatttcaatgaagcccaggtgaggagtttctttgtgtaacctaatatagtggcaatgataagagccaacttgctgtgttgagaagaggcctgggaggggttggggaacctggataaagtagccagagatttcaggaactgagaaactgccaaaatgtttttgcatgaaatagaatttttgttgtgtatagggaagagaaggtaggaccttgggttagttaatggctatggttctgttgctgggacaaaagaagattgatgtttatgtttagtagtagaaacccctattagggttgctgatttttagcctgaaaggctgagttcataggttttggttgtccgttgaggatttaggtcctcagtatgctgcaggtgaggcagagagaacatctatggaaattacttgggccttccagtgagaagagtggccttgggcaggatagactaaatcacattttgggtagtagttgggagtcttcagatctgctcttcatggctcattatggctgctgcttaggagctttccacagaagtcaccaaacccattggctctgcttcttttcttgcagtgtaacacagcttaccagtgtcttctaattgcggatcagcattgtcgaacccggaagtacttcctgtgccttgccagtgggattccttgtgtgtctcatgtctgggtccatgatagttgccatgccaaccagctccagaactaccgtaattatctgttgccagctgggtacagccttgaggagcaaagaattctggactggtaagtatttgaagcccatccagaattgtataggcaggaggacagcaagctttggagggaagagaatctaggtgagagagtaaagctttctagaaattggaatgtctgtgggataaatttgagtgggtttgaaatgacttcaggagtttatctagtttatttccctaggttacattggctaggaaccttttgcaaatgtgtgaagatttgtatataggttcaatattctcaacctgtaaagtcagagaactaagttttaagcaagcattaaaaatatataggctcaggagcatgatttggattattctcagccccagaacaaacatggaaattagaaagccaggaatgcaaggaatacagatcattcatagaaagaaggaagagaagggggaccctaatatagggcttagttttttaagatgaagtcttgctctgtcacctaggctggagtacagtggcgcagtgacgacttactgcagcctcaacctcccaggctgaagtgatccccctacctcagcctcccaagctgctgggactacaggcactcgccaccacacccagctaatttttttgttgtcttttgtagagatggggtctcaccacattgcccaggctggtctcgaactcccaggcccaagagatccaaccacgacagcctcccaaagtgctgggattacaggcttgagacactatgtctgatggggcatttatttttgaaagcattcagatgtacatgagtccctttgcagaaaggcagtttgttggatattacttgtcatgctaaggtcctttcctgtctccttcataggcaaccccgtgaaaatcctttccagaatctgaaggtactcttggtatcagaccaacagcagaacttcctggagctctggtctgagatcctcatgactggtggtgcagcctctgtgaagcagcaccattcaagtgcccataacaaaggtacctgaaagagtgtgtgtagtgtctttgttccagggatctccttagacctgtaggtgttaggccttgtggtccaaggctcaggcctaataggttgaccgtatccatgtttcttagagaagaaaagtaccaccttcaagaggtgagtcaacataagtgaagcactggacgtatatttgttaaatatttctacaaggtcagcacatagtgattataactctgcctttggtcatgatcagtagcagtgtgtttgacataatagggctttggtttgtgcagagtgggatgtattggttagaatcaaatctctctttctaatggagggctaagttgagtgtcctttccttcttcactttcccttgctccttgcagatattgctttaggggtatttgatgtggtggtgacggacccctcatgcccagcctcggtgctgaagtgtgctgaagcattgcagctgcctgtggtgtcacaagagtgggtgatccagtgcctcattgttggggagagaattggattcaagcagcatccaaaatataaacacgattatgtttctcactaaagatacttggtcttactggttttattccctgctatcgtggagattgtgttttaaccaggttttaaatgtgtcttgtgtgtaactggattccttgcatggatcttgtatatagttttatttgctgaacttttatgataaaataaatgttgaatctctttggttgtagtaactgggatttcttcatctgtttttttgagcttaatctcagaacaaatgacaagacatagtactttctctgagtctttcaacaggcttattcacttacggaggacagctcaccaaggaaattgaaaagttaagagtgaactttattctgtggcatcattcccaaaaggttattccagggtgtctaaaatgctatgcttgcagaaactcagtttaaggtaggtgaaggcccagattaacagttgtgccaaaagttgagtggaattgggcacagctctgtttcctgacagttaaaaaagacctcatgctctctctctgagctgagatcacagctcacctgtgggtactccccaactcttagagctaaagggagaacgaaaggaccaactgccatgaagggacagtgaccataagcttgatggaatgaccttccgtaagataaacatgggaagcacaagtgagaacacctggaaatgttacacgttctagtcaaagacccaatattattattattattattgtcacaatagctggaagcagttccttcccttcctctggcatcactgatccctgc

SEQ ID NO: 446830 - DNA, 7917 bp, Homo sapiens
acagcggcgacctagggatcgatctggagggacttggggagcgtgcagagacctctagctcgagcgcgagggacctcccgccgggatgcctggggagcagatggaccctactggaagtcagttggattcagatttctctcagcaagatactccttgcctgataattgaagattctcagcctgaaagccaggttctagaggatgattctggttctcacttcagtatgctatctcgacaccttcctaatctccagacgcacaaagaaaatcctgtgttggatgttgtgtccaatcctgaacaaacagctggagaagaacgaggagacggtaatagtgggttcaatgaacatttgaaagaaaacaaggttgcagaccctgtggattcttctaacttggacacatgtggttccatcagtcaggtcattgagcagttacctcagccaaacaggacaagcagtgttctgggaatgtcagtggaatctgctcctgctgtggaggaagagaagggagaagagttggaacagaaggagaaagagaaggaagaagatacttcaggcaatactacacattcccttggtgctgaagatactgcctcatcacagttgggttttggggttctggaactctcccagagccaggatgttgaggaaaatactgtgccatatgaagtggacaaagagcagctacaatcagtaaccaccaactctggttataccaggctgtctgatgtggatgctaatactgcaattaagcatgaagaacagtccaacgaagatatccccatagcagaacagtccagcaaggacatccctgtgacagcacagcccagtaaggatgtacatgttgtaaaagagcaaaatccaccacctgcaaggtcagaggacatgccttttagccccaaagcatctgttgctgctatggaagcaaaagaacagttgtctgcacaagaacttatggaaagtggactgcagattcagaagtcaccagagcctgaggttttgtcaactcaggaagacttgtttgaccagagcaataaaacagtatcttctgatggttgctctactccttcaagggaggaaggtgggtgttctttggcttccactcctgccaccactctgcatctcctgcagctctctggtcagaggtcccttgttcaggacagtctttccacgaattcttcagatcttgttgctccttctcctgatgctttccgatctactccttttatcgttcctagcagtcccacagagcaagaagggagacaagataagccaatggacacgtcagtgttatctgaagaaggaggagagccttttcagaagaaacttcaaagtggtgaaccagtggagttagaaaacccccctctcctgcctgagtccactgtatcaccacaagcctcaacaccaatatctcagagcacaccagtcttccctcctgggtcacttcctatcccatcccagcctcagttttctcatgacatttttattccttccccaagtctggaagaacaatcaaatgatgggaagaaagatggagatatgcatagttcatctttgacagttgagtgttctaaaacttcagagattgaaccaaagaattcccctgaggatcttgggctatctttgacaggggattcttgcaagttgatgctttctacaagtgaatatagtcagtccccaaagatggagagcttgagttctcacagaattgatgaagatggagaaaacacacagattgaggatacggaacccatgtctccagttctcaattctaaatttgttcctgctgaaaatgatagtatcctgatgaatccagcacaggatggtgaagtacaactgagtcagaatgatgacaaaacaaagggagatgatacagacaccagggatgacattagtattttagccactggttgcaagggcagagaagaaacggtagcagaagatgtttgtattgatctcacttgtgattcggggagtcaggcagttccgtcaccagctactcgatctgaggcactttctagtgtgttagatcaggaggaagctatggaaattaaagaacaccatccagaggaggggtcttcagggtctgaggtggaagaaatccctgagacaccttgtgaaagtcaaggagaggaactcaaagaagaaaatatggagagtgttccgttgcacctttctctgactgaaactcagtcccaagggttgtgtcttcaaaaggaaatgccaaaaaaagaatgctcagaagctatggaagttgaaaccagtgtgattagtattgattcccctcaaaagttggcaatacttgaccaagaattggaacataaggaacaggaagcttgggaagaagctacttcagaggactccagtgttgtcattgtagatgtgaaagagccatctcccagagttgatgtttcttgtgaacctttggagggagtggagaagtgctcagattcccagtcatgggaggatattgctccagaaatagaaccatgtgctgagaatagattagacaccaaggaagaaaagagtgtagaatatgaaggagatctgaaatcagggactgcagaaacagaacctgtagagcaagattcttcacagccttccttacctttagtgagagcagatgatcctttaagacttgaccaggagttgcagcagccccaaactcaggagaaaacaagtaattcattaacagaagactcaaaaatggctaatgcaaagcagctaagctcagatgcagaggcccagaagctggggaagccctctgcccatgcctcacaaagcttctgtgaaagttctagtgaaaccccatttcatttcactttgcctaaagaaggtgatatcatcccaccattgactggtgcaaccccacctcttattgggcacctaaaattggagcccaagagacacagtactcctattggtattagcaactatccagaaagcaccatagcaaccagtgatgtcatgtctgaaagcatggtggagacccatgatcccatacttgggagtggaaaaggggattctggggctgccccagacgtggatgataaattatgtctaagaatgaaactggttagtcctgagactgaggcgagtgaagagtctttgcagttcaacctggaaaagcctgcaactggtgaaagaaaaaatggatctactgctgttgctgagtctgttgccagtccccagaagaccatgtctgtgttgagctgtatctgtgaagccaggcaagagaatgaggctcgaagtgaggatccccccaccacacccatcagggggaacttgctccactttccaagttctcaaggagaagaggagaaagaaaaattggagggtgaccatacaatcaggcagagtcaacagcctatgaagcccattagtcctgtcaaggaccctgtttctcctgcttcccagaagatggtcatacaagggccatccagtcctcaaggagaggcaatggtgacagatgtgctagaagaccagaaagaaggacggagtactaataaggaaaatcctagtaaggccttgattgaaaggcccagccaaaataacataggaatccaaaccatggagtgttccttgagggtcccagaaactgtttcagcagcaacccagactataaagaatgtgtgtgagcaggggaccagtacagtggaccagaactttggaaagcaagatgccacagttcagactgagagggggagtggtgagaaaccagtcagtgctcctggggatgatacagagtcgctccatagccagggagaagaagagtttgatatgcctcagcctccacatggccatgtcttacatcgtcacatgagaacaatccgggaagtacgcacacttgtcactcgtgtcattacagatgtgtattatgtggatggaacagaagtagaaagaaaagtaactgaggagactgaagagccaattgtagagtgtcaggagtgtgaaactgaagtttccccttcacagactgggggctcctcaggtgacctgggggatatcagctccttctcctccaaggcatccagcttacaccgcacatcaagtgggacaagtctctcagctatgcacagcagtggaagctcagggaaaggagccggaccactcagagggaaaaccagcgggacagaacccgcagattttgccttacccagctcccgaggaggcccaggaaaactgagtcctagaaaaggggtcagtcagacagggacgccagtgtgtgaggaggatggtgatgcaggccttggcatcagacagggagggaaggctccagtcacgcctcgtgggcgtgggcgaaggggccgcccaccttctcggaccactggaaccagagaaacagctgtgcctggccccttgggcatagaggacatttcacctaacttgtcaccagatgataaatccttcagccgtgtcgtgccccgagtgccagactccaccagacgaacagatgtgggtgctggtgctttgcgtcgtagtgactctccagaaattcctttccaggctgctgctggcccttctgatggcttagatgcctcctctccaggaaatagctttgtagggctccgtgttgtagccaagtggtcatccaatggctacttttactctgggaaaatcacacgagatgtcggagctgggaagtataaattgctctttgatgatgggtacgaatgtgatgtgttgggcaaagacattctgttatgtgaccccatcccgctggacactgaagtgacggccctctcggaggatgagtatttcagtgcaggagtggtgaaaggacataggaaggagtctggggaactgtactacagcattgaaaaagaaggccaaagaaagtggtataagcgaatggctgtcatcctgtccttggagcaaggaaacagactgagagagcagtatgggcttggcccctatgaagcagtaacacctcttacaaaggcagcagatatcagcttagacaatttggtggaagggaagcggaaacggcgcagtaacgtcagctccccagccacccctactgcctccagtagcagcagcacaacccctacccgaaagatcacagaaagtcctcgtgcctccatgggagttctctcaggcaaaagaaaacttatcacttctgaagaggaacggtcccctgccaagcgaggtcgcaagtctgccacagtaaaacctggtgcagtaggggcaggagagtttgtgagcccctgtgagagtggagacaacaccggtgaaccctctgccctggaagagcagagagggcctttgcctctcaacaagaccttgtttctgggctacgcatttctccttaccatggccacaaccagtgacaagttggccagccgctccaaactgccagatggtcctacaggaagcagtgaagaagaggaggaatttttggaaattcctcctttcaacaagcagtatacagaatcccagcttcgagcaggagctggctatatccttgaagatttcaatgaagcccaggtgaggagtttctttgtgtaacctaatatagtggcaatgataagagccaacttgctgtgttgagaagaggcctgggaggggttggggaacctggataaagtagccagagatttcaggaactgagaaactgccaaaatgtttttgcatgaaatagaatttttgttgtgtatagggaagagaaggtaggaccttgggttagttaatggctatggttctgttgctgggacaaaagaagattgatgtttatgtttagtagtagaaacccctattagggttgctgatttttagcctgaaaggctgagttcataggttttggttgtccgttgaggatttaggtcctcagtatgctgcaggtgaggcagagagaacatctatggaaattacttgggccttccagtgagaagagtggccttgggcaggatagactaaatcacattttgggtagtagttgggagtcttcagatctgctcttcatggctcattatggctgctgcttaggagctttccacagaagtcaccaaacccattggctctgcttcttttcttgcagtgtaacacagcttaccagtgtcttctaattgcggatcagcattgtcgaacccggaagtacttcctgtgccttgccagtgggattccttgtgtgtctcatgtctgggtccatgatagttgccatgccaaccagctccagaactaccgtaattatctgttgccagctgggtacagccttgaggagcaaagaattctggactggtaagtatttgaagcccatccagaattgtataggcaggaggacagcaagctttggagggaagagaatctaggtgagagagtaaagctttctagaaattggaatgtctgtgggataaatttgagtgggtttgaaatgacttcaggagtttatctagtttatttccctaggttacattggctaggaaccttttgcaaatgtgtgaagatttgtatataggttcaatattctcaacctgtaaagtcagagaactaagttttaagcaagcattaaaaatatataggctcaggagcatgatttggattattctcagccccagaacaaacatggaaattagaaagccaggaatgcaaggaatacagatcattcatagaaagaaggaagagaagggggaccctaatatagggcttagttttttaagatgaagtcttgctctgtcacctaggctggagtacagtggcgcagtgacgacttactgcagcctcaacctcccaggctgaagtgatccccctacctcagcctcccaagctgctgggactacaggcactcgccaccacacccagctaatttttttgttgtcttttgtagagatggggtctcaccacattgcccaggctggtctcgaactcccaggcccaagagatccaaccacgacagcctcccaaagtgctgggattacaggcttgagacactatgtctgatggggcatttatttttgaaagcattcagatgtacatgagtccctttgcagaaaggcagtttgttggatattacttgtcatgctaaggtcctttcctgtctccttcataggcaaccccgtgaaaatcctttccagaatctgaaggtactcttggtatcagaccaacagcagaacttcctggagctctggtctgagatcctcatgactggtggtgcagcctctgtgaagcagcaccattcaagtgcccataacaaaggtacctgaaagagtgtgtgtagtgtctttgttccagggatctccttagacctgtaggtgttaggccttgtggtccaaggctcaggcctaataggttgaccgtatccatgtttcttagagaagaaaagtaccaccttcaagaggtgagtcaacataagtgaagcactggacgtatatttgttaaatatttctacaaggtcagcacatagtgattataactctgcctttggtcatgatcagtagcagtgtgtttgacataatagggctttggtttgtgcagagtgggatgtattggttagaatcaaatctctctttctaatggagggctaagttgagtgtcctttccttcttcactttcccttgctccttgcagatattgctttaggggtatttgatgtggtggtgacggacccctcatgcccagcctcggtgctgaagtgtgctgaagcattgcagctgcctgtggtgtcacaagagtgggtgatccagtgcctcattgttggggagagaattggattcaagcagcatccaaaatataaacacgattatgtttctcactaaagatacttggtcttactggttttattccctgctatcgtggagattgtgttttaaccaggttttaaatgtgtcttgtgtgtaactggattccttgcatggatcttgtatatagttttatttgctgaacttttatgataaaataaatgttgaatctctttggttgtagta
